United States Patent Application Publication US 2018/0126003 A1 - sequence listing, part 84

SEQ ID NO: 152342 - DNA, 10383 bp, Artificial Sequence
  derived and/or modified sequence
atggagcggagcggctgggcccggcagaccttcctgctggccctgctcctcggcgctacactcagggccagggctgcggctggctattatccgcgcttcagcccctttttcttcttatgtacgcatcacggagagcttgagggcgacggggagcagggagaggtactgatcagtctacacattgcaggtaatccaacctactatgtccccgggcaggagtaccatgttaccatctcaacgtcaactttctttgatggtctgctcgtcaccgggctgtacacatccacctcagtccaggctagtcaaagtatcggaggaagtagtgcattcgggttcgggatcatgtctgaccatcagttcggtaaccagtttatgtgtagtgtggtggcttctcatgtctctcacctcccgacaacaaacctttccttcatttggatcgcccctccagccgggaccggttgcgtcaattttatggccactgccactcaccgcgggcaggtgatcttcaaagatgccctggcacaacagttgtgcgaacagggcgcccccaccgatgtgacagtacacccccacctcgcagagatccactcagactctatcattctaagggatgatttcgactcatatcaccagcttcagcttaaccctaacatctgggtggaatgtaacaactgtgagacaggcgagcagtgcggggcaataatgcacgggaacgccgtgacattctgcgaaccctacgggccacgggaactgatcaccacgggactgaacaccaccacggccagtgttttgcagttttccattggcagcgggagttgtaggttctcctattccgacccaagtataattgttctgtacgcaaagaacaacagcgcagattggattcaacttgagaaaatcagagctccaagcaatgtgagtaccattattcacattctgtacctccctgaagatgccaaaggcgaaaacgtgcagttccagtggaaacaggaaaacttgagggtgggcgaggtatacgaggcttgctgggccctggacaatattctcattataaactctgcacaccgccaagtcgtcttagaagatagcctggaccctgtggacactgggaactggctcttttttcctggcgccacggtgaaacattcatgtcaatctgatggcaattccatttattttcatggcaatgagggttccgagttcaacttcgccaccacgcgggacgtagatttatcaacagaagatattcaggaacaatggagtgaggaattcgaaagccagcctactggatgggacgtgcttggcgccgtgatcggcacggagtgtggaaccattgagtccggcctctctatggtgttcctgaaggacggtgagaggaagttgtgtacaccatccatggacaccacggggtacgggaatctgagattttacttcgtaatgggcggaatctgtgatcccggaaactcccacgagaacgacatcattctgtacgccaagatagaggggcggaaagagcacatcacactagacaccctcagttactctagttataaggtgcccagcctcgtatctgtggttatcaatcccgagctgcagacaccagccaccaaattctgcctgcgccagaagaatcatcaaggacacaatagaaacgtctgggcagtagactttttccatgtccttccagtgctcccttccacgatgagccacatgatccagttcagcatcaacctcggatgcggcacccatcaacccggtaacagtgtctcacttgaattctctaccaatcacggtcgatcctggtctctgctgcacacagaatgtctgcctgagatatgtgctggaccacacctgccgcactcaacagtctattcatctgagaactattctggttggaaccgaatcaccatccctttgccaaacgccgccctgacccgcaatacaaggataagatggcggcagaccggacccatactgggtaacatgtgggccatcgataatgtttacattggccccagctgccttaaattttgttctggtcgaggacagtgtacccgccacgggtgtaagtgtgatcctggcttctctgggccagcctgcgagatggccagtcaaacattccccatgttcatctccgagtccttcggaagctcaagactgagctcttatcacaacttctattccatccgcggcgccgaagtctcctttgggtgtggcgtcctcgcctctggtaaggcattggtctttaataaagacggccgccgccagctgatcacctccttcctagacagctcccagtccagattccttcagtttaccctccggctgggaagcaaatcggttctcagtacttgccgggcaccagaccagcccggtgaaggagtactgctccactacagttacgacaatgggatcacctggaaactcctagaacactactcgtacctcagttaccatgagcccagaatcatttcagtcgagttaccaggtgacgcaaaacaattcggaatccagttcagatggtggcagccataccactcttcacagagagaagacgtgtgggccattgacgaaatcattatgacatctgtactgttcaatagcatttccctggattttaccaatttggttgaagtcacccagtctctgggattttatctcggaaacgtccagccttactgtgggcatgattggacactgtgttttacaggtgactccaaactggcaagtagtatgcggtatgtggagacgcaatccatgcagataggagcatcatatatgatacagttctctctagtcatgggatgcggccagaagtatactccacacatggacaaccaggtaaaattagaatactctacgaaccacgggcttacttggcacctggtccaggaggagtgccttccctcaatgcctagctgtcaggagtttacctccgctagtatctatcatgctagtgagttcacacagtggcgaagggtgatcgtgctactgccccagaaaacctggagctctgcaacgcggtttaggtggagccagtcctactacaccgcacaggatgaatgggccctggactctatttatattgggcaacaatgcccgaatatgtgttcagggcacgggtcatgcgatcatggaatctgtcgctgcgaccagggctaccaaggcactgaatgtcacccagaggctgcacttcctagcaccatcatgtccgattttgagaaccaaaatggctgggaatccgattggcaagaagtaatcggcggggagatcgtcaaacccgagcagggatgcggcgtgatcagctccggtagctccctatattttagcaaagctggaaaaagacagctggtcagttgggacctggacaccagttgggttgatttcgtccagttttacatacagatcgggggcgagtcagccagctgtaacaaacctgattctcgcgaagagggcgttttactccagtatagtaacaacgggggaatccagtggcatttgcttgccgagatgtatttttctgacttctccaagcccaggtttgtgtaccttgagcttccagcagcagcgaagactccttgcacaagatttcgatggtggcagccagtgttttcgggcgaggactacgatcagtgggcggtggatgacattattatcctttctgagaagcaaaagcaaatcattcctgtgatcaaccctaccctgccacaaaatttttatgagaagcccgcatttgactatcccatgaaccagatgagcgtgtggctgatgttagctaacgaggggatggtcaaaaacgaaaccttttgcgctgctaccccatccgcaatgatttttggaaagagcgatggggacaggttcgctgtgaccagggatctgactctaaaaccaggatacgtattgcagttcaaactgaacatcggctgtgcgaaccagtttagttctactgcgccagttctcttacagtatagccacgatgccggaatgtcatggtttcttgtcaaggagggatgttaccccgccagcgccggaaagggatgcgagggcaactcaagggagttatcagaaccaacaatgtaccatacgggcgatttcgaagaatggactcgtataaccatcgttatcccccgcagcctggcctcctctaagacacggtttcgttggatccaggaaagctcttctcagaaaaacgtgccgccttttgggttggatggtgtgtacataagcgaaccctgcccatcgtattgctcaggtcatggcgattgcatcagcggcgtgtgtttttgtgacttagggtacaccgccgcccaggggacgtgcgtgtcaaacgtgcccaatcacaacgaaatgttcgaccgcttcgagggaaagctcagtcctttatggtataaaattaccggcgcccaggtcggaaccggttgtggtaccttaaacgacgggaagagtctgtattttaacgggcccggaaagagagaagcccgaacggtgcctctggatacgcgcaacattaggctcgttcagttttacatccagatcgggtctaagacctccgggattacctgcattaaaccaagaacccggaatgaaggcctgatcgtacagtatagcaatgacaacgggatcctttggcaccttctccgcgagctggactttatgtccttcctggagccccagatcattagtattgatctgcctcaggacgcaaagacccccgccaccgcctttcggtggtggcagccccaacatgggaagcattcagcccagtgggctctggacgatgtgctcataggcatgaacgactcttctcaaactggattccaggacaagtttgatggttcaattgacctgcaggccaattggtataggatccagggcggacaagttgatatcgattgcctcagcatggatactgccctcatattcaccgagaatatcggaaaaccgagatacgcagaaacatgggatttccacgtttctgctagcacatttctccagttcgagatgtctatgggctgctctaaacctttttcaaactcccacagtgtccagctgcagtatagcctaaacaatgggaaagattggcatcttgtgactgaggaatgcgtgcccccaaccatcgggtgcctgcactatacagaatcttctatctatacctccgaacgttttcagaactggaagagaatcaccgtctacctcccgttgagcacaatatcacccagaacgcgatttaggtggatccaggccaattataccgtcggtgccgacagctgggccatcgacaacgtggtcctcgccagcggctgcccatggatgtgttctggtcgcggcatctgtgatgctggacgttgcgtatgcgatagggggtttggggggccttactgcgtaccagtggttccattgccttcaatactcaaggacgatttcaacggcaacttgcacccagatctgtggcccgaggtatacggcgctgagagaggaaacctgaatggggagactatcaaaagtggcacaagtctgatcttcaagggggaaggcctgagaatgctgatatctcgcgacctggactgtaccaatacgatgtatgtccagttttcccttcggttcatcgctaaatctacccccgagcgaagtcacagcattctgctccaattctccatttctggaggtattacctggcatctcatggacgagttctactttcctcagacaacaaatatactgttcattaacgtcccattgccctacacggcacagactaacgcaactagatttcgcctgtggcaaccgtataataatggaaagaaggaggagatttggatcgtggatgatttcataattgatggaaataacgttaacaaccctgtaatgttactggacacatttgactttggaccgcgcgaggataattggtttttctatccaggcgggaatatcggtctttactgcccatattctagtaagggggcaccagaggaagactccgccatggtattcgtgtctaacgaggttggcgaacactccattactaccagagatctgaatgttaatgagaatactatcattcaattcgaaatcaatgtcggatgtagtacggactcctcaagcgcagatccagtgcgcttggaattcagccgggactttggcgccacctggcacctgttgctacccctgtgttatcatagcagctctcacgtctcttctctgtgttccaccgagcatcacccatccagcacgtactacgcagggactatgcaggggtggagaagagaggtcgttcatttcggaaagttacatctctgcggatctgttagatttcgctggtaccaggggttctatcctgcggggagccaaccagtaacctgggctatcgataacgtctacatcggcccacagtgtgaggagatgtgcaatggccaggggtcgtgcattaatggaacaaaatgcatctgtgatcccggctatagtggccctacatgtaaaattagtacaaagaatcccgattttctaaaagatgacttcgagggccagctggagtccgaccgcttcctgctcatgagcggtggcaaaccctctcggaaatgtggcatcctcagctccggcaataacttgtttttcaatgaggacgggctgcgcatgctcatgactcgggacctcgacttaagccatgctaggttcgttcaattcttcatgagactggggtgcggcaaaggagttcctgacccacgctcccagccagtgctcctccaatacagtctgaacggcgggctgagttggtcactcctgcaggaattcctcttttccaattccagtaatgtaggacggtatatcgcactggaaatccccctgaaggcgcggtctggaagtactcgcttgcgctggtggcagccatccgagaatggacacttctacagtccgtgggtcatcgaccagattctgattggagggaacatctcagggaataccgtcctcgaagatgattttactactctggattccaggaaatggttactgcatcccggcgggactaagatgcccgtgtgcggcagcactggtgacgcgctggtttttatagaaaaagcctcgacgcgctacgtcgtttccaccgacgtcgccgtgaacgaagattcctttctccagattgacttcgccgcgtcatgttctgtgaccgatagttgttatgccatcgagctggagtacagtgtggacctgggcctctcttggcaccccttggtgcgtgactgccttccaacaaacgtggaatgttctcgctatcacctccaaagaattctcgtatcagacactttcaataagtggacgagaatcacactgcccctcccaccgtacacaaggagccaagccacacggtttcggtggcaccagccggctccattcgacaaacagcagacctgggctatcgacaacgtgtacattggtgacggttgtatcgatatgtgtagtggacatgggcgttgtattcaaggtaactgtgtgtgtgatgagcagtggggtgggttgtactgcgatgatccggagacctctctgcctacccagttgaaggataatttcaatcgtgcaccatcgtctcagaattggttgactgtgaacggtggtaagctgtcaacagtctgcggcgcggtggcctccggaatggcgctgcatttttctggcggctgctctagattgctcgtcactgttgacctcaacctcacgaatgccgagtttattcagttctacttcatgtacgggtgcctgattacccccaacaatcgtaaccagggagttctcctggagtattctgtgaatggggggattacctggaatttgttaatggagatcttctacgaccaatactccaaaccaggctttgtaaatatcctcctcccccccgatgctaaagagattgctacaaggtttaggtggtggcagcccagacacgacggactggaccagaacgactgggctattgataatgtgctgattagtggaagcgccgatcaacggactgttatgcttgataccttctcttcggcacccgtcccccagcacgagcggagccctgccgatgccggtccagttggtcgaattgcgttcgacatgtttatggaggataagacctctgtgaacgagcactggttattccacgatgattgtacggtggagagattttgcgatagtcccgacggagtcatgctctgtggttcacatgacgggcgggaggtctatgcggtgacgcacgatctgactcctaccgaggggtggattatgcaattcaagatttcagtaggctgtaaggtctccgagaaaatcgcccagaaccagattcacgttcaatacagcacagattttggcgtgtcttggaactatctggtccctcagtgccttcctgcggatcctaagtgcagcggctccgtgagtcagccctctgtattcttccctaccaaaggctggaaacgcattacctaccccctacccgaatcactggtcggaaacccagtaaggttccgcttctaccagaagtacagtgacatgcaatgggccatcgataatttctatctgggtccaggctgtttagataactgtcgcggtcacggtgactgtctgagagagcagtgcatctgcgaccctggctacagcgggccgaattgttacctgacccacaccctgaaaacattcctaaaagagaggtttgactcagaagagatcaagccagatctgtggatgtccctggagggaggctccacctgcactgaatgcggcatacttgctgaagataccgcactgtattttggtggaagcaccgttaggcaggccgtcacgcaggatctcgatttacggggagccaagttcttacagtactgggggcgcatcggttccgagaataatatgacaagctgccacaggcccatctgcagaaaggaaggggtcttactcgactacagtactgatggcgggatcacctggacactgctacacgaaatggattatcagaagtatatctcagtcagacacgactacatcttacttcctgaagatgccctgaccaatacaacgcggctacgttggtggcaaccttttgtcatctcaaatgggatcgtggtttcgggcgtggagagggcccagtgggctctcgacaatatcctgatagggggagccgagataaatcccagccagcttgtggacaccttcgacgatgaaggcacctcacatgaagaaaattggtcattctacccaaacgccgtccgaaccgccggattctgcggcaacccgagtttccatctctactggcccaacaagaagaaggacaagacccacaatgccctgtcatctcgagaacttattatccagcccggttatatgatgcagtttaaaattgtcgtgggctgtgaagccacatcatgtggcgatctgcattcagtcatgttggagtacaccaaagatgctagatccgactcatggcagctcgtccaaacacaatgcctcccatcttcgagtaattctattggctgcagcccctttcagttccatgaagcaaccatctacaatagcgtaaacagctcaagctggaagcgcattactatccagctccctgatcatgtgtcaagctccgctacccagttccggtggatacagaaaggggaagaaactgaaaaacagagctgggctatcgatcatgtgtatatcggggaagcttgcccgaagctgtgcagcggccatggatactgtactacgggggcgatttgcatctgcgacgagagcttccagggggatgactgctcagttttctctcacgacttgccctcgtatatcaaagacaactttgagtcggctcgagtgacagaggccaattgggaaacaatacagggcggtgtcatcggaagcggatgcggacagctcgctccgtacgctcatggcgattcactgtattttaatggctgtcaaattcgccaggccgccaccaagcctctagacttgacccgagcgtcaaaaattatgttcgtactgcagatcggatcaatgagccagaccgattcatgtaactcagatttatcaggccctcacgcagtggacaaggcagttttgttgcagtatagcgtaaacaatggaattacatggcatgttatcgcccagcaccaacctaaggattttacacaagcgcagagggtatcttataatgtgccgctggaggctaggatgaaaggggtgctgctgcggtggtggcagcctaggcacaatggtacagggcacgaccagtgggctctagaccacgtggaggtggtgctgttttccactcggaagcaaaactacatgatgaattttagtagacagcatggcttaagacacttctataatcgcagaaggcggtccctgcgcagatacccttag

SEQ ID NO: 152343 - DNA, 2934 bp, Artificial Sequence
  derived and/or modified sequence
atgtgcagcggccacggccggtgcatccagggcaactgcgtgtgcgacgagcaatggggcgggctttactgtgatgacccagagacctctctccccacgcaacttaaggacaacttcaatagagcaccaagctcgcagaactggctcacagtcaacggaggaaaactgtcgacagtatgtggcgcagttgcatccggaatggctctccatttctccggcggctgttcgcgcctgctggtgacagtcgaccttaatttgacaaacgcagaattcatccagttctatttcatgtacggctgtctgatcacgccaaataatcgaaatcagggcgttcttctggaatactctgtaaacggcgggatcacctggaatcttctgatggaaattttttacgaccaatactctaagccagggttcgtaaacattctgttgccgccagacgcaaaggaaatcgccactcggttccgctggtggcagccccgccatgacgggctggaccagaacgattgggctatcgacaatgtgctcattagtgggagtgccgaccagaggaccgtcatgctcgacacgttttcttccgccccggtgccacaacacgagcggtcaccagccgatgcaggccctgtgggtcgcattgctttcgatatgttcatggaggacaaaaccagcgtgaatgagcattggcttttccatgacgactgcacagtggagcggttctgtgactccccagatggcgtgatgctgtgcgggagccacgatggtcgagaggtttacgctgtcacccacgacctgacaccgacagaagggtggataatgcagtttaagatctctgtggggtgtaaggtgtcagagaagatcgcacagaatcaaattcacgttcaatattccacagatttcggggtgtcatggaactatctggttcctcagtgtctgcctgcggaccccaagtgttcaggatctgtatcccagccttcagttttcttccctaccaaggggtggaaacgaatcacataccccctacctgagtccctagtcggaaacccagtgcgttttcgcttctaccaaaagtattctgatatgcagtgggccatagataacttctatcttggacccgggtgtttggacaattgtagaggccatggcgattgcctccgcgaacagtgcatctgtgaccccggatactcgggcccgaactgttaccttacgcacactttgaagacttttctgaaagaaaggttcgacagcgaagaaataaagcccgacctgtggatgtcccttgaagggggctcaacatgtacagagtgcggcatcctggctgaggatacggctctgtatttcggaggcagtacagttaggcaggccgtgacccaggacctcgatctgagaggggctaaattccttcagtattggggaaggatcgggtctgagaataacatgacatcctgtcatagaccaatctgcagaaaggagggggtgctgctggactatagcactgacggaggaataacatggacgttactgcatgagatggactaccagaaatacatctcagtgaggcacgactatatccttctccccgaagacgctctgacaaacacaacccgcctcaggtggtggcagcctttcgtgatctccaatggcatcgtagtctctggagtcgaacgggcacaatgggcactggacaacatccttattggtggcgccgagattaatccatcgcaactggtggatactttcgacgatgagggtacctcacacgaagagaactggtccttttacccaaacgctgtgcggaccgcaggattttgcggaaacccatcattccatttgtactggccaaataaaaaaaaggataagacacataatgccttaagtagcagggaacttattattcagccaggctacatgatgcagttcaagattgtcgtcggatgcgaagcaacctcctgtggcgacctgcacagcgtaatgctggagtacacaaaagacgcccggagcgattcttggcagcttgttcagacccagtgcctcccgagctccagtaactcgattggatgttccccatttcagttccacgaggcgacaatctataactcggtgaatagcagttcttggaagcgtataacaattcagttaccagaccacgtttccagttcagcaacgcagttccgatggatccagaagggggaggagaccgagaaacagtcttgggcgattgatcacgtctacataggagaagcatgtccaaaactttgctctgggcatggatattgtacaactggtgcaatttgcatttgtgacgaatctttccagggagacgactgctccgtcttctctcatgacctcccctcttacataaaagacaactttgaaagtgccagggtcactgaggccaactgggagacaattcagggaggtgtgattgggtctgggtgtgggcagctcgctccttacgctcacggtgactctttatacttcaacggctgccaaatccggcaggccgcaacaaagccactagatctgacgagggcctctaagataatgtttgtgctgcagatcggttcaatgtcccagaccgatagttgcaatagcgatctctcgggccctcacgcagtggataaggctgttctccttcagtatagtgtcaacaatggaatcacttggcacgttatcgcccagcatcagcctaaggacttcacacaagcacaaagagtgagctacaatgtgccgctggaagctcggatgaagggggtgctgctcaggtggtggcagccccgccacaacgggactggccatgatcagtgggctttggaccacgtggaagtcgtcctcgtgacgacccggaaacagaactacatgatgaatttttcccgccagcacgggctgaggcacttctataataggcgccgccgcagcctgaggcggtatccttag

SEQ ID NO: 152344 - DNA, 10383 bp, Artificial Sequence
  derived and/or modified sequence
atggagcggagcggctgggcccggcagaccttcctgctggccctgctactgggagccactctgcgagcgcgagccgcggctgggtattatccgagattcagcccctttttttttctctgtacacaccacggcgagttggagggcgacggggaacagggcgaggtcctgattagcttacacatcgccggcaatccaacatactacgttcccggccaggagtaccatgtaactatatccacaagtactttctttgacggtttgctggtgaccggcctgtatacctccaccagtgtacaggctagtcagtctatcggcggttctagcgcatttggatttggaatcatgtcagaccaccaattcggaaatcaatttatgtgtagtgtggttgcgtctcacgtgtcccaccttcctactacgaacctgagtttcatatggattgcacctcctgccggtactggatgtgtgaattttatggcaaccgctacccaccggggacaggttatctttaaggacgccttggcacagcaattatgcgagcagggagctcctactgatgtgaccgtccacccacacctggcagagatacatagtgatagcatcattctgcgcgatgacttcgatagctaccatcagctccaattgaatcccaacatctgggtggaatgcaacaactgcgagaccggtgagcaatgcggagcgattatgcacggcaacgccgtcacattctgtgagccctatggcccaagggaactgatcacgacgggcttaaatactaccaccgcttctgttctgcagttttccatcggtagtggctcgtgtcggttcagttactcagatcccagcatcatagtgctctacgcgaaaaataatagtgccgactggatacagttggaaaagatacgcgcaccatccaatgtctctactattattcacattttataccttcctgaagacgcgaagggagagaatgtccagtttcaatggaaacaagagaacttacgagttggtgaggtctacgaagcctgctgggcactggacaatattttaataattaatagcgcacaccgtcaggttgttttagaggactccctcgaccccgttgatactggtaactggctgttcttcccaggcgctaccgtcaaacacagctgccagagtgatggaaattctatttattttcatggcaacgaggggagtgagtttaatttcgccactacacgcgacgtcgacctgtcgactgaggatatccaggagcaatggtctgaagagttcgagtcccaacccaccggatgggatgtcttaggggccgtgatcggcaccgagtgcggaactatcgagtcaggactgtcgatggtattcctgaaggatggtgagaggaaattgtgtacaccttccatggacaccaccggttatgggaacctcaggttttatttcgtaatggggggaatctgcgacccaggcaactctcacgagaatgacattattctctatgccaaaatcgaagggagaaaggagcacattacccttgataccctcagctacagtagctacaaggtgcccagtcttgtttccgtggtaattaacccagagttgcaaacaccagcaacgaagttttgcttacgtcaaaagaaccatcaggggcataacagaaatgtgtgggcagtggatttcttccatgttctcccagtgctcccctccacaatgtcccatatgatccaattttctatcaatctagggtgcggaacccaccagccgggcaactctgtgtctctggagttttctaccaaccacgggaggtcttggtcactccttcacacagagtgtttgcccgagatctgcgctggcccccacctgccgcactccactgtgtattcttccgagaactactctggctggaaccgtattaccattcctctgcctaacgctgccctgactcggaatacccggatccggtggcggcagacgggacccatcttggggaacatgtgggctatcgataacgtatacattggtcccagttgtctgaaattttgctctggccgcggccaatgcacaagacacggctgtaaatgcgatccagggttttctgggcctgcatgtgagatggcctctcagaccttccccatgtttatttccgagtcttttggttcttctcggttgagctcctatcacaacttttactctatccggggagctgaagtcagctttggttgtggtgttcttgcatcagggaaagctctggttttcaacaaggacgggaggcggcagctgattacttcattccttgattcttcgcagtctaggtttctccaattcacccttagactcgggagcaaaagcgtactgagtacctgccgggcaccggaccaacccggggaaggagtgcttttacactactcgtatgacaatggcataacatggaagctgttggagcattactcatacctgagctaccacgagccacgaatcatcagcgttgagctgccgggagatgccaaacagttcggtattcagtttagatggtggcagccttatcacagctctcagagagaggacgtgtgggcaattgatgagattataatgaccagtgtgctctttaattctatttctcttgactttactaacctagtggaagtgacgcaaagcctcggattttacttggggaatgtgcagccttactgtgggcatgactggactctgtgcttcactggggactcaaagctcgcatcatcaatgcggtacgtggaaactcaatccatgcaaataggcgctagttacatgatacagttcagtctggtgatgggctgcggccaaaaatacacgccacatatggacaatcaggttaagctggaatacagtaccaatcatggactaacatggcacttggtgcaagaggagtgccttccaagcatgccgagctgtcaggagtttacgagcgcctccatctaccacgctagtgaatttacccagtggcggcgagtcatagtgctgcttccccagaaaacctggtctagtgcaacaagattccggtggagccagtcttactataccgctcaggacgagtgggccctggacagcatctacatcggacaacaatgtccgaacatgtgctccggccacgggagctgtgatcacggtatttgccgatgtgatcagggatatcaagggactgaatgtcatcccgaagctgccttgccctccaccatcatgagtgactttgaaaaccaaaacggatgggagagtgactggcaggaagtgatcgggggcgagatagtcaagcccgaacagggatgtggcgtcatttcctcagggtccagtctgtactttagcaaagccggcaaacgccagttagttagttgggatcttgacacttcgtgggtggacttcgtgcaattctatatccaaattgggggagagtcagcatcttgtaacaagcccgacagcagagaggagggcgtactgttgcagtattcgaataatggtggtatacaatggcatctcctggctgagatgtacttctcagattttagcaaaccacggtttgtgtacctggagctgccagcagcagctaagactccctgcacaagattccgctggtggcagcccgtcttctccggcgaggactatgaccaatgggcagttgatgatattataatcctgtccgaaaaacagaagcagatcattccagttatcaatccaaccctcccccaaaacttctatgaaaagcccgccttcgattacccaatgaaccaaatgagcgtctggttgatgcttgccaacgaagggatggtgaaaaatgaaacattctgtgccgccaccccatcagctatgatttttgggaaatctgatggagaccgcttcgcagttacaagggatctgactctgaagccgggatacgtactgcagttcaagctcaatataggatgtgcgaaccagttcagctctactgcacccgtgctgctgcaatacagtcacgatgccggcatgagctggttcttagtgaaggagggatgctaccccgcatcagctggaaagggatgcgaaggcaactctcgagagctttccgagcccacaatgtaccacactggggattttgaggaatggacccgaatcacaatcgtcataccaagaagcttggcaagttccaagactagattccgctggattcaagagagcagctctcagaaaaatgtgcctccattcggtcttgatggagtttatatctcagagccgtgtcctagttattgcagcgggcacggggattgtatatccggcgtgtgtttctgtgacctgggttataccgcggcccaggggacttgtgtgagtaacgttccaaatcataatgagatgtttgacagatttgaggggaagctcagtccactctggtataagataactggggcccaggtgggcactggctgtgggacactgaatgatggaaagtccctgtacttcaacggcccaggaaaacgggaggcacgcacggttcctctggatacccgtaacatcaggcttgttcagttctatattcagattggatccaaaacgtctggtataacgtgcataaaaccaaggacacgcaatgagggcctcattgtccagtactcaaatgataatgggatcctgtggcacctgctgcgagagttggacttcatgagctttttagaacctcagatcatttcaatagatcttccccaagacgccaaaactcctgctactgcatttcggtggtggcagccgcagcatggtaagcactcggcccaatgggcactagacgatgtcctgattggaatgaatgactccagtcaaacagggtttcaggacaagttcgatggctcaatcgatcttcaggcaaactggtatagaattcaggggggacaggtcgacatcgactgtcttagcatggacaccgcactcatctttactgagaacatcggaaagccgcggtacgccgaaacttgggacttccacgtgagcgccagcaccttcctgcagtttgaaatgtccatgggatgttccaagcctttcagcaacagtcattccgttcagctccaatattccttgaataacggtaaggactggcacctagtgactgaggagtgtgttccacccacaatcggctgtctccactatacagaatcttccatctatactagcgaaaggttccagaactggaaacggataactgtgtatttacccctatccaccatctccccacgtacccggttccgctggattcaagctaactatactgttggagcagacagctgggcgatcgataacgttgtactcgcctccggttgcccttggatgtgtagcgggcgcgggatctgcgacgcgggccgatgcgtctgcgatcgcggctttggtggaccatattgcgtcccggttgtccctctgccttccatactgaaggacgatttcaacggcaatttgcacccagacctgtggccagaagtttatggcgccgaacggggaaatctgaacggcgaaaccatcaagtctgggacatcattgatctttaagggggaaggtctgaggatgttaattagccgggaccttgattgcacgaatacaatgtacgtgcagtttagtttgaggtttattgccaagagtactcctgagaggagtcactccattctgctgcaattcagtataagcgggggtataacatggcacctcatggatgagttttactttccccaaaccaccaacatcttatttatcaatgtgcccttaccctataccgctcagacaaatgccacaaggttccgattgtggcagccttacaacaatggaaagaaagaagaaatttggatcgtcgacgacttcatcatcgacggcaataacgtgaataacccggtcatgctgctggacacatttgactttgggccgagagaggataactggttcttctacccaggcggcaacatcggcctgtattgcccctattcttccaagggagctccagaggaggactccgcaatggtgtttgtgtccaatgaggttggcgaacactctatcaccacccgggatctgaacgtcaacgagaacacaatcatccagttcgagattaatgtcgggtgctccaccgatagttcaagcgccgaccccgtgcggcttgaattcagtcgcgatttcggtgctacctggcatctattgctgccactctgttaccacagttcctcacacgtttcctcgctgtgctcgactgagcaccacccttcgagcacttattacgccgggacaatgcagggttggcgtagggaggtggtccatttcgggaagttacacttgtgcggtagcgtccgttttcggtggtaccagggattctatccagcaggctcccagccagtgacatgggccattgataacgtgtacattgggccccagtgcgaagaaatgtgcaacggccagggtagctgcattaatgggacaaagtgcatttgcgatcctgggtattcaggcccaacctgcaagattagcaccaagaacccggatttcttaaaagacgactttgaaggccagctggaatctgataggttccttcttatgagcggggggaaaccctccagaaagtgcggaattctcagttcgggtaataatctgttctttaacgaggatgggcttaggatgctcatgacacgcgatctggacctgtctcatgcacgcttcgtgcagttcttcatgcgcctggggtgcgggaagggggtccctgaccctagaagccagcctgtcctcctgcagtactctcttaacggcggactgtcttggtccctcttgcaggaattcctcttctctaactcatcaaatgttgggagatacattgcccttgagatacctctgaaagccagatccggatctacaaggctgaggtggtggcagccctccgagaacgggcacttttactcgccttgggtcattgaccaaatcctgatcggcggcaacatctccgggaatacagtccttgaagatgatttcaccaccctggattcccgcaagtggcttctgcatccggggggcactaagatgcctgtgtgcgggtcaaccggcgatgccctggtgtttatcgagaaagcatctactagatacgtggtgtcgacagacgtcgccgtgaatgaggactctttcctgcagattgactttgccgcatcttgcagtgtcaccgactcctgctacgccatcgagttagaatatagtgtggacctgggcctttcatggcacccccttgtaagggattgtctgcccacgaatgtggaatgcagtcggtaccacttacagcgaatcctggtgtctgacaccttcaataagtggaccaggattaccctcccattgccaccatacaccagatcccaggcaaccagatttcgttggcatcagccagcaccatttgacaaacagcaaacgtgggccattgacaatgtatacataggcgacggatgcatcgatatgtgttcaggtcacggaaggtgcatccaaggtaactgtgtatgtgatgagcaatggggcggcctctactgcgacgacccggaaacgtctcttcccacgcagctcaaggataacttcaaccgcgcccccagctcacaaaattggttaacagtcaacggcggaaagctgtcgactgtttgcggggccgttgcttccggcatggcactccactttagtggcggttgcagccgactgctcgtgactgtagaccttaacctcactaacgccgagttcatccaattctactttatgtacggatgcctcatcacccccaataatcgcaatcagggagtcctcctggaatattccgtgaatggcggaatcacatggaacttacttatggaaattttctatgaccagtattccaaaccggggttcgtgaacattttgctgcctcctgacgccaaggagatcgcaacacgttttcggtggtggcagccgagacacgacgggctggatcaaaatgactgggccattgataacgtgctgatctctggatcggccgatcaaaggactgtgatgctcgacacattcagctcagccccagtgccccagcacgaaagaagtccagctgatgccggcccagtcgggcggatcgcttttgacatgtttatggaggacaagaccagcgtaaatgagcactggctattccacgacgactgtacagtagagcggttctgcgactcaccggacggggttatgctctgcgggagccatgacgggcgggaggtgtatgctgtgacacacgacctcacacccacggaaggttggatcatgcagttcaaaatttccgttggatgtaaagtctctgagaagatcgcccaaaatcagatccatgtgcagtactccacagactttggagtgagttggaattatctggtgccccagtgtcttcccgccgatcccaagtgttccgggtcggtgagtcagccgagcgtgtttttccccacaaagggatggaaaagaattacgtatcccctgcccgagagcttggtgggaaaccctgtgcggttccgattttaccagaaatactcagacatgcaatgggctattgacaacttctaccttggacctggctgcctggacaattgtcgcggccacggcgactgccttagggagcagtgtatttgcgaccctgggtactcggggcctaattgttatctgactcacaccctgaaaaccttcctgaaggaacgttttgattcagaagaaattaagccagacctgtggatgtccctcgagggggggagtacctgcaccgagtgcggaattttggccgaagacacggccctttattttggtgggtcaacagtgagacaggccgtgacccaggacctggatctgcgcggtgcaaagttcttgcagtattggggcagaattggatctgagaacaatatgactagttgccacagaccaatctgccgcaaggagggggtgctgcttgactacagcaccgacgggggtataacttggaccctactccacgagatggactaccagaagtatatttctgtgcggcatgactacatcctcctacccgaagatgccctgaccaacacaacccgcttgagatggtggcagccatttgtaatctcgaatggcatagtggtcagcggggtagaaagagcacaatgggccctggacaatatccttattggcggcgcagagattaatccgagccagcttgtggacacctttgatgatgagggcacttcacatgaagaaaattggtcattctatcctaacgctgtgcgcaccgccggcttctgtggaaacccatcatttcatctttactggcctaataaaaagaaggacaaaactcataatgccctgagttcccgggagctgatcatccaacctggatatatgatgcagtttaagattgtggtgggatgcgaagcaacatcgtgtggtgacttacattctgtgatgcttgaatacacaaaggacgccaggtcggattcgtggcagttggtacagactcagtgcctgcctagttcctccaattctattgggtgctcgccctttcaatttcatgaggcaacaatttataactccgtgaactcctcgtcttggaaaagaattacaatccagctgcccgaccacgtcagcagttccgcaacgcagtttcgatggattcagaagggagaagaaacagagaagcagtcctgggcaattgatcatgtctatattggagaggcatgtcccaagctctgcagtggccacggctactgcacgaccggcgccatctgtatttgcgacgaaagctttcaaggcgacgattgttccgtttttagtcatgacctgccatcgtacataaaggataattttgagagtgcccgtgttacagaagccaactgggaaacaattcaagggggagtgatcggcagcgggtgtggacagctggccccttatgcccatggagatagtctatactttaatggatgccaaatccggcaagcagcaacgaaacccctggatctcactcgcgcatccaaaatcatgtttgtattacaaatcgggtctatgtcgcagacagattcatgcaattctgacctgagcggcccccatgccgtggataaggcagtcttgcttcagtactccgtcaacaatggcataacttggcacgtgatcgcgcaacatcagccgaaagactttacacaagcacaacgggtgagctacaatgtgccactggaggcgcgcatgaaaggtgtcttactccgctggtggcagccacgccataacggcacaggccatgaccagtgggctctggatcacgtggaagtggtcctggtatccacacggaagcagaattacatgatgaattttagccggcagcatggcctacggcacttctataatcgccggagacgctctttgagaagatatccatag

SEQ ID NO: 152345 - DNA, 10284 bp, Artificial Sequence
  derived and/or modified sequence
atggagcggagcggctgggcccggcagaccttcctgctggccctgcttttgggtgctactctccgagcacgggctgctgcaggatattatccaaggttttctccttttttctttctctgcacccatcatggggagctggagggagatggagagcagggggaggttttaattagtctgcatatcgccgggaatcctacctactacgtgcctggccaagaataccatgtgactataagtacctccacattcttcgatgggctcctcgtaacagggctgtacaccagtacgtccgtgcaggccagtcaatctattggcggttcttcagccttcggatttggcatcatgtcagatcatcagttcgggaaccagtttatgtgtagcgtggtcgcgagccacgtgtctcatctgcccactaccaatctgtctttcatttggattgccccaccggccggcaccgggtgtgtgaactttatggccacagctactcatcgtgggcaggtgatttttaaagacgccttggctcagcaactgtgtgaacagggggcacccactgacgtgacagtccatcctcatctggccgagattcactcggactcgatcatactcagagacgattttgactcctaccaccagctgcagctgaatccaaacatctgggtagagtgcaacaattgcgagacaggagaacagtgtggtgcaatcatgcatggaaacgccgtgacattctgcgagccctatgggccgagagagctcattaccacaggactgaatacaaccacagcgagtgtgctccagttctcgatcgggtctggttcttgcaggttttcatattctgatccgtctataatcgtactgtatgccaagaacaattcagccgactggatccagctggaaaagatcagagcaccatctaacgtgtctactattatacacatcctgtacttgccagaggatgctaagggagaaaacgtgcaatttcagtggaaacaggaaaacctgagggtgggtgaagtgtacgaggcttgctgggctctagacaatattctgatcatcaattccgcacatcgtcaagtagtcttagaggactccctggaccccgtcgacacgggtaattggctctttttccctggagcaacagtaaagcactcatgccagtctgatggaaactccatctatttccacggaaacgaaggttctgagttcaactttgctacgacacgcgacgttgatctcagtactgaagatatacaagaacagtggagcgaagaatttgagtcccagccgactggatgggatgtacttggtgctgtaatcggaacagagtgcggtaccatagagagtgggttaagcatggtgtttctcaaagacggggagagaaagctgtgcactcccagcatggataccaccggctacgggaacctccgattctacttcgtaatgggcggcatatgcgatccaggcaactcccatgagaacgatataatcctgtatgccaagatcgaaggaaggaaggaacacatcacactcgatacccttagttatagttcctacaaggtaccgtccttggtgtccgtggtgatcaatccagagctgcagactcccgccacaaaattctgtctgaggcagaagaatcaccagggacataaccgcaatgtatgggcggtggacttcttccacgtcctccctgtcctgccctcaactatgtcacacatgattcagttctcaatcaatctcgggtgtggtacacaccaaccagggaactccgtgtcactcgagttctctaccaaccacggccgcagttggtcactgcttcacaccgaatgtctcccagagatctgtgccggcccacacctgccacattctaccgtgtactcttcagagaactactccggctggaaccgcattactatcccactcccaaatgccgccctgacccggaacacccggattaggtggaggcaaacaggtcccatcctgggcaatatgtgggctattgacaatgtctatataggaccatcttgtctgaagttctgctcggggagggggcagtgtacgcgtcacggatgcaagtgtgatccagggtttagtggcccggcttgtgaaatggccagccagacgtttccgatgttcataagcgaatcctttggaagtagtagattatccagctatcacaatttttatagtattagaggagctgaggtatctttcggatgcggcgtgctggctagtggcaaggcgctcgtgtttaataaggacggaagacgccagctgattacctccttcttagacagcagtcagtcaaggttcttacagtttaccctgcgcctcgggtccaagtccgtgctatccacctgcagagcccccgaccaaccaggggagggcgttctgctgcactatagttatgataacggaattacgtggaaattgctggaacactattcatatctgagttatcacgagcctcgtatcatttctgtggagctgcctggggacgccaaacaattcggaatccaatttcgctggtggcagccctaccacagtagccagagggaagacgtctgggccatagacgaaattattatgacaagcgtgctatttaactcaatctcactcgatttcacaaatctggtcgaggtgacccagtccctgggattctacctggggaatgtgcagccgtactgcgggcatgattggaccctttgttttacgggggactctaaactggctagtagcatgcgatacgtggagacccagtctatgcagatcggcgcttcatacatgattcagtttagcctggtaatgggctgcggacagaagtacacccctcacatggacaatcaagtcaaactggagtattccaccaatcatggtctaacttggcacctggttcaggaagagtgtctgccaagcatgcctagttgtcaggaattcacctccgcatcaatctatcatgcgagcgagtttacccagtggcgccgggtgatcgtgctgcttcctcagaagacctggtcttctgccacccggtttaggtggtctcagagttattatacagctcaagacgaatgggcacttgactccatttacattggacaacagtgtcccaacatgtgctctggccacggaagctgcgaccacggcatatgtcggtgtgatcaggggtaccagggtaccgaatgccatcctgaagcagctctgcccagtacgatcatgtcagactttgagaaccagaacggttgggagagcgattggcaagaagtcattggaggagagatcgtgaagccagaacagggctgtggggtcatctcttccgggtcaagcctgtatttttcaaaagccggcaagcggcagcttgtatcgtgggatctggacacttcatgggtcgactttgtgcaattctacatccaaatcggaggcgagagcgcgtcttgcaacaaacctgacagtagagaggaaggtgtgttgttgcaatacagcaacaatgggggcatacagtggcatctgctagctgaaatgtatttttcagatttcagcaaacctcgctttgtttacctcgagctccctgccgctgccaagaccccttgcacacgcttccggtggtggcagcccgtgttctcaggggaggattatgaccagtgggcagtcgacgacattattattctgtccgaaaagcaaaagcaaataattccagttataaacccaactcttcctcagaatttttatgaaaagcctgctttcgattatcctatgaatcagatgtccgtctggttgatgctcgcaaatgagggcatggtgaagaacgaaacgttctgtgccgcgacccccagcgccatgatctttgggaagtcagatggcgatcgctttgccgttactcgggacctcaccttgaaaccaggctacgttctccagtttaagctgaacatcggttgcgcgaatcaattctcctccactgcccccgtccttttgcagtactcgcacgacgctggcatgtcatggtttctcgttaaggagggctgctatcctgcatcagctggcaaaggatgtgagggtaatagccgtgaactgtccgaacccaccatgtatcatactggagactttgaggaatggacaagaataaccattgtgattcctcgatccctagccagctcaaagaccagatttaggtggattcaggaaagctccagtcagaagaacgtccccccattcgggctggatggtgtatacatctccgagccctgcccatcatactgtagtgggcacggcgactgcattagcggcgtgtgcttctgcgacctggggtataccgccgcccaagggacctgcgtgtctaacgtgccaaaccataatgagatgtttgatcgctttgaaggtaagctgtctccactatggtataagatcactggcgcccaagtgggaacaggctgcgggactctgaacgacggcaagtccctgtatttcaatgggcccggcaaacgcgaggcccgaacagttcccctggatactcgaaacatcaggctggtgcagttttatattcagattggaagcaagacaagtggaatcacttgcatcaagcctagaaccaggaatgagggccttatcgttcagtactctaatgacaatggcatcctttggcacctgctccgggaactggactttatgtcatttctcgagccacagatcataagcatcgatctcccacaggatgccaagactcccgcaacagctttcagatggtggcagcctcagcacggaaaacactccgcccagtgggcactagacgatgtgctcatcggcatgaatgattcttcgcaaacgggctttcaggacaagttcgacgggtcgatagatttacaggcaaattggtaccgcattcagggcggacaggtagacatcgactgcctgagcatggataccgcattgatattcactgaaaacatcggtaaaccgcgctatgcagaaacatgggatttccacgtttccgcttcaacttttctgcagtttgagatgagcatgggctgttccaaaccgttttcaaactcccattccgttcagctgcagtactccctgaataatggcaaagactggcacctggtgacagaagagtgtgtacccccaactattggttgccttcattatactgaatcctccatctacacatccgagcggtttcagaattggaagcgaatcacggtgtatctgcccctcagtacaattagtcctagaacccgttttcgctggatccaggccaactacactgtcggtgccgattcttgggcgatcgataatgtggtgctcgctagcgggtgcccctggatgtgttctgggaggggcatctgcgacgcaggccgctgtgtatgtgaccggggctttggggggccctattgcgtccccgtggtgccattgccaagtatcttgaaggacgacttcaacggtaacctgcatccagacctctggccagaagtgtatggcgctgagcgtgggaacctgaacggcgagaccatcaagagcggtacatcgttgatattcaagggggaaggtttgcggatgctgataagccgggatctggactgcacaaacacaatgtatgtacagttctctctgcgattcattgcgaaatctaccccggaaaggagccatagcatattgctccagttctccatctctggcggaatcacatggcatcttatggacgagttctacttccctcagactaccaacattctgttcatcaatgtgccactgccctatacggctcaaaccaacgccacacgttttcggctttggcaaccttataacaatggaaagaaggaagagatatggatagttgacgattttatcatcgatgggaataacgtgaacaatccggtgatgctgctggacacctttgattttggcccgagagaggacaattggtttttttaccctgggggaaacatcggcctatactgtccgtactcctcaaagggtgccccagaggaggactccgcaatggtgtttgtttctaatgaagtgggcgaacactccatcacaactagagatctgaacgtcaacgagaataccatcatccagttcgagatcaacgtcggctgttcaacagattcctcatcagctgatccagtgagactggagtttagcagggatttcggcgcaacatggcacctgctcctcccattgtgctatcatagttccagtcatgtgagtagtctgtgtagtaccgagcaccatccttcttcaacgtactacgcaggcaccatgcaggggtggaggcgcgaagtcgtacactttggcaaactgcatctgtgtgggagtgtgcgcttcaggtggtaccaaggcttctatcccgcagggtcgcagccagtcacctgggccattgacaacgtttacataggaccccagtgcgaagagatgtgtaatgggcaaggtagctgtattaacggcaccaagtgcatctgtgaccccggctattcaggcccaacgtgtaagatcagcaccaagaatcccgactttctgaaggatgactttgagggacaactcgagagtgaccgctttttgctcatgtcaggtggtaagccttcccgtaagtgtggtattctcagttccggaaataatctgttttttaacgaggatggcttacgcatgctcatgacccgagacctcgacctgtctcacgctagatttgttcagttctttatgaggctaggctgcggcaaaggcgtgccagatccaagaagtcagccagtcctgcttcagtactcactaaatggcggtctgtcctggtctctcctgcaggagttcctgttcagcaactcatcgaacgtgggaaggtatattgcactcgaaataccattgaaagcccgatccggaagcacgcgcctccgctggtggcaaccttctgagaacggccatttctattcaccatgggtcatcgatcagatcctcattggggggaacataagcggaaacaccgtattggaggatgatttcactacactggatagtaggaaatggttactgcacccaggaggcactaaaatgcccgtgtgcgggtcgacaggagacgctttggtatttatagaaaaggccagtacacgctacgtagtgtctaccgacgttgctgtgaacgaggatagcttcctgcagattgattttgccgcctcctgtagcgttacagattcttgttacgccattgagttagagtactctgtggacctgggcttgtcctggcatcctctggtacgtgactgtctacccactaacgtcgagtgttcaaggtaccacctccaacgcattttggtgtctgacacattcaacaaatggactagaattacccttcctctgcctccatacacccggtcacaggcgacgagattccggtggcatcagccagcccccttcgacaagcagcagacatgggcaatcgacaatgtgtatattggagatgggtgtatcgatatgtgttccggacacgggagatgcattcaaggcaactgtgtttgtgacgagcagtggggaggactttattgcgatgatcccgagacatcactgcctacccagctgaaagacaatttcaacagggccccctcgtcccagaactggctgacagtgaatggaggaaagttaagtaccgtctgcggagccgtcgccagcggaatggcgctgcattttagcggaggttgttctcggttgctggttactgttgatctgaatttaaccaacgccgaatttatccagttttattttatgtacggttgcttgatcactcctaacaaccggaatcagggcgtgctactcgaatactctgtgaacggcggtataacttggaatttgctcatggagattttttacgaccaatactccaagccgggcttcgtgaatatcttgctgccccctgatgctaaggagatcgccacaaggtttcggtggtggcagcccaggcatgatggattggaccagaatgactgggccatcgataacgtgctaattagtggcagtgcagatcaaaggactgtcatgttggacaccttctcatctgcgcctgtcccacaacatgagcgaagccctgcggacgccggacccgtgggccggatcgcatttgatatgtttatggaggacaagactagcgtcaacgagcactggctgtttcatgacgattgcactgttgaaaggttctgtgacagccctgacggggttatgctgtgtggttcccacgatggcagggaagtgtacgcggttacacatgatctgactccaaccgagggctggatcatgcagttcaaaattagtgttggttgcaaagtcagtgaaaaaatcgcacagaatcagattcacgttcagtattctacagattttggggtcagttggaactatctggtgcctcagtgcctccctgcagaccctaagtgttccgggtcagtatcacaaccatccgttttttttcctacaaagggctggaaaagaatcacatacccattacctgaaagcctcgtggggaatccagtgagattccggttttaccaaaagtatagcgatatgcagtgggccatagacaatttttatctgggacccgggtgtcttgataactgtcgggggcatggcgactgtctccgagaacagtgcatctgtgatcctgggtacagcgggcccaactgttatttgactcataccttgaaaacttttttaaaagaacgctttgactccgaggaaattaagcccgacctgtggatgtccctagagggggggagtacctgtaccgagtgcggtatcttagcagaggacacggctctttacttcggaggttccactgtcaggcaggcagtgacacaagatctggatttacgcggcgctaaatttctgcagtactggggccggatcggcagtgaaaacaacatgacatcatgccacaggcccatctgtaggaaggagggcgtgcttttggattacagcaccgacggtggtattacatggacactgctgcacgagatggactaccaaaaatacatttccgtacggcatgattacatcttactacccgaagacgcgctcacaaatacaaccaggctaaggtggtggcagccctttgtaatatcgaacggcatcgtagtcagcggagtagagagggcacagtgggccttggataatatactgattgggggcgcggagattaacccctcccagctagtggacaccttcgatgatgaggggacgagtcacgaggaaaattggagcttctatcccaatgctgttcgcaccgccggcttctgtggcaatccctccttccatctgtactggccgaacaaaaagaaggacaaaacccataatgccttgtcttcgagggaattgatcatacagcccggttatatgatgcagtttaagattgtagtgggatgtgaagcgacatcctgcggcgacctacattctgtcatgctggaatacaccaaggatgctcgttcagactcatggcagttggtacaaactcagtgcctcccatcttctagcaactctatcggatgctccccctttcagttccacgaggcaacgatctataattctgtgaactccagcagctggaaaagaatcaccattcagctacccgaccacgtgagttccagcgcaacccagtttagatggattcagaagggggaggagaccgagaagcagtcctgggcaattgatcatgtttatatcggcgaggcctgcccgaaactgtgctcggggcacggatactgtacaacaggtgctatatgcatatgtgatgagtccttccagggcgatgattgttctgtgttctcacacgacttgccgtcttatattaaggataacttcgagagtgccagggtcactgaggctaattgggagaccatccaagggggggtgatcggaagtggctgcggacaactcgctccatatgcccacggggacagcctgtattttaatggctgccagattagacaggcggcaacgaagccgttggatttgacccgggcatcgaaaattatgttcgttttgcagatcggctcgatgtcacagacggactcctgtaactcagatctgtcaggtcctcatgccgtcgataaggccgtgctcctccagtatagcgtgaataatggcataacctggcacgtgattgcccaacaccagcctaaggattttacacaagcccagcgagtgagttataatgttccattggaggcccgtatgaagggagttctcctgaggtggtggcaaccgaggcataatgggacaggccacgatcagtgggcattagaccacgtggaggtggtactgtag

SEQ ID NO: 152346 - DNA, 10383 bp, Artificial Sequence
  derived and/or modified sequence
atggagagaagtggatgggctcgccagacattcctgctggcattactgctgggcgcaaccttacgtgcacgcgcagccgcaggatactatccaagattttcccccttcttcttcctatgtactcaccatggagaactggagggcgatggcgagcagggagaagtgctcatttccctccacatagccggtaatcccacttactatgtgcccggtcaagagtatcatgtcaccatctctacctcaacatttttcgatggcttgttggtcaccggattgtatacttctacgtccgtccaagcaagccaaagtatagggggaagcagcgctttcgggtttggaataatgtcggaccaccagttcggaaatcaattcatgtgcagtgtggtcgcttcgcatgtttcacatctcccaactacaaatttatcatttatatggatcgcaccacccgcaggcacagggtgcgtgaatttcatggctaccgctacccaccgaggacaggtaatattcaaggatgccctcgctcaacagttatgcgagcagggggctcctaccgacgttacggtgcatccccacctggccgagatccacagcgattcgatcattctgagagatgacttcgactcctatcatcagttgcagctgaatcccaacatctgggtagagtgcaataattgcgagacaggtgagcagtgcggcgcaataatgcatggcaacgccgttaccttttgtgagccctacggacctagggagcttatcacaactggccttaacacaactacagcttctgtgttacagttctcaatcggctccgggtcctgtagattcagttatagcgatccgtcaatcatcgtactttatgccaagaacaacagtgccgattggatccagctggagaagataagagctcccagcaatgtgagcaccattattcatatcctgtatctgcctgaggacgcaaaaggagaaaatgtgcagtttcagtggaaacaggagaacctgagagtgggcgaggtgtatgaggcatgttgggctttagataatatcctgataatcaattctgcacacagacaggtggtacttgaggactcactggaccccgtcgacactggaaattggcttttctttcccggtgcaactgtgaagcactcttgtcaatctgacgggaattctatctattttcacgggaacgaaggttcggaatttaactttgctacaacaagagatgtggacctgtctacagaggatattcaggagcaatggagcgaagagtttgagtctcagcccacggggtgggatgttcttggagcagtgataggcacagaatgtggtactattgagtctggacttagcatggtgttcctgaaagacggcgaaaggaagctgtgtacaccgtcgatggacacgaccggatatggaaatttacggttttattttgtaatgggcggtatctgtgacccagggaatagccatgagaatgacataatcctatacgcaaaaatagaaggcaggaaagaacacatcacgcttgacactctgtcttactcctcttataaggttcccagccttgttagtgttgtgatcaaccccgaactgcagactcccgctaccaagttttgtctccgtcagaaaaaccaccaggggcacaaccgtaatgtgtgggccgtcgatttcttccacgtcttgcccgtgctgccatccaccatgtctcacatgatccagtttagtattaatctaggttgtggtacccatcaacctggtaattccgttagtcttgaatttagtacgaaccacggacgaagttggtctcttctccacacagaatgcttacctgaaatctgcgctgggcctcaccttccacactccactgtgtatagcagtgaaaattattccggttggaatcgaattacgatcccactgccgaatgccgctctgaccagaaacacccggataagatggcgacaaaccgggccaattctgggcaatatgtgggcaatcgataacgtttatatcgggccatcttgcttaaagttctgttcagggagaggccagtgcacccgccatggctgtaaatgtgatcctggattttctggaccggcttgcgagatggccagccagactttcccaatgtttataagcgagagcttcggctcttcccggctctcaagttaccataacttctattctatccgcggtgccgaggtatcatttggatgtggggtgttagcctccgggaaagcactggtgttcaacaaggacggaagaaggcagttgatcacctctttcctggattcaagccagtcccgttttctgcaatttacattgagactaggttcaaagtccgtgctttcaacatgtcgggcaccagaccagcctggtgaaggagtcttgctgcattattcatacgataacgggattacctggaagctgcttgaacactacagctatctgtcttatcatgaaccaaggattatctcagttgagctaccaggtgatgccaagcagtttggcatacagttccggtggtggcagccttatcacagttcacagcgggaggatgtctgggccatcgacgagataatcatgaccagtgtcctgtttaactccatctcactggacttcacaaatttagttgaggtaacccagtctctcggattttatctgggtaatgtgcagccatattgcgggcatgattggacactctgctttactggcgattccaagctcgcaagcagcatgcgttacgtcgagacacagagcatgcagatcggggcatcatacatgatccagttttcactcgtgatgggctgcggacagaaatacacaccccacatggataaccaggttaagctcgagtactctaccaatcatggcctgacttggcatctggtgcaagaggagtgcttgcccagcatgccatcctgccaggagttcacatccgcatctatatatcatgccagtgagttcacacagtggcgcagagtgatcgtcttgctgccacaaaaaacctggagttcagctaccagatttcgctggagccagtcttactacacagcacaggatgaatgggcacttgattcaatctacataggccaacagtgtcctaacatgtgctcgggtcacggttcctgcgaccacggcatctgcaggtgcgaccaaggttaccagggaactgagtgccaccctgaagccgcactcccgtcaactatcatgtccgattttgagaaccagaatggctgggagagcgattggcaggaggtgattggcggtgagatcgtcaagcccgagcagggatgcggagttatatcaagtggatcatccttatacttcagcaaagcagggaagcgacagctagtgagctgggacctcgacacatcttgggtagatttcgtacagttctacattcagataggcggagagtcggcttcctgcaataagccggacagccgggaggagggggtgctgctgcagtatagtaataatgggggtattcaatggcatctgctggcggagatgtacttttccgattttagcaagcctagattcgtatacttggagttgccagctgccgctaagacgccctgtactcgctttcggtggtggcagccggtgttcagcggagaagattatgaccaatgggccgtggatgacatcatcattctgtcagagaaacagaagcagataattccggtgatcaatccaacactgccgcagaatttttacgagaagcctgcctttgattaccccatgaatcagatgtcggtatggctgatgttagccaacgaaggcatggtgaagaacgagaccttctgcgcagccaccccttcagctatgattttcggcaaatccgatggagatcgtttcgccgtgacaagagatcttacactcaaaccgggatacgtgcttcagttcaagctcaatattggatgcgcgaaccagttttccagcacagcccctgtgctcctccagtattcccacgacgcaggaatgagttggtttcttgtgaaagaggggtgttatccagccagcgccggaaagggatgtgagggtaactcacgggagctttcggaaccaactatgtaccacactggtgactttgaggaatggacccgcattaccatcgttatccctaggtccctggccagctctaaaacacgcttcaggtggatccaggagtcctcatcacaaaagaacgtccctcccttcggccttgacggagtgtacatctcagaaccatgccccagctattgttcagggcatggggactgtatttccggggtatgcttctgcgacttggggtatacagctgcccaaggtacctgcgtgagcaatgtaccaaaccataatgaaatgtttgatcgattcgaggggaaactgtcgcccctgtggtacaaaatcactggcgctcaggttggaactggctgtggtactttgaatgacggtaagtcgctgtacttcaacggtcctggcaaaagagaggcaagaacggtcccgttggatactcggaacattcgattggtgcaattctacatacagataggatccaaaacgtcaggtattacttgtatcaagccgagaactaggaacgaggggctgatcgttcagtatagcaacgataatggtattctgtggcaccttcttagagagttggactttatgtcatttctggaaccccagatcatttcaatcgatctgcctcaggacgccaagaccccagccaccgcatttagatggtggcagccccagcatggcaagcactctgcccaatgggcactggatgatgtccttattggcatgaatgatagctctcagacaggatttcaggacaaatttgacgggtccatcgatttgcaggcaaattggtatcgcatccaggggggtcaggtggacattgactgtttgtccatggacactgcactcatctttacagagaacataggtaagcccaggtacgctgagacatgggactttcatgtgagcgcttccacgttcttgcaattcgagatgagtatgggatgttctaaacccttcagtaacagtcacagcgtccagctgcagtactccctgaacaacggtaaagactggcatctagtgacagaggagtgcgtcccccctacaatcgggtgcttgcactacaccgagtcttccatctatacatctgaacgatttcaaaactggaaacgcattacagtgtacctcccactgtctactatttctcccaggacccgatttagatggattcaggccaattacactgtcggcgcagatagctgggccatcgataacgtggtactcgcatccggatgcccctggatgtgttccggaagaggtatctgcgacgctggcagatgcgtgtgtgacaggggctttggtggcccttattgtgttcccgtggtaccactcccctctattcttaaggatgatttcaatgggaacctacatccagacctgtggcccgaggtgtacggtgctgagcggggaaacctgaatggcgaaaccatcaagtctgggacttctctcatattcaagggtgaaggtttgagaatgttgatctcgcgagatttagattgtactaatactatgtacgtgcagttcagcctgaggttcatcgcgaaatccacacccgagcgttctcatagtatcctcctgcaattctccatcagcggaggcatcacctggcatctaatggacgaattctattttccgcagactactaacatcctgttcatcaacgtccccctgccttataccgctcagacaaacgccacccgctttcggctctggcagccttataataacgggaagaaagaagagatatggatcgtggacgatttcattatcgatggtaacaacgtgaacaacccagtgatgctgctcgacaccttcgacttcggacctcgtgaagataattggtttttctaccccggagggaatattggactctactgtccatactctagcaaaggggctccagaggaagactccgccatggtattcgtttcaaacgaggtaggagaacatagtatcactactcgcgacctcaatgtgaacgagaacacgatcatccagttcgagattaacgtagggtgttctacggactccagttcagcagatcccgtgcgactcgagttcagccgagacttcggcgctacttggcatctgctgttgccactgtgttatcacagctctagccatgtctcttcactctgttcaactgagcaccatcccagcagtacatattacgccggtaccatgcagggctggcggagagaggttgtccattttggaaagttgcatctgtgtggcagtgttaggtttaggtggtaccagggattttacccagcaggctcccagcccgttacgtgggccattgacaacgtgtacatcggccctcaatgcgaggaaatgtgcaacggacagggatcatgtatcaatggaacaaaatgtatctgtgacccaggatattctggtcccacctgcaagatcagcactaaaaaccccgattttctcaaggacgatttcgaaggacagctggagtcagaccggtttctgttgatgagtggcggtaagccaagtaggaagtgtggaatcttgagcagcggcaataatctgttctttaatgaagatgggttaagaatgctgatgacccgggaccttgacctgtcccatgcacgcttcgtgcaattctttatgcggctgggatgcggaaagggagttcccgacccaagatcccagcccgtcctgctccagtacagcctcaacgggggactgagctggtctctgctccaggagtttctgttttcaaatagctctaacgtgggtagatacatcgctctggaaattcctttgaaagcacgttcaggcagtactcgactgcgctggtggcagccctccgaaaatgggcatttctactccccctgggttattgaccaaatcttaatcggcggtaatatttcaggtaataccgtgttggaggatgactttacaacactggatagtcgcaagtggctccttcaccccggaggtaccaaaatgcctgtttgcggatctaccggagatgctcttgtgttcatcgagaaggcatctaccaggtatgttgtctctacagacgttgctgtaaatgaagattccttcctgcagatcgattttgccgcatcctgttcagtgaccgactcctgctatgctatagaactggaatatagcgttgatctgggcttgtcatggcaccctctggtgagggattgccttcccactaacgttgaatgcagccgttaccacctccagcgtattctcgtgagcgatacattcaataaatggacacgtattaccctgcccctgccaccctatacccggagtcaggcgacccgtttccggtggcatcagccggcaccattcgacaagcaacaaacctgggctatcgataacgtttacatcggcgacggatgtattgatatgtgctctggtcacggccgttgtatccagggcaactgcgtctgtgatgaacagtggggcggactttattgtgacgatcctgaaacaagcttacccacccagctgaaagataactttaaccgggctcctagttcacagaattggctcacagtgaacgggggtaaactatctacagtgtgtggcgctgttgcttccgggatggccctgcatttctctggaggctgctcacggctcctggtaacagtggacctgaatctgactaatgctgaattcatccagttttatttcatgtacggctgcctaattactccaaataacagaaatcagggggtgctgttagagtacagcgtaaacggcggtatcacctggaatcttctgatggaaattttctatgatcagtactccaaacctgggtttgtcaatattctcctgcccccagacgccaaagaaatcgccactagattccgctggtggcagccaaggcacgacggattggaccagaatgattgggcaattgataatgtgttgataagcggcagcgccgaccagcgcactgtcatgctggacaccttctcctctgcaccggttcctcagcatgagcgctcaccagctgatgccggtcctgtcgggaggatcgcctttgacatgtttatggaggacaaaacctctgtgaacgaacactggctcttccatgacgattgtacagttgagcggttctgcgattctcctgacggagtaatgctctgcggatcacatgacggtagggaagtctatgcagttacccatgacctcactcctactgagggctggatcatgcagttcaagatctccgtgggctgcaaagtctccgagaagatcgcccagaaccagattcacgtgcagtatagcactgacttcggggtctcatggaattacctagtgccacaatgtctgccagctgatccaaagtgttccgggagcgtaagccagcctagcgtttttttccctaccaaagggtggaagcggatcacctaccccttaccagaatccctagtggggaaccctgtgcggtttaggttttaccagaaatattccgatatgcagtgggcaatcgacaacttttatctgggtccgggatgcttggacaactgtaggggacacggagattgtctgagggagcaatgcatctgcgaccctggatacagcggcccaaactgttatttgacccacacactgaagactttcctgaaggagagatttgatagcgaagaaattaaacccgatttgtggatgagccttgagggaggctctacatgtacagaatgtggtattctggcagaggacaccgccctgtacttcggcggttctaccgtcagacaggccgtgacacaggatctggacctcagaggcgctaaatttcttcagtactgggggaggattgggagcgagaacaacatgacaagttgtcatcgcccaatctgcagaaaagaaggtgtgttgctcgactatagcacggacgggggaattacctggacactgttgcacgaaatggactaccagaaatacatctccgtgagacatgactatattttactaccagaggatgccctcactaacacgacgaggctgcggtggtggcagccttttgtcattagcaatggaatagtagtgtctggcgtggaaagggcccagtgggccctggataatattctgataggcggagcagagatcaacccctcccagctggtggacacttttgacgacgaaggtacatcccacgaggagaattggtccttttaccccaatgctgttaggacggcaggattctgtggcaatcccagtttccatctctactggccgaacaagaagaaagacaaaacacacaatgcgctgagcagccgagaattaattatacagcctggatatatgatgcagttcaagatcgtggtggggtgtgaggctacatcgtgtggcgatctgcacagtgtgatgctagagtacacaaaagatgctcgttcagattcgtggcaactcgtgcagacccagtgccttccctcttctagcaactccattggatgcagtccgttccagtttcatgaggcgacaatttacaattctgtcaactctagttcctggaagcggatcaccatccaactaccagatcacgtgagcagcagcgctacacaattcaggtggattcagaagggggaggagacggagaagcagtcctgggctattgaccacgtctatatcggcgaagcgtgcccgaagctttgttctggacacggctattgcaccactggagccatttgcatctgtgacgaatccttccagggagacgattgtagcgtttttagccatgatctcccttcctacattaaggataattttgagtctgctcgggtgacagaagccaactgggagactattcaaggtggggtgataggcagtgggtgtgggcaactggctccctacgctcatggcgatagtttgtacttcaatggctgccagatcaggcaagcagccacaaagcctcttgacctgacacgggcttctaagatcatgtttgtactacagattgggtccatgtctcagaccgactcatgcaatagcgatctgagtggacctcatgctgtggacaaagctgtgttgttgcagtattcagtcaataatggaatcacctggcacgtgatcgctcaacaccagcctaaagacttcacacaagcacaaagggtctcatacaacgttcctttggaagcaagaatgaaaggtgtcttactgcgatggtggcagccgcgacacaatgggacgggccacgatcagtgggctctggatcatgtcgaagtggtattgttctcgacaaggaagcaaaactacatgatgaatttctcgcgacagcatggtctgcggcatttctataaccggaggagaagatctctgaggaggtatccttaa

SEQ ID NO: 152347 - DNA, 2934 bp, Artificial Sequence
  derived and/or modified sequence
atgtgctctggccatggtcgctgtatccagggaaattgcgtatgtgacgagcagtgggggggtctttattgtgacgacccagagacctctctgccaactcaactgaaagataactttaatagagccccatcgtctcaaaattggctgacggtgaacggaggtaaactatccacagtgtgcggagccgtggcttccggcatggcgttgcatttttccgggggatgttcccggctactagtgacggttgaccttaacttgactaacgcagagttcatacaattttatttcatgtacgggtgtctgattactccgaacaaccgaaatcagggagttctgctggaatactcagtgaacggcggtattacctggaacctcttgatggagatcttctatgaccagtatagcaagcccggattcgtaaacatattactgcctccagacgcaaaggagatagcaacccggtttcggtggtggcagccccgacacgacgggctggatcagaacgattgggccatcgacaacgtcttgattagtggctccgcagaccagaggactgtcatgttagacacattcagctccgcaccagttccccagcatgagagaagtcctgccgacgccggtcccgtgggcagaatcgcattcgacatgttcatggaagacaagacgtcagtcaacgagcactggttatttcacgacgattgtaccgtagagaggttctgcgatagcccggacggggtaatgttgtgcggttcccatgatggcagggaggtttacgcggtcactcatgacctgactcccacagagggatggatcatgcagtttaaaattagcgtcggttgtaaagtgtccgaaaagatagcgcaaaaccagatccacgtgcagtacagtacggatttcggagtgagctggaattacttggtgccccaatgtctgccagctgatcctaagtgttcaggcagcgtgtcacagccctctgtgttttttccaaccaaagggtggaagcggatcacctatccactgccagagtccttagttgggaacccggtgcggtttagattctaccaaaagtattctgatatgcaatgggctatcgacaatttctatctgggcccaggatgccttgacaactgccggggacatggagactgcctgcgcgagcaatgtatatgcgaccccggatacagtgggcctaactgctacctgacacatacactcaaaacattcctcaaagagcgattcgactcagaggagattaaacccgacctgtggatgtccttggagggcggatctacctgtactgagtgtggaattctagccgaagacactgcgttatactttgggggatctacggttagacaggcagtaactcaggacttagacctgcggggagcgaaattcctgcagtactggggacgtatcgggagtgagaacaacatgacttcttgtcacaggcccatctgtaggaaggaaggggtgttgctggattatagcacggacgggggaatcacttggacactcctacatgagatggattatcagaaatatatctcagtacgccatgactacatcttgctgccagaagatgcgctgacaaatacgacccggctgcgctggtggcaaccatttgtcatctccaacggcatcgtggtcagcggcgttgagagggcgcaatgggctctggacaatattctgatcgggggtgcggaaattaacccttctcagctcgtggacacatttgacgatgaggggacgtcccatgaggaaaattggtctttctaccctaatgccgtgagaaccgccggattttgcggcaatccgtcctttcatctttattggcccaacaagaagaaagataagacacacaacgccctttcttcacgggagctgattattcagccgggttacatgatgcaattcaagatcgtcgtaggatgcgaggcaaccagctgtggggatctgcactctgtgatgttagagtacaccaaagatgcacgcagcgacagttggcagctggtgcaaacacagtgtctgccctcctcgagtaacagcattgggtgcagtccctttcaattccatgaagctacgatttacaactctgtaaattcaagctcatggaagcggatcaccattcaactccccgatcacgtgtcaagctccgccactcagttccgctggatccaaaaaggcgaggaaacggaaaagcaaagttgggcgattgatcatgtatatattggagaggcttgccccaagctgtgttcagggcacgggtattgtacaaccggggcaatctgcatctgcgacgagtctttccagggagacgattgctcagtcttctcacatgacctgccaagctatatcaaggataattttgagagtgcgagagttactgaggctaactgggaaacaatccaaggaggcgttatcggcagcggatgtggacagttggctccctacgcccacggagattccctctattttaatggttgccagattagacaggcggctaccaagccactggacctgacaagagcatccaagataatgtttgttcttcagattggctctatgagtcagaccgattcttgtaacagtgatctgtccgggccacatgccgttgataaagcggtgctcctgcagtattccgtaaataacgggatcacctggcatgttatagcccagcaccagcctaaggattttacgcaggctcaaagagtttcttataatgtacccctggaggccagaatgaagggtgtcctgctgaggtggtggcaacctaggcacaatggcaccggacacgaccagtgggctcttgaccacgtggaggtggttttagtgaccacacgcaaacagaactacatgatgaatttctcacgacagcacggactgcggcacttctacaaccggaggaggagatccttgcgccgttacccttag

SEQ ID NO: 152348 - DNA, 10382 bp, Artificial Sequence
  derived and/or modified sequence
atggagagaagtggttgggcgaggcagaccttcctgctggccctcctgcttggtgctacgttgcgggctcgggctgccgctggctattaccctcggttttctccttttttctttctttgtacccaccacggtgagcttgaaggcgacggcgagcagggggaggtgctgatctccttacacatcgctggtaatccgacttactacgtgcccggtcaagagtaccatgtgacaatttccactagtaccttctttgatggattactggttactggtttgtacacaagtacctcggtgcaagcgagccagtcaatcggcggaagctccgccttcggattcggaatcatgagtgaccaccagtttgggaatcaattcatgtgtagtgtggtagcatctcacgtgtctcaccttccaaccacaaatctgtcgtttatttggattgcccctccagccggtacaggttgcgtgaatttcatggccactgcaacccatcgaggtcaggtgatcttcaaggatgccttagcccagcaactctgtgagcagggagcacctaccgacgtgaccgtgcacccacacctcgccgagattcattcagatagcatcatactaagagatgactttgattcctaccatcagttgcagctgaaccctaacatctgggtcgagtgtaacaactgtgaaacgggcgagcagtgcggtgccataatgcatggaaatgctgtgaccttttgcgagccgtacggtccaagggagctgatcacaactgggctaaacacaacaactgccagcgtgctgcagttcagcattggaagtggttcttgccgcttttcctactcagatccaagcatcattgttctctatgctaaaaataacagcgctgattggattcagctagaaaaaatccgtgctccaagcaatgtttcgacaatcatccacattctgtacctgcccgaagacgcaaagggcgagaacgtgcaattccaatggaagcaggaaaatctgcgtgtgggggaggtttatgaggcttgctgggcacttgacaacattcttatcattaatagcgcccatcggcaggtagtgttagaagactctctggatcctgtcgacactggcaactggcttttttttcccggtgctactgtgaagcactcgtgtcagagtgacgggaactccatatacttccacgggaatgaggggtctgagtttaacttcgcgactacaagggatgtggatctgtcgaccgaggatatccaggagcagtggtctgaagaattcgagagccaacccaccggatgggacgtgctgggagcggtgatcggaacggagtgtggcaccatagaaagtggactctcgatggttttccttaaagacggagagagaaagctgtgtaccccgtccatggataccacaggatacggtaatctgaggttttacttcgttatgggagggatttgtgatcccggtaactcccacgaaaatgatattatcctgtatgccaagattgagggccgaaaagaacatattaccctcgatacactgtcttactcgtcatacaaggtacccagccttgtgtccgtggtgatcaatcctgagctgcaaactcctgcaacaaaattctgcctgaggcagaaaaatcatcaaggacacaaccggaatgtctgggcggtagatttttttcacgtgctcccagtgctgccatctaccatgtcgcatatgatccagtttagtattaacctgggttgcggcacacaccaacccggaaacagcgtgtccctggaattctctaccaaccacggcaggagctggagtctattacacacagaatgtcttccagagatctgcgcaggtccccatctgccacattcaaccgtctattcatccgagaactacagtggttggaacagaattaccatccctttgcctaacgcagccctgacaagaaacacacgcatccgctggaggcagactggacccatccttggtaacatgtgggccatcgataacgtatacattggcccaagctgcctgaagttttgttctgggagagggcagtgcactcgtcatggatgtaaatgcgatccagggttttctggccctgcctgtgagatggcctctcagacctttcccatgtttattagtgagtcattcggctcctctcggctgtcttcttatcataatttttactcaattcgcggtgccgaagtttcgttcggttgcggcgtcctggctagtggcaaagcgttggtctttaataaagacggcaggaggcagctcataacatcctttctggatagctctcaatccaggtttctacagtttacactgcggctgggaagtaaaagcgtcctgtccacgtgcagagcacccgaccagccgggagagggggtgctgttgcattacagttacgacaatggaatcacttggaaactgctggaacattactcgtatttgagttaccatgaacctaggattatttcggtcgaactgccgggagatgccaagcagttcggaatccagttcagatggtggcagccatatcactcttcacagcgcgaggatgtgtgggcaatcgacgagatcattatgacgtccgtcttgttcaactccatcagccttgactttactaatcttgttgaagttacacagtccttgggcttctaccttgggaacgtgcagccttactgtggacacgattggacactttgttttactggcgattctaaactggcgagctccatgaggtacgtggagacccaatccatgcagatcggtgctagctacatgatccagttttcactggtgatgggctgcgggcagaaatacactccacatatggacaaccaggtgaagcttgagtacagtactaaccatggactcacctggcatctggtgcaagaagagtgtctgccatccatgcctagctgccaggagttcacgtccgcatctatttaccatgccagcgagtttacccagtggcggcgagtcatcgtgctgctgcctcagaagacatggtcaagcgccacaagatttcgctggagccagagctattacaccgcacaggatgagtgggcacttgatagcatctacatcggacagcagtgtcctaacatgtgcagtgggcacgggtcatgcgaccacggcatctgtcgctgcgaccaaggataccagggaacggaatgtcaccctgaagcagcattgccttccaccatcatgtcggacttcgaaaatcagaacggatgggagtccgattggcaagaggtgattgggggagagatcgtgaagcccgagcagggttgcggtgtgatatcctccggctcttctctctatttctccaaagctgggaagcgacagctcgtgtcctgggatttggacacttcctgggtggacttcgttcagttttatattcagattggcggtgagtcggctagctgtaacaagccagattcacgcgaggagggggtcttgctgcaatactccaacaatggcggaattcaatggcacctgctggcagaaatgtatttctccgacttctctaaaccgcgattcgtatacctggagctgccagcagccgcaaaaacgccatgcacgcgatttcgctggtggcagccagtgttctccggagaggactacgaccagtgggctgttgacgacataattattctgtctgaaaagcagaaacagataatccctgtcatcaatccaacgctgccccagaatttctacgagaaacctgcttttgattatccaatgaaccagatgagcgtgtggctgatgctagcaaatgaaggtatggtcaagaacgagaccttttgcgccgcaactccctcagcaatgattttcggcaagtctgacggagaccgatttgccgtaacaagggacctgaccctgaaaccaggctatgtgctacagttcaaactcaacattgggtgtgctaatcagttcagcagtactgctccagttctgctgcagtactcccacgacgctggaatgagttggtttttagtgaaggaagggtgctaccctgcctccgccggaaaaggttgtgagggcaacagcagagagctttcagagcccacaatgtaccacacaggggatttcgaagagtggactcgcataaccatcgtaatccctaggagcctcgcatctagtaagacacgatttcgttggatccaggagagctcttctcagaagaacgtacccccatttggactcgacggggtgtacatcagcgaaccctgccccagctactgctcaggacatggagactgtatttcaggcgtgtgcttttgtgaccttgggtacacagccgctcagggcacatgtgtaagtaacgtacctaaccacaatgagatgtttgataggttcgagggaaaactgtccccactgtggtataagataaccggagcccaagtcggaaccgggtgcggaacgttaaatgacggcaaatcactgtattttaacgggccaggcaagcgggaagctagaaccgtaccactcgacacacggaatattagactggtccaattctacatccagataggttccaagacatcaggtatcacgtgcataaagcctagaactagaaacgagggactgattgtccaatactctaacgacaacggcatcctctggcatttattgagggaactggactttatgagcttcctggaacctcagatcatcagtattgatctcccacaggatgccaaaacaccagctacagcattccggtggtggcagcctcagcacgggaaacattctgcccagtgggcactagacgacgtgctcataggtatgaatgattcctctcagactggcttccaggacaagtttgatgggtctattgacctccaggcaaattggtataggatacaggggggacaggtggacatcgactgtctctcaatggatacagctctgatttttaccgaaaatatcggaaaacctcgctacgcggaaacctgggactttcatgtttctgcatcaactttcctccagttcgagatgtcaatgggatgtagtaagccattttccaattcacacagcgtccagttacagtactcgctgaacaatggaaaggattggcacttagttacagaagaatgtgttcctcctactatcggatgtttgcattataccgagtcaagcatctataccagcgaacggttccaaaactggaagcgtattactgtgtacctacccctctccaccatatccccgaggacgcgcttcaggtggatacaggctaattatactgtaggggctgactcctgggccatcgataatgtggtcctcgccagtgggtgcccatggatgtgcagcggcagaggaatttgcgatgcgggaaggtgcgtgtgtgacagaggctttggcggtccttactgcgtgccagtggtccccttaccctctatcctgaaagatgatttcaacggtaacctccatcctgatctctggcccgaggtttatggggctgaaagaggcaacctcaacggagaaacgatcaagagcggtaccagcctgatctttaagggagaaggcctgagaatgctgatctctagagatctcgattgtaccaacaccatgtacgtacagttcagtctcagattcatcgctaagagcacgcccgaaagatcacacagtatcctgctgcagttttctatttccgggggaatcacatggcacctgatggacgaattctatttcccacagacaacaaacatcttgttcattaatgtgccgctgccctatacagcccaaacaaatgccacgcggttccgactctggcagccctataataacggcaagaaggaagaaatctggatcgtggacgacttcataatcgacggtaacaatgtgaataatcctgtgatgctccttgatacattcgactttggaccgcgagaggacaattggttcttctacccaggaggcaatataggactatactgtccatatagcagcaaaggggctcccgaagaggactcagctatggtgttcgttagcaacgaggtgggcgagcactccataacaacgcgcgaccttaacgtcaacgagaataccatcattcagttcgaaatcaacgtcggttgtagcactgacagctctagcgctgatcccgttcgactggaattttctagagacttcggcgctacttggcatctcctgctgccgttgtgttatcactccagtagtcatgtgtcttccttgtgttccacggagcatcacccttccagcacatactatgcaggcactatgcagggttggcggagggaggttgttcactttggcaagctgcacctttgcggtagcgtcagatttaggtggtatcagggtttttatccggctggcagtcaacctgtgacctgggctatagacaacgtgtacatcggaccccagtgcgaagaaatgtgtaacggtcagggttcctgtatcaacggcacaaaatgcatttgcgacccagggtacagcggcccaacatgcaaaattagcaccaagaatcctgactttctgaaggacgatttcgagggtcagcttgagtcagacagatttctgttgatgtctggaggtaagcccagtcgcaagtgtggtattctttcctcaggtaataatctgttctttaacgaggacggcttgaggatgctgatgacgcgggacctagacttgtcacacgctagattcgtccaattttttatgagactgggatgtgggaagggggtgcccgatcccagatcacagcctgtgctgctgcagtacagcctcaacggcggactgagttggagcttgctgcaggagttccttttctcaaactcctctaacgtcggacgatatatagcattggaaattccactgaaggcacgatcaggcagtacaagattgcggtggtggcaaccaagtgaaaacggccacttctactctccttgggtgattgatcagatcctgatcggaggcaacattagtggcaataccgtcctcgaagacgattttaccacattggattcaagaaaatggttgcttcatcccggagggaccaagatgcctgtgtgcggtagtactggcgatgcactcgtatttattgaaaaggctagtacgagatacgtagttagcacagacgttgcagtgaacgaggactcattcttgcagatagactttgctgcttcctgctcggttaccgatagctgttacgctattgaattggagtattctgtcgacctcgggctgtcatggcatcctctagtacgagattgcttgccgaccaacgttgagtgttcgaggtatcacttacagcgcatcctggtgtctgacaccttcaataaatggacaaggattactctgcctttgcccccatatactagatcgcaggcaacgcgctttcgttggcatcagcctgcaccgttcgacaaacagcagacctgggctattgacaatgtctacatcggagatggctgtatcgatatgtgttctggacatggtcgctgtatccagggcaactgcgtgtgtgacgagcagtggggcggtctgtattgcgatgaccccgagactagcctcccgacccaactgaaagataattttaaccgggcaccttcctcccaaaactggctcacagtcaatgggggaaagcttagcacagtttgtggcgctgtggcctctggcatggcattgcacttttctggcggttgcagccgcttgctcgttacagtggatttgaacctgaccaacgccgagtttatccagttctattttatgtatgggtgcctgattacaccaaataaccgtaaccagggggtgctgcttgaatactcagtgaacggaggcattacatggaatcttctgatggagatcttctatgaccaatacagtaagccaggattcgtgaatattctgctgccgccagatgctaaggaaatcgctacgaggtttagatggtggcagcctcgccacgacggcctggaccagaatgactgggccatcgacaacgtgctgatatccggaagcgctgaccaaaggactgtcatgctcgataccttctcttcagcacctgtcccacagcacgagcgctctcccgcagatgcgggaccagtgggacggatcgccttcgacatgtttatggaagacaaaacgtcggtcaatgaacactggctgttccatgacgactgtactgtggagcgcttctgtgatagtcctgacggagtaatgttatgcgggtctcacgacggcagagaggtctatgcagttactcacgatttaactcccaccgaaggctggattatgcagtttaagatctctgtagggtgcaaggtcagtgagaagatcgcacagaaccagattcatgtgcagtactctaccgacttcggcgtgtcttggaactatctcgtgccccagtgtctacccgcagatcccaaatgcagcggatctgtgtcccagccaagcgtattctttcctaccaaagggtggaaacggatcacttaccctttaccagaaagcttagtaggtaacccagtccgcttcagattttaccagaagtactcggacatgcagtgggcaatcgataatttttacttgggaccaggctgtctggacaactgccggggtcatggggactgcctgcgggagcagtgcatttgcgatccaggttacagcggtcctaactgttacctcacccacacgctgaaaacctttctgaaggagcgctttgattctgaagaaataaaacctgatctatggatgtccctggagggcggttctacttgcaccgagtgtggaatactcgcggaggacaccgctctgtatttcggcggttccacggtgcgtcaagcggtgacacaggacctagacctgcgtggtgctaagttcctgcagtattgggggcgtatcggaagcgagaataatatgaccagctgccacagacctatttgcaggaaggaaggcgtcttgctggactacagcaccgacggcggaatcacttggacgctccttcacgagatggattatcagaagtatatctctgttcggcatgactacatcttactccccgaggacgccctcactaatacaactcgccttcgatggtggcagcccttcgttatctcaaacggcatcgtcgtgtcaggggtggaacgggcacaatgggctctcgataacattctgataggcggtgcagagattaacccttcccaactggttgataccttcgatgacgagggcacaagtcatgaggaaaattggagcttctatcccaacgctgtgagaactgctggcttctgtggcaatccatctttccatctgtactggcccaacaagaaaaaggacaagactcataacgcgctgtccagccgggaactgataattcagccaggatacatgatgcagtttaaaattgtagttgggtgtgaagcgacgtcctgcggggaccttcactctgtgatgcttgaatacacaaaagatgcacggagcgattcgtggcaactcgtgcaaacacagtgtttacctagctcatccaacagcattggctgttcccctttccagtttcatgaggctaccatctataattccgtgaactctagttcatggaagaggattacgatccagctgcccgaccacgtatccagctccgcaactcagtttcggtggatacaaaagggggaggaaactgaaaagcaatcctgggcgatcgatcatgtttacataggcgaagcttgtccgaagctttgcagtggacacggatattgcaccacaggcgcaatctgcatctgtgacgaatcgttccaaggggacgattgcagtgtcttttcacatgatttgccctcgtatatcaaggataactttgaatccgccagggtcactgaagccaactgggagactatacagggtggggtgataggatctgggtgcggccagctggccccttatgctcatggtgactcgctgtatttcaacggctgtcagattaggcaagccgcaacaaagcctctcgatctaacaagagcctcaaagataatgttcgtcttgcagatcgggagcatgagccaaacagactcctgcaacagtgacctttctggcccacacgctgtggataaggccgtgttgctgcaatactcagtgaacaacgggatcacctggcatgttattgctcagcaccagccaaaagattttacccaagcccagagagtctcatacaacgtgcctctggaagcgagaatgaaaggtgtgctgctgcgctggtggcagccgcgtcataatggcaccggccacgaccagtgggctcttgatcacgtcgaagtagtactggtgagtacccggaaacagaactatatgatgaacttctcaaggcagcacgggttaagacacttttataaccgccgaagacgaagcctgcgccgataccccta

SEQ ID NO: 152349 - DNA, 10284 bp, Artificial Sequence
  derived and/or modified sequence
atggagcggagtgggtgggcccgtcagactttcttgctggctctcctcctgggggctacccttcgggctagagccgctgcaggctactatcctaggtttagcccctttttttttctatgtactcatcacggcgagttggaaggggacggggaacaaggcgaggtgctaatttccctgcatatagccggtaaccccacatattacgtacccggacaggaataccacgtcacgattagcacatctacattttttgacgggctactagtgacaggactgtacacaagcacctccgtgcaggcaagccaaagtattggcggaagctctgcattcggattcgggatcatgtccgatcaccagttcggcaaccaatttatgtgctcagtagttgcatcccacgtgtcccacctgccaactacaaacctctcgttcatctggatcgctccacccgctggcacaggctgcgtgaacttcatggcaacagctacacaccggggtcaggtcatttttaaagatgccctggctcaacagctgtgcgagcagggggcaccgacagacgtcactgtgcaccctcaccttgctgagatacactccgactccatcattctgcgggacgatttcgactcctaccatcaactgcaattgaatcctaatatatgggtggaatgtaataattgcgagactggagagcagtgtggcgctatcatgcacggaaatgccgttacattttgtgagccatacggacctcgcgaactgatcaccactggcctgaatactaccactgcatccgtgttgcaattcagcataggctctgggagctgtcgcttcagctacagtgacccaagcatcatcgtgctttacgcaaaaaataattctgccgattggattcaactcgagaagatcagggcaccgtccaatgtttctactatcatccatattctgtacctccccgaggacgccaagggcgagaatgtccagttccaatggaaacaggaaaaccttagagtcggcgaggtttacgaggcatgttgggctctggataatatcctcattatcaactctgcgcataggcaggtagtgctggaggactccctagaccctgtggatacagggaactggttgtttttccctggagccactgttaagcactcctgccagagcgacggaaattctatctacttccatggcaatgaggggtcggaatttaattttgctactacaagggatgtagaccttagtaccgaagacatccaggagcagtggtcagaagaatttgagtcccagcccaccgggtgggatgttttgggggcagtgatcggaaccgagtgcggtacaattgagtctgggcttagcatggtgttcctcaaggacggagagagaaagctttgtaccccaagcatggacacaacaggatatggaaacctcagattttacttcgtcatgggaggaatttgtgaccctggcaattctcacgaaaatgacattatcttatatgccaaaatcgaggggcgaaaggagcatatcaccttagacactttgagttattcttcttataaagtgccatccctggtcagtgttgtaattaatccagaactgcaaacccccgcaacaaaattctgcctgcgccagaaaaaccatcaagggcataatcgaaacgtatgggctgtcgacttcttccacgtactgcccgtgctaccaagcaccatgagccacatgattcagttttccattaacctggggtgtggcacgcaccagcccggaaactcagttagtctggagtttagtaccaaccatggcaggtcctggagtcttctgcatacagaatgcctccctgagatctgtgcaggaccccatttgccccatagcacggtgtacagctcggaaaattattcagggtggaatcggataaccatccctctgcccaatgcagcactcaccagaaatacaagaataaggtggcgccaaaccggtccaatactagggaacatgtgggccattgataatgtctacattggtccaagctgtctaaaattctgttctggtcggggtcagtgtacacgtcacgggtgtaagtgtgaccctggcttttcgggccctgcctgcgaaatggcaagccaaacatttcccatgtttatctcagagagcttcggatcttcccgactgtcatcctatcataacttttattccatacgcggagccgaggtgagcttcgggtgtggtgtcctggcctccggcaaagcactcgttttcaacaaagacggaaggcgccagctgatcacatcctttctggactctagtcagtctaggtttttgcaatttactcttaggctgggatctaagtctgtcctgtccacctgccgcgctcctgaccaaccaggcgaaggagtcctgcttcattatagctatgataatggcatcacttggaaactgctggagcattactcatatctctcttaccacgagccgaggataatatctgtggagttaccgggtgacgctaaacagttcggtatccagttccgctggtggcaaccttaccacagttctcagcgtgaggatgtttgggccattgatgaaattataatgacatcagtgctcttcaatagtatcagtttggatttcaccaatttggttgaggtcacccagtctctgggtttctatctgggaaacgttcagccatactgcgggcatgactggaccttatgctttaccggtgactccaaacttgcaagttcgatgagatacgtagagacccagtcaatgcagattggcgcatcttacatgatacagttctctctcgtgatgggatgtggacagaaatatactccacacatggacaatcaggtgaaactggaatactcgactaaccacggcctaacgtggcatttggttcaggaagaatgcctcccttctatgcccagttgtcaggaattcacctctgcctctatctatcacgcctctgaatttacccaatggcgcagagtgatcgtgctcctcccccagaaaacttggtcaagtgctacccggtttagatggtcccaatcctactatacagcgcaggatgagtgggcccttgactctatttacatcggacagcagtgccccaatatgtgttctgggcacggaagttgcgaccatggaatatgtcgatgtgaccagggataccaagggaccgaatgtcacccagaagcggcactgccctccactattatgagtgactttgaaaaccaaaatggatgggagtccgactggcaggaggtgattggtggtgaaatagttaagccagaacaggggtgtggcgtgatatccagcgggtcctctctgtacttctccaaagcaggaaagcgccagctagtttcttgggatctggacacctcatgggtcgatttcgttcagttctatatccagatcgggggtgagtctgccagctgcaacaagccagactcccgtgaggaaggagtgctcttgcagtactcaaataatggaggtattcagtggcatttattggccgagatgtatttttccgacttctccaagccacgcttcgtgtatctcgagcttcctgccgcagcaaaaaccccttgtaccaggttccgctggtggcaacccgtctttagtggcgaagactacgatcaatgggcagtggatgatatcatcatcctgagtgaaaaacagaagcaaatcatccccgtcattaaccctaccctcccccagaacttctatgagaaacccgcttttgactacccaatgaatcaaatgtcagtgtggctcatgctggcaaacgaggggatggtaaagaacgaaacattctgcgctgcaaccccttcggcgatgatctttgggaagagtgatggggacagatttgctgttactcgggacctgactctcaagcccggatacgtgctccaatttaagctgaatattgggtgtgccaaccagttctcttcgacagccccagtcttgctgcaatacagccacgacgcaggaatgtcttggttcctggttaaagaggggtgctacccggctagcgctggtaagggatgcgagggcaattcccgagagcttagtgagccaaccatgtaccataccggcgactttgaggagtggaccagaatcaccatagtgataccaaggtcactggcaagcagtaagacccgcttcaggtggatccaggagagttcatcacaaaagaatgtcccgcctttcggtctcgacggggtttatatctccgagccatgtccgagctactgttctgggcatggcgattgcatcagcggggtgtgtttttgtgatctgggttacaccgccgcacagggcacctgcgtctctaatgttcccaatcacaatgagatgtttgatcggtttgaaggcaaactttctcctctctggtacaagattaccggcgcacaagtgggcaccggatgcggcaccctgaacgatggaaaaagcctgtactttaatggacctgggaagagggaagcacggaccgtgcccctggatacccgcaatattcgcctggtgcagttctacattcagattggctctaagacctccggcattacctgcattaaaccccgtacacgcaacgaagggctcattgtacagtatagcaatgataatgggattctgtggcacctgcttagagaactcgatttcatgtcctttcttgaacctcagatcataagtatagacctgccccaagatgccaagacccccgctacagccttccgttggtggcagccccagcacggcaagcacagcgcacaatgggcactggacgacgtgctcattggtatgaatgatagcagccagacaggtttccaagacaaattcgatggaagcatcgacctgcaggcgaactggtataggatccagggtgggcaggtagacatcgattgcctgtccatggacactgcccttatttttactgagaacatcggaaaaccccgatacgcagaaacttgggacttccacgtgagcgcaagcacgttccttcagtttgagatgtctatgggatgctcaaaaccctttagcaactcgcattcagtccagctccagtactcgctgaacaacgggaaggattggcatctggtaacagaggaatgcgtgcctccaacaatcggttgtctgcactacactgagtcctccatctatacgtccgaaaggttccagaattggaaacgcataactgtgtacctgcctttgtccactatcagtcccagaacccgctttcgctggatccaggcgaattatacagtcggagccgattcgtgggcaatcgacaacgttgtgctggcatctggatgtccatggatgtgcagtgggaggggcatttgcgacgcagggaggtgcgtgtgcgatcgcggattcggcggtccctactgtgtgcctgtggtgcctttgccttctatactgaaagatgatttcaacggtaatctgcaccctgacctttggcccgaggtctatggagccgagcggggaaatctgaatggcgaaacaatcaaaagcggcaccagtcttatatttaagggcgagggactccgcatgctcatttctcgggacttagattgcaccaacactatgtatgtccagttctcgctccggttcattgcaaagagcacaccggaacggtctcatagcatactgttgcagtttagcatctccgggggtattacatggcacctgatggacgagttctactttcctcagaccacgaacatactctttatcaacgtccccctcccctatactgcccagacaaatgccactcgttttcgactatggcagccctacaacaacggtaaaaaagaggaaatttggatcgtcgatgatttcattattgatggcaataatgtgaataatcctgttatgctgttagatacctttgacttcggaccacgcgaggacaactggttcttctatcccggtgggaatattggactatactgtccttactcaagtaaaggagctcctgaggaggactcagcgatggtgtttgtctcaaatgaagtgggcgagcacagtattaccacgcgtgacctgaacgttaacgagaacacaatcattcagtttgaaatcaatgtcggttgtagcaccgacagttcctcagccgatccagtgcgccttgagttttcacgtgacttcggggctacctggcatttactgctgcctctatgctatcactcctcctcccatgtgagctcactatgtagcaccgaacaccaccctagtagcacgtattacgcgggaactatgcaggggtggagaagagaagtggtacacttcggaaaactgcatctgtgtgggtccgtgcggttccggtggtatcaagggttttaccctgctggctcacagcccgttacttgggcgatcgataatgtgtacattggccctcagtgcgaagaaatgtgtaatgggcaggggtcctgcataaatgggactaagtgcatctgtgatcccggttattccggtccaacatgtaaaataagtactaaaaatccggactttctgaaagatgacttcgagggccaactggagtctgacaggtttctgctgatgtctgggggtaagcctagccggaagtgcggcatcctgtcttccggtaataacttattctttaacgaggacgggttgaggatgttgatgactagggaccttgacctgtcccacgcgagattcgttcagtttttcatgagattgggctgtggcaaaggcgtgcccgatccaaggtcacagcctgtgctgcttcagtattctttgaatgggggtttatcatggtctttgctgcaggaattcctgttttctaatagctctaacgtaggcagatacatcgcactggagattcctctgaaggcccgttccggatctacacgcctcagatggtggcaaccatccgaaaatggccacttctactctccatgggtaattgatcagatcctaatcggcggtaacatttctgggaataccgtgctcgaggacgacttcacaacgcttgatagcaggaagtggctgctgcaccccggaggaactaaaatgccagtttgcggctccaccggggatgcactggtgtttattgagaaagcaagtactagatatgtcgtgtctaccgatgtggccgtgaatgaagatagcttcctccagatcgactttgctgcaagctgctcggtcacagactcctgttatgcaatcgagcttgaatactccgtcgacttaggcctgtcgtggcaccctctggtgagagattgcttacccactaatgtcgaatgttcgagataccatctccagcggatcttggtgtctgatactttcaataagtggacaagaattaccctccccctgccaccgtatacacggtcccaggcaaccaggttccgttggcatcagcccgctccattcgacaaacaacagacctgggctattgataatgtgtacattggagatggctgcatcgatatgtgtagtggccacgggagatgtattcagggtaattgtgtgtgtgacgaacagtgggggggactgtactgcgacgatcctgagacgagtctccccacacagctgaaagacaactttaatagagccccttccagtcagaactggcttaccgtcaacggcggaaagctctcaactgtttgtggagctgtggcaagcggtatggcactacacttcagcgggggttgcagcaggctgctagttacggttgatctgaacctgactaatgcagagtttatccagttctactttatgtacggctgtctgattaccccaaataataggaaccagggcgtgctcctcgagtactcggtgaatggcggaattacttggaacctcctaatggagattttttacgaccagtacagcaagcccggtttcgttaacatccttctgccgccagacgccaaagaaatcgccaccaggtttcggtggtggcagcccaggcatgatggattggaccaaaatgactgggccatcgacaatgtgctcatttctgggagtgctgatcagagaacagttatgctggacactttttcgtctgcgcctgtgccccagcacgaacgaagtcctgccgatgctgggccagtgggcaggatcgctttcgacatgttcatggaggataagactagtgtgaacgagcattggctctttcacgatgattgtacagtggaaaggttctgcgactcccccgacggagtgatgctgtgcggatcccacgacgggagggaggtgtatgcagtgactcacgacctgactcccaccgagggttggatcatgcagttcaaaatatccgtcggatgcaaggtgtcggagaagatcgcccagaaccagatccacgtccaatattccacagatttcggtgtcagctggaattatctcgtcccccagtgcctacctgctgaccctaagtgttccggtagcgtgtctcaacccagcgtcttcttccctacgaaaggctggaagagaataacttacccacttcccgaatccctcgtgggtaacccagtaaggtttaggttctaccaaaaatattccgacatgcagtgggcaatcgacaatttctatctgggccctggatgcctcgataattgccggggacacggcgactgtttgcgcgaacagtgcatatgtgacccgggatacagtggacccaattgttatctgacgcatactctcaagacctttttaaaggagagattcgattcagaagagatcaaacccgatctctggatgagtctggagggtggctccacctgcacggagtgtggcatcctagccgaggacaccgccctgtatttcggagggagcaccgttcgtcaagccgtcactcaggatctggacttgcggggagccaaattccttcaatactggggtcgtattggatcagagaataatatgacctcttgccaccgacccatctgtcggaaagagggggtgctgctcgactattctacagacgggggtataacatggacattgctccacgagatggattaccagaaatacattagcgtcaggcacgactacatcctgttacccgaggacgcgttaacaaatacaacacgcctgaggtggtggcagcccttcgtgatttcaaacggcatcgtagtttccggggtggaacgcgctcaatgggccttggataacatactgatcgggggagcagagatcaacccgtcccagctggtggacaccttcgacgatgagggcaccagtcatgaagaaaattggtcattctacccgaacgccgtgaggacagctgggttttgtggcaaccctagttttcatctgtactggccaaataagaaaaaggataagacccacaacgcacttagttccagagagctcatcattcaaccagggtacatgatgcaattcaaaattgtagtggggtgtgaagcaacatcgtgtggtgacctgcactccgttatgctcgagtataccaaagacgcccgaagtgattcatggcagctagtgcagactcagtgcttgccaagtagctcaaactccattggatgcagtccgttccagttccacgaggctacaatctacaactcagtgaactccagctcatggaaacggatcaccatccagctcccagaccatgtgagctcatctgcgacacagtttaggtggattcagaagggagaagaaaccgaaaaacagtcctgggcgatagatcatgtgtacatcggagaggcctgcccaaagctgtgcagcggacatggctattgcacgacaggcgctatttgcatttgcgatgagtctttccagggtgatgattgctcagtcttcagtcatgaccttccttcatatatcaaggacaacttcgagtccgcacgtgtcacagaggcaaactgggaaacaatccagggtggcgtgatcggctctggatgcggacagctcgctccatacgcccatggcgacagcctgtatttcaatggttgtcaaataaggcaggctgccacaaagcccctggatctgacgagagcctccaagatcatgttcgtcctccagatcggctctatgtcacagacagacagctgcaattcggacctgtccgggccacacgctgtggacaaagcagtactcctccagtattccgttaacaatggaattacctggcacgtaatcgcacagcaccaaccaaaagatttcactcaggcccagagggtctcatataatgttcctctagaagcacggatgaagggggtgcttctgcggtggtggcaacccaggcacaacggcactggccacgaccagtgggctctcgaccatgtagaggtcgtgctataa

SEQ ID NO: 152350 - DNA, 11571 bp, Artificial Sequence
  derived and/or modified sequence
ctcggcgggggcccgctcccaggcccgctcccgagcccgttccgctcccgtccgccttcttctcgccttctctccgcgtggctcctccgtcccggcgtctccaaaactgaatgagcgagcggcgcgtagggcgcgcggcggcggcggcggcggcggcggcatggagcgcagtggctgggcccggcagactttcctcctagcgctgttgctgggggcgacgctgagggcgcgcgcggcggctggctattacccccgcttttcgcccttctttttcctgtgcacccaccacggggagctggaaggggatggggagcagggcgaggtgctcatttccctgcatattgcgggcaaccccacctactacgttccgggacaagaataccatgtgacaatttcaacaagcaccttttttgacggcttgctggtgacaggactatacacatctacaagtgttcaggcatcacagagcattggaggttccagtgctttcggatttgggatcatgtctgaccaccagtttggtaaccagtttatgtgcagtgtggtagcctctcacgtgagtcacctgcccacaaccaacctcagtttcatctggattgctccacctgcgggcacaggctgtgtgaatttcatggctacagcaacacaccggggccaggttattttcaaagatgctttagcccagcagttgtgtgaacaaggagctccaacagatgtcactgtgcacccacatctagctgaaatacatagtgacagcattatcctgagagatgactttgactcctaccaccaactgcaattaaatccaaatatatgggttgaatgtaacaactgtgagactggagaacagtgtggcgcgattatgcatggcaatgccgtcaccttctgtgaaccatatggcccacgagaactgattaccacaggccttaatacaacaacagcttctgtcctccaattttccattgggtcaggttcatgtcgctttagttattcagaccccagcatcatcgtgttatatgccaagaataactctgcggactggattcagctagagaaaattagagccccttccaatgtcagcacaatcatccatatcctctaccttcctgaggacgccaaaggggagaatgtccaatttcagtggaagcaggaaaatcttcgtgtaggtgaagtgtatgaagcctgctgggccttagataacatcttgatcatcaattcagctcacagacaagtcgttttagaagatagtctcgacccagtggacacaggcaactggcttttcttcccaggagctacagttaagcatagctgtcagtcagatgggaactccatttatttccatggaaatgaaggcagcgagttcaattttgccaccaccagggatgtagatctttccacagaagatattcaagagcaatggtcagaagaatttgagagccagcctacaggatgggatgtcttgggagctgtcattggtacagaatgtggaacgatagaatcaggcttatcaatggtcttcctcaaagatggagagaggaaattatgcactccatccatggacactaccggttatgggaacctgaggttttactttgtgatgggaggaatttgtgaccctggaaattctcatgaaaatgacataatcctgtatgcaaaaattgaaggaagaaaagagcatataacactggataccctttcctattcctcatataaggttccgtctttggtttctgtggtcatcaatcctgaacttcagactcctgctaccaaattttgtctcaggcaaaagaaccatcaaggacataataggaatgtctgggctgtagactttttccatgtcttgcctgttctcccttctacaatgtctcacatgatacagttttccatcaatctgggatgtggaacgcatcagcctggtaacagtgtcagcttggaattttctaccaaccatgggcgctcctggtccctccttcacactgaatgcttacctgagatctgtgctggaccccacctcccccacagcactgtctactcctctgaaaactacagtgggtggaaccgaataacaattccccttcctaacgcagcactaacccggaacaccaggattcgctggagacaaacaggaccaatccttggaaacatgtgggcaattgataatgtttatattggcccgtcatgtctcaaattctgttctggcagaggacagtgcactagacatggttgcaagtgtgaccctggattttctggcccagcttgtgagatggcatcccagacattcccaatgtttatttctgaaagctttggcagttccaggctctcctcttaccataacttttactctatccgtggtgctgaagtcagctttggttgtggtgtcttggccagtggtaaggccctggttttcaacaaagatgggcggcgtcagctaattacatctttccttgacagctcacaatccaggtttctccagttcacactgagactggggagcaaatctgttctgagcacgtgcagagcccctgatcagcctggtgaaggagttttgttgcattattcttatgataatgggataacttggaaactcctggagcattattcatatctcagctatcatgagcccagaataatctccgtagaactaccaggtgatgcaaagcagtttggaattcagttcagatggtggcaaccgtatcattcttcccagagagaagatgtatgggctattgatgagattatcatgacatctgtgcttttcaacagcattagtcttgactttaccaatcttgtggaggtcactcagtctctgggattctaccttggaaatgttcagccatactgtggccacgactggaccctttgttttacaggagattctaaacttgcctcaagtatgcgctatgtggaaacacaatcaatgcagataggagcatcctatatgattcagttcagtttggtgatgggatgtggccagaaatacaccccacacatggacaaccaggtgaagctggagtactcaaccaaccacggccttacctggcacctcgtccaagaagaatgccttccaagtatgccaagttgtcaggaatttacatcagcaagtatttaccatgccagtgagtttacacagtggaggagagtcatagtgcttcttccccagaaaacttggtccagtgctacccgtttccgctggagccagagctattacacagctcaagacgagtgggctttggacagcatttacattgggcagcagtgccccaacatgtgcagtgggcatggctcatgcgatcatggcatatgcaggtgtgaccaggggtaccaaggcactgaatgccacccagaagctgcccttccgtccacaattatgtcagattttgagaaccagaatggctgggagtctgactggcaagaagttattgggggagaaattgtaaaaccagaacaagggtgtggtgtcatctcttctggatcatctctgtacttcagcaaggctgggaaaagacagctggtgagttgggacctggatacttcttgggtggactttgtccagttctacatccagataggcggagagagtgcttcatgcaacaagcctgacagcagagaggagggcgtcctccttcagtacagcaacaatgggggcatccagtggcacctgctagcagagatgtacttttcagacttcagcaaacccagatttgtctatctggagcttccagctgctgccaagaccccttgcaccaggttccgctggtggcagcccgtgttctcaggggaggactatgaccagtgggcagtcgatgacatcatcattctgtccgagaagcagaagcagatcatcccagttatcaatccaactttacctcagaacttttatgagaagccagcttttgattaccctatgaatcagatgagtgtgtggttgatgttggctaatgaaggaatggttaaaaatgaaaccttctgtgctgccacaccatcagcaatgatatttggaaaatcagatggagatcgatttgcagtaactcgagatttgaccctgaaacctggatatgtgctacagttcaagctaaacataggttgtgccaatcaattcagcagtactgctccagttcttcttcagtactctcatgatgctggtatgtcctggtttctggtgaaagaaggctgttacccggcttctgcaggcaaaggatgcgaaggaaactccagagaactaagtgagcccaccatgtatcacacaggggactttgaagaatggacaagaatcaccattgttattccaaggtctcttgcatccagcaagaccagattccgatggatccaggagagcagctcacagaaaaacgtgcctccatttggtttagatggagtgtacatatccgagccttgtcccagttactgcagtggccatggggactgcatttcaggagtgtgtttctgtgacctgggatatactgctgcacaaggaacctgtgtgtcaaatgtccccaatcacaatgagatgttcgataggtttgaggggaagctcagccctctgtggtacaagataacaggtgcccaggttggaactggctgtggaacacttaacgatggcaaatctctctacttcaatggccctgggaaaagggaagcccggacggtccctctggacaccaggaatatcagacttgttcaattttatatacaaattggaagcaaaacttcaggcattacctgcatcaaaccaagaactagaaatgaagggcttattgttcagtattcaaatgacaatgggatactctggcatttgcttcgagagttggacttcatgtccttcctggaaccacagatcatttccattgacctgccacaggacgcgaagacacctgcaacggcatttcgatggtggcaaccgcaacatgggaagcattcagcccagtgggctttggatgatgttcttataggaatgaatgacagctctcaaactggatttcaagacaaatttgatggctctatagatttgcaagccaactggtatcgaatccaaggaggtcaagttgatattgactgtctctctatggatactgctctgatattcactgaaaacataggaaaacctcgttatgctgagacctgggattttcatgtgtcagcatctacctttttgcagtttgaaatgagcatgggctgtagcaagcccttcagcaactcccacagtgtacagctccagtattctctgaacaatggcaaggactggcatcttgtcaccgaagagtgtgttcctccaaccattggctgtctgcattacacggaaagttcaatttacacctcggaaagattccagaattggaagcggatcactgtctaccttccactctccaccatttctcccaggacccggttcagatggattcaggccaactacactgtgggggctgattcctgggcgattgataatgttgtactggcctcagggtgcccttggatgtgctcaggacgagggatttgtgatgctggacgctgtgtgtgtgaccggggctttggtggaccctattgtgttcctgttgttcctctgccctcgattcttaaagacgatttcaatgggaatttacatcctgacctttggcctgaagtgtatggtgcagagagggggaatctgaatggtgaaaccatcaaatctggaacatctctaatttttaaaggggaaggactaaggatgcttatttcaagagatctagattgtacaaatacaatgtatgtccagttttcacttagatttatagcaaaaagtaccccagagagatctcactctattctgttacaattctccatcagtggaggaatcacttggcacctgatggatgaattttactttcctcaaacaacgaatatacttttcatcaatgttcccttgccatacactgcccaaaccaatgctacaagattcagactctggcaaccttataataacggtaagaaagaagaaatctggattgttgatgacttcattatcgatggaaataatgtaaacaaccctgtgatgctcttggatacatttgattttgggcccagagaagacaattggtttttctatcctggtggtaacatcggtctttattgtccatattcttcaaagggggcacctgaagaagattcagctatggtgtttgtttcaaatgaagttggtgagcattccattaccacccgtgacctaaatgtgaatgagaacaccatcatacaatttgagatcaacgttggctgttcgactgatagctcatccgcggatccagtgagactggaattttcaagggacttcggggcgacctggcaccttctgctgcccctctgctaccacagcagcagccacgtcagctctttatgctccaccgagcaccaccccagcagcacctactacgcaggaaccatgcagggctggaggagggaggtcgtgcactttgggaagctgcacctttgtggatctgtccgtttcagatggtaccagggattttaccctgccggctctcagccagtgacatgggccattgataatgtctacatcggtccccagtgtgaggagatgtgtaatggacaggggagctgtatcaatggaaccaaatgtatatgtgaccctggctactcaggtccaacctgtaaaataagcaccaaaaatcctgattttctcaaagatgatttcgaaggtcagctagaatctgatagattcttattaatgagtggtgggaaaccatctcgaaagtgtggaatcctttctagtggaaacaacctctttttcaatgaagatggcttgcgcatgttgatgacacgagacctggatttatcacatgctagatttgtgcagttcttcatgagactgggatgtggtaaaggcgttcctgaccccaggagtcaacccgtgctcctacagtattctctcaacggtggcctctcgtggagtcttcttcaggagttccttttcagcaattccagcaatgtgggcaggtacattgccctggagatacccttgaaagcccgttctggttctactcgccttcgctggtggcaaccgtctgagaatgggcacttctacagcccctgggttatcgatcagattcttattggaggaaatatttctggtaatacggtcttggaagatgatttcacaacccttgatagtaggaaatggctgcttcacccaggaggcaccaagatgcccgtgtgtggctctactggtgatgccctggtcttcattgaaaaggccagcacccgttacgtggtcagcacagacgttgccgtgaatgaggattccttcctacagatagacttcgctgcctcctgctcagtcacagactcttgttatgcgattgaattggaatactcagtagatcttggattgtcatggcacccattggtaagggactgtctgcctaccaatgtggaatgcagtcgctatcatctgcaacggatcctggtgtcagacactttcaacaagtggactagaatcactctgcctctccctccttataccaggtcccaagccactcgtttccgttggcatcaaccagctccttttgacaagcagcagacatgggcaatagataatgtctatatcggggatggctgcatagacatgtgcagtggccatgggagatgcatccagggaaactgcgtctgtgatgaacagtggggtggcctgtactgtgatgaccccgagacctctcttccaacccaactcaaagacaacttcaatcgagctccatccagtcagaactggctgactgtgaacggagggaaattgagtacagtgtgtggagccgtggcgtcgggaatggctctccatttcagtgggggttgtagtcgattattagtcactgtggatctaaacctcactaatgctgagttcatccaattttacttcatgtatgggtgcctgattacaccaaacaaccgtaaccaaggtgttctcttggaatattctgtcaatggaggcattacctggaacctgctcatggagattttctatgaccagtacagtaagcccggatttgtgaatatccttctccctcctgatgctaaagagattgccactcgcttccgctggtggcagccaagacatgacggcctggatcagaacgactgggccattgacaatgtcctcatctcaggctctgctgaccaaaggaccgttatgctggacaccttcagcagcgccccagtaccccagcatgagcgctcccctgcagatgccggccctgtcgggaggatcgcctttgacatgtttatggaagacaaaacttcagtgaatgagcactggctattccatgatgattgtacagtagaaagattctgtgactcccctgatggtgtgatgctctgtggcagtcatgatggacgggaggtgtatgcagtgacccatgacctgactcccactgaaggctggattatgcaattcaagatctcagttggatgtaaggtgtctgaaaaaattgcccagaatcaaattcatgtgcagtattctactgacttcggtgtgagttggaattatctggtccctcagtgcttgcctgctgacccaaaatgctctggaagtgtttctcagccatctgtattctttccaactaaagggtggaaaaggatcacctacccacttcctgaaagcttagtgggaaatccggtaaggtttaggttctatcagaagtactcagacatgcagtgggcaatcgataatttctacctgggccctggatgcttggacaactgcaggggccatggagattgcttaagggaacagtgcatctgtgatccgggatactcagggccaaactgctacttgacccacactctgaagactttcctgaaggaacgctttgacagtgaagaaatcaaacctgacttatggatgtccttagaaggtggaagtacttgcactgagtgtggaattcttgccgaggacactgcactctattttgggggatccactgtgagacaagcggttacacaagatttggatcttcgaggtgcaaagttcctgcaatactgggggcgcatcggtagtgagaacaacatgacctcttgccatcgtcccatctgccggaaggaaggcgtgctgttggactactctaccgatggaggaattacctggactttgctccatgagatggattaccagaaatacatttctgttagacacgactacatacttcttcctgaagatgccctcaccaacacaactcgacttcgctggtggcagccttttgtgatcagcaatggaattgtggtctctggggtggagcgtgctcagtgggcactggacaacattttgattggtggagcagaaatcaatcccagccaattggtggacacttttgatgatgaaggcacttcccatgaagaaaactggagtttttaccctaatgctgtaaggacagcaggattttgtggcaatccatcctttcacctctattggccaaataaaaagaaggacaagactcacaatgctctctcctcccgagaactcattatacagccaggatacatgatgcagtttaaaattgtggtgggttgtgaagccacttcttgtggtgaccttcattccgtaatgctggaatacactaaggatgcaagatcggattcctggcagctcgtacagacccagtgccttccttcctcttctaacagcattggctgctcccctttccagttccatgaagccaccatctacaactctgtcaacagctcaagctggaaaagaatcaccatccagctgcctgaccatgtctcctctagtgcaacacagttccgctggatccagaagggagaagaaactgagaagcaaagctgggcaattgaccacgtgtacattggagaggcttgccccaagctctgcagcgggcacggatactgcacgaccggtgccatctgcatctgcgacgagagcttccaaggtgatgactgctctgttttcagtcacgaccttcccagttatattaaagataattttgagtccgcaagagtcaccgaggcaaactgggagaccattcaaggtggagtcataggaagtggctgtgggcagctggccccctacgcccatggagactcactgtactttaatggctgtcagatcaggcaagcagctaccaagcctctggatctcactcgagcaagcaaaatcatgtttgttttgcaaattgggagcatgtcgcagacggacagctgcaacagtgacctgagtggcccccacgctgtggacaaggcagtgctgctgcaatacagcgtcaacaacgggatcacctggcatgtcatcgcccagcaccagccaaaggacttcacacaagctcagagagtgtcttacaatgtccccctggaggcacggatgaaaggagtcttactgcgctggtggcaaccacgccacaatggaacaggtcatgatcaatgggctttggaccatgtggaggtcgtcctatttagcactcgcaaacaaaattacatgatgaatttttcacgacaacatgggctcagacatttctacaacagaagacgaaggtcacttaggcgatacccatgaagaatcaaaaagtttattttttttcttccaacatgtgatgtgttgctctccattcttttaaatctcgcactacatctgatatcaggaaatatctgtgaaggacttggtgattacctgaaagcccttctcaagaccgagtgtacaccactttcccacactgtgaactaatgacaagtgacttatttgctcataagtaaatgtcttcatgttgatgtgtccgtgaaagttgtgatctgttgtaatatcagttacagtggcagtattgacaataagaaacagtttaacagaaaaatgaaatttaagcacaaaaaatttaagagattttatgtttaaaatggcatttagcacagtatttaacattcttggtcacaaagctatttaagtggactgtatttcggctatgtctcatgttttatatgattaaattatcattgtttgtcctttatgtattctcttctacaatacaacacattgaaactgtatttacttgttatgttgtaatattttgctgctgaatttggggctacttatattctgcagaaaattaattgaaatacctattcaagaagatagttgtaaagatattgtatctcctttaatatactccttaaaaatgtatgttggtttagcgttgttttgtggataagaaaaatgcttgaccctgaaatattttctactttaaattgtggatgaagaccctatctcccacaaataagttcccatttccttgtctaaagatctttttttaagtgttctgtggctgatttactaacagtaactgccattttttgtctgtgataacagagtgatttgtaaaacagtggttgttttttcattgtgttttcttcgtggattgttttttctgcgggtcatattcataccttctgatgaagttgtacaacaccagcaacattataatggccctgtagctctgaatgctatttgtgtaactgaaaggttgcactctagggtgaaccaagctataaaagcccatgcttaaataaaaattatgtccaaaagccattgaa

SEQ ID NO: 152351 - DNA, 11571 bp, Artificial Sequence
  derived and/or modified sequence
ctcggcgggggcccgctcccaggcccgctcccgagcccgttccgctcccgtccgccttcttctcgccttctctccgcgtggctcctccgtcccggcgtctccaaaactgaatgagcgagcggcgcgtagggcgcgcggcggcggcggcggcggcggcggcatggagcgcagtggctgggcccggcagactttcctcctagcgctgttgctgggggcgacgctgagggcgcgcgcggcggctggctattacccccgcttttcgcccttctttttcctgtgcacccaccacggggagctggaaggggatggggagcagggcgaggtgctcatttccctgcatattgcgggcaaccccacctactacgttccgggacaagaataccatgtgacaatttcaacaagcaccttttttgacggcttgctggtgacaggactatacacatctacaagtgttcaggcatcacagagcattggaggttccagtgctttcggatttgggatcatgtctgaccaccagtttggtaaccagtttatgtgcagtgtggtagcctctcacgtgagtcacctgcccacaaccaacctcagtttcatctggattgctccacctgcgggcacaggctgtgtgaatttcatggctacagcaacacaccggggccaggttattttcaaagatgctttagcccagcagttgtgtgaacaaggagctccaacagatgtcactgtgcacccacatctagctgaaatacatagtgacagcattatcctgagagatgactttgactcctaccaccaactgcaattaaatccaaatatatgggttgaatgtaacaactgtgagactggagaacagtgtggcgcgattatgcatggcaatgccgtcaccttctgtgaaccatatggcccacgagaactgattaccacaggccttaatacaacaacagcttctgtcctccaattttccattgggtcaggttcatgtcgctttagttattcagaccccagcatcatcgtgttatatgccaagaataactctgcggactggattcagctagagaaaattagagccccttccaatgtcagcacaatcatccatatcctctaccttcctgaggacgccaaaggggagaatgtccaatttcagtggaagcaggaaaatcttcgtgtaggtgaagtgtatgaagcctgctgggccttagataacatcttgatcatcaattcagctcacagacaagtcgttttagaagatagtctcgacccagtggacacaggcaactggcttttcttcccaggagctacagttaagcatagctgtcagtcagatgggaactccatttatttccatggaaatgaaggcagcgagttcaattttgccaccaccagggatgtagatctttccacagaagatattcaagagcaatggtcagaagaatttgagagccagcctacaggatgggatgtcttgggagctgtcattggtacagaatgtggaacgatagaatcaggcttatcaatggtcttcctcaaagatggagagaggaaattatgcactccatccatggacactaccggttatgggaacctgaggttttactttgtgatgggaggaatttgtgaccctggaaattctcatgaaaatgacataatcctgtatgcaaaaattgaaggaagaaaagagcatataacactggataccctttcctattcctcatataaggttccgtctttggtttctgtggtcatcaatcctgaacttcagactcctgctaccaaattttgtctcaggcaaaagaaccatcaaggacataataggaatgtctgggctgtagactttttccatgtcttgcctgttctcccttctacaatgtctcacatgatacagttttccatcaatctgggatgtggaacgcatcagcctggtaacagtgtcagcttggaattttctaccaaccatgggcgctcctggtccctccttcacactgaatgcttacctgagatctgtgctggaccccacctcccccacagcactgtctactcctctgaaaactacagtgggtggaaccgaataacaattccccttcctaacgcagcactaacccggaacaccaggattcgctggagacaaacaggaccaatccttggaaacatgtgggcaattgataatgtttatattggcccgtcatgtctcaaattctgttctggcagaggacagtgcactagacatggttgcaagtgtgaccctggattttctggcccagcttgtgagatggcatcccagacattcccaatgtttatttctgaaagctttggcagttccaggctctcctcttaccataacttttactctatccgtggtgctgaagtcagctttggttgtggtgtcttggccagtggtaaggccctggttttcaacaaagatgggcggcgtcagctaattacatctttccttgacagctcacaatccaggtttctccagttcacactgagactggggagcaaatctgttctgagcacgtgcagagcccctgatcagcctggtgaaggagttttgttgcattattcttatgataatgggataacttggaaactcctggagcattattcatatctcagctatcatgagcccagaataatctccgtagaactaccaggtgatgcaaagcagtttggaattcagttcagatggtggcaaccgtatcattcttcccagagagaagatgtatgggctattgatgagattatcatgacatctgtgcttttcaacagcattagtcttgactttaccaatcttgtggaggtcactcagtctctgggattctaccttggaaatgttcagccatactgtggccacgactggaccctttgttttacaggagattctaaacttgcctcaagtatgcgctatgtggaaacacaatcaatgcagataggagcatcctatatgattcagttcagtttggtgatgggatgtggccagaaatacaccccacacatggacaaccaggtgaagctggagtactcaaccaaccacggccttacctggcacctcgtccaagaagaatgccttccaagtatgccaagttgtcaggaatttacatcagcaagtatttaccatgccagtgagtttacacagtggaggagagtcatagtgcttcttccccagaaaacttggtccagtgctacccgtttccgctggagccagagctattacacagctcaagacgagtgggctttggacagcatttacattgggcagcagtgccccaacatgtgcagtgggcatggctcatgcgatcatggcatatgcaggtgtgaccaggggtaccaaggcactgaatgccacccagaagctgcccttccgtccacaattatgtcagattttgagaaccagaatggctgggagtctgactggcaagaagttattgggggagaaattgtaaaaccagaacaagggtgtggtgtcatctcttctggatcatctctgtacttcagcaaggctgggaaaagacagctggtgagttgggacctggatacttcttgggtggactttgtccagttctacatccagataggcggagagagtgcttcatgcaacaagcctgacagcagagaggagggcgtcctccttcagtacagcaacaatgggggcatccagtggcacctgctagcagagatgtacttttcagacttcagcaaacccagatttgtctatctggagcttccagctgctgccaagaccccttgcaccaggttccgctggtggcagcccgtgttctcaggggaggactatgaccagtgggcagtcgatgacatcatcattctgtccgagaagcagaagcagatcatcccagttatcaatccaactttacctcagaacttttatgagaagccagcttttgattaccctatgaatcagatgagtgtgtggttgatgttggctaatgaaggaatggttaaaaatgaaaccttctgtgctgccacaccatcagcaatgatatttggaaaatcagatggagatcgatttgcagtaactcgagatttgaccctgaaacctggatatgtgctacagttcaagctaaacataggttgtgccaatcaattcagcagtactgctccagttcttcttcagtactctcatgatgctggtatgtcctggtttctggtgaaagaaggctgttacccggcttctgcaggcaaaggatgcgaaggaaactccagagaactaagtgagcccaccatgtatcacacaggggactttgaagaatggacaagaatcaccattgttattccaaggtctcttgcatccagcaagaccagattccgatggatccaggagagcagctcacagaaaaacgtgcctccatttggtttagatggagtgtacatatccgagccttgtcccagttactgcagtggccatggggactgcatttcaggagtgtgtttctgtgacctgggatatactgctgcacaaggaacctgtgtgtcaaatgtccccaatcacaatgagatgttcgataggtttgaggggaagctcagccctctgtggtacaagataacaggtgcccaggttggaactggctgtggaacacttaacgatggcaaatctctctacttcaatggccctgggaaaagggaagcccggacggtccctctggacaccaggaatatcagacttgttcaattttatatacaaattggaagcaaaacttcaggcattacctgcatcaaaccaagaactagaaatgaagggcttattgttcagtattcaaatgacaatgggatactctggcatttgcttcgagagttggacttcatgtccttcctggaaccacagatcatttccattgacctgccacaggacgcgaagacacctgcaacggcatttcgatggtggcaaccgcaacatgggaagcattcagcccagtgggctttggatgatgttcttataggaatgaatgacagctctcaaactggatttcaagacaaatttgatggctctatagatttgcaagccaactggtatcgaatccaaggaggtcaagttgatattgactgtctctctatggatactgctctgatattcactgaaaacataggaaaacctcgttatgctgagacctgggattttcatgtgtcagcatctacctttttgcagtttgaaatgagcatgggctgtagcaagcccttcagcaactcccacagtgtacagctccagtattctctgaacaatggcaaggactggcatcttgtcaccgaagagtgtgttcctccaaccattggctgtctgcattacacggaaagttcaatttacacctcggaaagattccagaattggaagcggatcactgtctaccttccactctccaccatttctcccaggacccggttcagatggattcaggccaactacactgtgggggctgattcctgggcgattgataatgttgtactggcctcagggtgcccttggatgtgctcaggacgagggatttgtgatgctggacgctgtgtgtgtgaccggggctttggtggaccctattgtgttcctgttgttcctctgccctcgattcttaaagacgatttcaatgggaatttacatcctgacctttggcctgaagtgtatggtgcagagagggggaatctgaatggtgaaaccatcaaatctggaacatctctaatttttaaaggggaaggactaaggatgcttatttcaagagatctagattgtacaaatacaatgtatgtccagttttcacttagatttatagcaaaaagtaccccagagagatctcactctattctgttacaattctccatcagtggaggaatcacttggcacctgatggatgaattttactttcctcaaacaacgaatatacttttcatcaatgttcccttgccatacactgcccaaaccaatgctacaagattcagactctggcaaccttataataacggtaagaaagaagaaatctggattgttgatgacttcattatcgatggaaataatgtaaacaaccctgtgatgctcttggatacatttgattttgggcccagagaagacaattggtttttctatcctggtggtaacatcggtctttattgtccatattcttcaaagggggcacctgaagaagattcagctatggtgtttgtttcaaatgaagttggtgagcattccattaccacccgtgacctaaatgtgaatgagaacaccatcatacaatttgagatcaacgttggctgttcgactgatagctcatccgcggatccagtgagactggaattttcaagggacttcggggcgacctggcaccttctgctgcccctctgctaccacagcagcagccacgtcagctctttatgctccaccgagcaccaccccagcagcacctactacgcaggaaccatgcagggctggaggagggaggtcgtgcactttgggaagctgcacctttgtggatctgtccgtttcagatggtaccagggattttaccctgccggctctcagccagtgacatgggccattgataatgtctacatcggtccccagtgtgaggagatgtgtaatggacaggggagctgtatcaatggaaccaaatgtatatgtgaccctggctactcaggtccaacctgtaaaataagcaccaaaaatcctgattttctcaaagatgatttcgaaggtcagctagaatctgatagattcttattaatgagtggtgggaaaccatctcgaaagtgtggaatcctttctagtggaaacaacctctttttcaatgaagatggcttgcgcatgttgatgacacgagacctggatttatcacatgctagatttgtgcagttcttcatgagactgggatgtggtaaaggcgttcctgaccccaggagtcaacccgtgctcctacagtattctctcaacggtggcctctcgtggagtcttcttcaggagttccttttcagcaattccagcaatgtgggcaggtacattgccctggagatacccttgaaagcccgttctggttctactcgccttcgctggtggcaaccgtctgagaatgggcacttctacagcccctgggttatcgatcagattcttattggaggaaatatttctggtaatacggtcttggaagatgatttcacaacccttgatagtaggaaatggctgcttcacccaggaggcaccaagatgcccgtgtgtggctctactggtgatgccctggtcttcattgaaaaggccagcacccgttacgtggtcagcacagacgttgccgtgaatgaggattccttcctacagatagacttcgctgcctcctgctcagtcacagactcttgttatgcgattgaattggaatactcagtagatcttggattgtcatggcacccattggtaagggactgtctgcctaccaatgtggaatgcagtcgctatcatctgcaacggatcctggtgtcagacactttcaacaagtggactagaatcactctgcctctccctccttataccaggtcccaagccactcgtttccgttggcatcaaccagctccttttgacaagcagcagacatgggcaatagataatgtctatatcggggatggctgcatagacatgtgcagtggccatgggagatgcatccagggaaactgcgtctgtgatgaacagtggggtggcctgtactgtgatgaccccgagacctctcttccaacccaactcaaagacaacttcaatcgagctccatccagtcagaactggctgactgtgaacggagggaaattgagtacagtgtgtggagccgtggcgtcgggaatggctctccatttcagtgggggttgtagtcgattattagtcactgtggatctaaacctcactaatgctgagttcatccaattttacttcatgtatgggtgcctgattacaccaaacaaccgtaaccaaggtgttctcttggaatattctgtcaatggaggcattacctggaacctgctcatggagattttctatgaccagtacagtaagcccggatttgtgaatatccttctccctcctgatgctaaagagattgccactcgcttccgctggtggcagccaagacatgacggcctggatcagaacgactgggccattgacaatgtcctcatctcaggctctgctgaccaaaggaccgttatgctggacaccttcagcagcgccccagtaccccagcatgagcgctcccctgcagatgccggccctgtcgggaggatcgcctttgacatgtttatggaagacaaaacttcagtgaatgagcactggctattccatgatgattgtacagtagaaagattctgtgactcccctgatggtgtgatgctctgtggcagtcatgatggacgggaggtgtatgcagtgacccatgacctgactcccactgaaggctggattatgcaattcaagatctcagttggatgtaaggtgtctgaaaaaattgcccagaatcaaattcatgtgcagtattctactgacttcggtgtgagttggaattatctggtccctcagtgcttgcctgctgacccaaaatgctctggaagtgtttctcagccatctgtattctttccaactaaagggtggaaaaggatcacctacccacttcctgaaagcttagtgggaaatccggtaaggtttaggttctatcagaagtactcagacatgcagtgggcaatcgataatttctacctgggccctggatgcttggacaactgcaggggccatggagattgcttaagggaacagtgcatctgtgatccgggatactcagggccaaactgctacttgacccacactctgaagactttcctgaaggaacgctttgacagtgaagaaatcaaacctgacttatggatgtccttagaaggtggaagtacttgcactgagtgtggaattcttgccgaggacactgcactctattttgggggatccactgtgagacaagcggttacacaagatttggatcttcgaggtgcaaagttcctgcaatactgggggcgcatcggtagtgagaacaacatgacctcttgccatcgtcccatctgccggaaggaaggcgtgctgttggactactctaccgatggaggaattacctggactttgctccatgagatggattaccagaaatacatttctgttagacacgactacatacttcttcctgaagatgccctcaccaacacaactcgacttcgctggtggcagccttttgtgatcagcaatggaattgtggtctctggggtggagcgtgctcagtgggcactggacaacattttgattggtggagcagaaatcaatcccagccaattggtggacacttttgatgatgaaggcacttcccatgaagaaaactggagtttttaccctaatgctgtaaggacagcaggattttgtggcaatccatcctttcacctctattggccaaataaaaagaaggacaagactcacaatgctctctcctcccgagaactcattatacagccaggatacatgatgcagtttaaaattgtggtgggttgtgaagccacttcttgtggtgaccttcattccgtaatgctggaatacactaaggatgcaagatcggattcctggcagctcgtacagacccagtgccttccttcctcttctaacagcattggctgctcccctttccagttccatgaagccaccatctacaactctgtcaacagctcaagctggaaaagaatcaccatccagctgcctgaccatgtctcctctagtgcaacacagttccgctggatccagaagggagaagaaactgagaagcaaagctgggcaattgaccacgtgtacattggagaggcttgccccaagctctgcagcgggcacggatactgcacgaccggtgccatctgcatctgcgacgagagcttccaaggtgatgactgctctgttttcagtcacgaccttcccagttatattaaagataattttgagtccgcaagagtcaccgaggcaaactgggagaccattcaaggtggagtcataggaagtggctgtgggcagctggccccctacgcccatggagactcactgtactttaatggctgtcagatcaggcaagcagctaccaagcctctggatctcactcgagcaagcaaaatcatgtttgttttgcaaattgggagcatgtcgcagacggacagctgcaacagtgacctgagtggcccccacgctgtggacaaggcagtgctgctgcaatacagcgtcaacaacgggatcacctggcatgtcatcgcccagcaccagccaaaggacttcacacaagctcagagagtgtcttacaatgtccccctggaggcacggatgaaaggagtcttactgcgctggtggcaaccacgccacaatggaacaggtcatgatcaatgggctttggaccatgtggaggtcgtcctagtaaccactcgcaaacaaaattacatgatgaatttttcacgacaacatgggctcagacatttctacaacagaagacgaaggtcacttaggcgatacccatgaagaatcaaaaagtttattttttttcttccaacatgtgatgtgttgctctccattcttttaaatctcgcactacatctgatatcaggaaatatctgtgaaggacttggtgattacctgaaagcccttctcaagaccgagtgtacaccactttcccacactgtgaactaatgacaagtgacttatttgctcataagtaaatgtcttcatgttgatgtgtccgtgaaagttgtgatctgttgtaatatcagttacagtggcagtattgacaataagaaacagtttaacagaaaaatgaaatttaagcacaaaaaatttaagagattttatgtttaaaatggcatttagcacagtatttaacattcttggtcacaaagctatttaagtggactgtatttcggctatgtctcatgttttatatgattaaattatcattgtttgtcctttatgtattctcttctacaatacaacacattgaaactgtatttacttgttatgttgtaatattttgctgctgaatttggggctacttatattctgcagaaaattaattgaaatacctattcaagaagatagttgtaaagatattgtatctcctttaatatactccttaaaaatgtatgttggtttagcgttgttttgtggataagaaaaatgcttgaccctgaaatattttctactttaaattgtggatgaagaccctatctcccacaaataagttcccatttccttgtctaaagatctttttttaagtgttctgtggctgatttactaacagtaactgccattttttgtctgtgataacagagtgatttgtaaaacagtggttgttttttcattgtgttttcttcgtggattgttttttctgcgggtcatattcataccttctgatgaagttgtacaacaccagcaacattataatggccctgtagctctgaatgctatttgtgtaactgaaaggttgcactctagggtgaaccaagctataaaagcccatgcttaaataaaaattatgtccaaaagccattgaa

SEQ ID NO: 152352 - DNA, 11571 bp, Artificial Sequence
  derived and/or modified sequence
ctcggcgggggcccgctcccaggcccgctcccgagcccgttccgctcccgtccgccttcttctcgccttctctccgcgtggctcctccgtcccggcgtctccaaaactgaatgagcgagcggcgcgtagggcgcgcggcggcggcggcggcggcggcggcatggagcgcagtggctgggcccggcagactttcctcctagcgctgttgctgggggcgacgctgagggcgcgcgcggcggctggctattacccccgcttttcgcccttctttttcctgtgcacccaccacggggagctggaaggggatggggagcagggcgaggtgctcatttccctgcatattgcgggcaaccccacctactacgttccgggacaagaataccatgtgacaatttcaacaagcaccttttttgacggcttgctggtgacaggactatacacatctacaagtgttcaggcatcacagagcattggaggttccagtgctttcggatttgggatcatgtctgaccaccagtttggtaaccagtttatgtgcagtgtggtagcctctcacgtgagtcacctgcccacaaccaacctcagtttcatctggattgctccacctgcgggcacaggctgtgtgaatttcatggctacagcaacacaccggggccaggttattttcaaagatgctttagcccagcagttgtgtgaacaaggagctccaacagatgtcactgtgcacccacatctagctgaaatacatagtgacagcattatcctgagagatgactttgactcctaccaccaactgcaattaaatccaaatatatgggttgaatgtaacaactgtgagactggagaacagtgtggcgcgattatgcatggcaatgccgtcaccttctgtgaaccatatggcccacgagaactgattaccacaggccttaatacaacaacagcttctgtcctccaattttccattgggtcaggttcatgtcgctttagttattcagaccccagcatcatcgtgttatatgccaagaataactctgcggactggattcagctagagaaaattagagccccttccaatgtcagcacaatcatccatatcctctaccttcctgaggacgccaaaggggagaatgtccaatttcagtggaagcaggaaaatcttcgtgtaggtgaagtgtatgaagcctgctgggccttagataacatcttgatcatcaattcagctcacagacaagtcgttttagaagatagtctcgacccagtggacacaggcaactggcttttcttcccaggagctacagttaagcatagctgtcagtcagatgggaactccatttatttccatggaaatgaaggcagcgagttcaattttgccaccaccagggatgtagatctttccacagaagatattcaagagcaatggtcagaagaatttgagagccagcctacaggatgggatgtcttgggagctgtcattggtacagaatgtggaacgatagaatcaggcttatcaatggtcttcctcaaagatggagagaggaaattatgcactccatccatggacactaccggttatgggaacctgaggttttactttgtgatgggaggaatttgtgaccctggaaattctcatgaaaatgacataatcctgtatgcaaaaattgaaggaagaaaagagcatataacactggataccctttcctattcctcatataaggttccgtctttggtttctgtggtcatcaatcctgaacttcagactcctgctaccaaattttgtctcaggcaaaagaaccatcaaggacataataggaatgtctgggctgtagactttttccatgtcttgcctgttctcccttctacaatgtctcacatgatacagttttccatcaatctgggatgtggaacgcatcagcctggtaacagtgtcagcttggaattttctaccaaccatgggcgctcctggtccctccttcacactgaatgcttacctgagatctgtgctggaccccacctcccccacagcactgtctactcctctgaaaactacagtgggtggaaccgaataacaattccccttcctaacgcagcactaacccggaacaccaggattcgctggagacaaacaggaccaatccttggaaacatgtgggcaattgataatgtttatattggcccgtcatgtctcaaattctgttctggcagaggacagtgcactagacatggttgcaagtgtgaccctggattttctggcccagcttgtgagatggcatcccagacattcccaatgtttatttctgaaagctttggcagttccaggctctcctcttaccataacttttactctatccgtggtgctgaagtcagctttggttgtggtgtcttggccagtggtaaggccctggttttcaacaaagatgggcggcgtcagctaattacatctttccttgacagctcacaatccaggtttctccagttcacactgagactggggagcaaatctgttctgagcacgtgcagagcccctgatcagcctggtgaaggagttttgttgcattattcttatgataatgggataacttggaaactcctggagcattattcatatctcagctatcatgagcccagaataatctccgtagaactaccaggtgatgcaaagcagtttggaattcagttcagatggtggcaaccgtatcattcttcccagagagaagatgtatgggctattgatgagattatcatgacatctgtgcttttcaacagcattagtcttgactttaccaatcttgtggaggtcactcagtctctgggattctaccttggaaatgttcagccatactgtggccacgactggaccctttgttttacaggagattctaaacttgcctcaagtatgcgctatgtggaaacacaatcaatgcagataggagcatcctatatgattcagttcagtttggtgatgggatgtggccagaaatacaccccacacatggacaaccaggtgaagctggagtactcaaccaaccacggccttacctggcacctcgtccaagaagaatgccttccaagtatgccaagttgtcaggaatttacatcagcaagtatttaccatgccagtgagtttacacagtggaggagagtcatagtgcttcttccccagaaaacttggtccagtgctacccgtttccgctggagccagagctattacacagctcaagacgagtgggctttggacagcatttacattgggcagcagtgccccaacatgtgcagtgggcatggctcatgcgatcatggcatatgcaggtgtgaccaggggtaccaaggcactgaatgccacccagaagctgcccttccgtccacaattatgtcagattttgagaaccagaatggctgggagtctgactggcaagaagttattgggggagaaattgtaaaaccagaacaagggtgtggtgtcatctcttctggatcatctctgtacttcagcaaggctgggaaaagacagctggtgagttgggacctggatacttcttgggtggactttgtccagttctacatccagataggcggagagagtgcttcatgcaacaagcctgacagcagagaggagggcgtcctccttcagtacagcaacaatgggggcatccagtggcacctgctagcagagatgtacttttcagacttcagcaaacccagatttgtctatctggagcttccagctgctgccaagaccccttgcaccaggttccgctggtggcagcccgtgttctcaggggaggactatgaccagtgggcagtcgatgacatcatcattctgtccgagaagcagaagcagatcatcccagttatcaatccaactttacctcagaacttttatgagaagccagcttttgattaccctatgaatcagatgagtgtgtggttgatgttggctaatgaaggaatggttaaaaatgaaaccttctgtgctgccacaccatcagcaatgatatttggaaaatcagatggagatcgatttgcagtaactcgagatttgaccctgaaacctggatatgtgctacagttcaagctaaacataggttgtgccaatcaattcagcagtactgctccagttcttcttcagtactctcatgatgctggtatgtcctggtttctggtgaaagaaggctgttacccggcttctgcaggcaaaggatgcgaaggaaactccagagaactaagtgagcccaccatgtatcacacaggggactttgaagaatggacaagaatcaccattgttattccaaggtctcttgcatccagcaagaccagattccgatggatccaggagagcagctcacagaaaaacgtgcctccatttggtttagatggagtgtacatatccgagccttgtcccagttactgcagtggccatggggactgcatttcaggagtgtgtttctgtgacctgggatatactgctgcacaaggaacctgtgtgtcaaatgtccccaatcacaatgagatgttcgataggtttgaggggaagctcagccctctgtggtacaagataacaggtgcccaggttggaactggctgtggaacacttaacgatggcaaatctctctacttcaatggccctgggaaaagggaagcccggacggtccctctggacaccaggaatatcagacttgttcaattttatatacaaattggaagcaaaacttcaggcattacctgcatcaaaccaagaactagaaatgaagggcttattgttcagtattcaaatgacaatgggatactctggcatttgcttcgagagttggacttcatgtccttcctggaaccacagatcatttccattgacctgccacaggacgcgaagacacctgcaacggcatttcgatggtggcaaccgcaacatgggaagcattcagcccagtgggctttggatgatgttcttataggaatgaatgacagctctcaaactggatttcaagacaaatttgatggctctatagatttgcaagccaactggtatcgaatccaaggaggtcaagttgatattgactgtctctctatggatactgctctgatattcactgaaaacataggaaaacctcgttatgctgagacctgggattttcatgtgtcagcatctacctttttgcagtttgaaatgagcatgggctgtagcaagcccttcagcaactcccacagtgtacagctccagtattctctgaacaatggcaaggactggcatcttgtcaccgaagagtgtgttcctccaaccattggctgtctgcattacacggaaagttcaatttacacctcggaaagattccagaattggaagcggatcactgtctaccttccactctccaccatttctcccaggacccggttcagatggattcaggccaactacactgtgggggctgattcctgggcgattgataatgttgtactggcctcagggtgcccttggatgtgctcaggacgagggatttgtgatgctggacgctgtgtgtgtgaccggggctttggtggaccctattgtgttcctgttgttcctctgccctcgattcttaaagacgatttcaatgggaatttacatcctgacctttggcctgaagtgtatggtgcagagagggggaatctgaatggtgaaaccatcaaatctggaacatctctaatttttaaaggggaaggactaaggatgcttatttcaagagatctagattgtacaaatacaatgtatgtccagttttcacttagatttatagcaaaaagtaccccagagagatctcactctattctgttacaattctccatcagtggaggaatcacttggcacctgatggatgaattttactttcctcaaacaacgaatatacttttcatcaatgttcccttgccatacactgcccaaaccaatgctacaagattcagactctggcaaccttataataacggtaagaaagaagaaatctggattgttgatgacttcattatcgatggaaataatgtaaacaaccctgtgatgctcttggatacatttgattttgggcccagagaagacaattggtttttctatcctggtggtaacatcggtctttattgtccatattcttcaaagggggcacctgaagaagattcagctatggtgtttgtttcaaatgaagttggtgagcattccattaccacccgtgacctaaatgtgaatgagaacaccatcatacaatttgagatcaacgttggctgttcgactgatagctcatccgcggatccagtgagactggaattttcaagggacttcggggcgacctggcaccttctgctgcccctctgctaccacagcagcagccacgtcagctctttatgctccaccgagcaccaccccagcagcacctactacgcaggaaccatgcagggctggaggagggaggtcgtgcactttgggaagctgcacctttgtggatctgtccgtttcagatggtaccagggattttaccctgccggctctcagccagtgacatgggccattgataatgtctacatcggtccccagtgtgaggagatgtgtaatggacaggggagctgtatcaatggaaccaaatgtatatgtgaccctggctactcaggtccaacctgtaaaataagcaccaaaaatcctgattttctcaaagatgatttcgaaggtcagctagaatctgatagattcttattaatgagtggtgggaaaccatctcgaaagtgtggaatcctttctagtggaaacaacctctttttcaatgaagatggcttgcgcatgttgatgacacgagacctggatttatcacatgctagatttgtgcagttcttcatgagactgggatgtggtaaaggcgttcctgaccccaggagtcaacccgtgctcctacagtattctctcaacggtggcctctcgtggagtcttcttcaggagttccttttcagcaattccagcaatgtgggcaggtacattgccctggagatacccttgaaagcccgttctggttctactcgccttcgctggtggcaaccgtctgagaatgggcacttctacagcccctgggttatcgatcagattcttattggaggaaatatttctggtaatacggtcttggaagatgatttcacaacccttgatagtaggaaatggctgcttcacccaggaggcaccaagatgcccgtgtgtggctctactggtgatgccctggtcttcattgaaaaggccagcacccgttacgtggtcagcacagacgttgccgtgaatgaggattccttcctacagatagacttcgctgcctcctgctcagtcacagactcttgttatgcgattgaattggaatactcagtagatcttggattgtcatggcacccattggtaagggactgtctgcctaccaatgtggaatgcagtcgctatcatctgcaacggatcctggtgtcagacactttcaacaagtggactagaatcactctgcctctccctccttataccaggtcccaagccactcgtttccgttggcatcaaccagctccttttgacaagcagcagacatgggcaatagataatgtctatatcggggatggctgcatagacatgtgcagtggccatgggagatgcatccagggaaactgcgtctgtgatgaacagtggggtggcctgtactgtgatgaccccgagacctctcttccaacccaactcaaagacaacttcaatcgagctccatccagtcagaactggctgactgtgaacggagggaaattgagtacagtgtgtggagccgtggcgtcgggaatggctctccatttcagtgggggttgtagtcgattattagtcactgtggatctaaacctcactaatgctgagttcatccaattttacttcatgtatgggtgcctgattacaccaaacaaccgtaaccaaggtgttctcttggaatattctgtcaatggaggcattacctggaacctgctcatggagattttctatgaccagtacagtaagcccggatttgtgaatatccttctccctcctgatgctaaagagattgccactcgcttccgctggtggcagccaagacatgacggcctggatcagaacgactgggccattgacaatgtcctcatctcaggctctgctgaccaaaggaccgttatgctggacaccttcagcagcgccccagtaccccagcatgagcgctcccctgcagatgccggccctgtcgggaggatcgcctttgacatgtttatggaagacaaaacttcagtgaatgagcactggctattccatgatgattgtacagtagaaagattctgtgactcccctgatggtgtgatgctctgtggcagtcatgatggacgggaggtgtatgcagtgacccatgacctgactcccactgaaggctggattatgcaattcaagatctcagttggatgtaaggtgtctgaaaaaattgcccagaatcaaattcatgtgcagtattctactgacttcggtgtgagttggaattatctggtccctcagtgcttgcctgctgacccaaaatgctctggaagtgtttctcagccatctgtattctttccaactaaagggtggaaaaggatcacctacccacttcctgaaagcttagtgggaaatccggtaaggtttaggttctatcagaagtactcagacatgcagtgggcaatcgataatttctacctgggccctggatgcttggacaactgcaggggccatggagattgcttaagggaacagtgcatctgtgatccgggatactcagggccaaactgctacttgacccacactctgaagactttcctgaaggaacgctttgacagtgaagaaatcaaacctgacttatggatgtccttagaaggtggaagtacttgcactgagtgtggaattcttgccgaggacactgcactctattttgggggatccactgtgagacaagcggttacacaagatttggatcttcgaggtgcaaagttcctgcaatactgggggcgcatcggtagtgagaacaacatgacctcttgccatcgtcccatctgccggaaggaaggcgtgctgttggactactctaccgatggaggaattacctggactttgctccatgagatggattaccagaaatacatttctgttagacacgactacatacttcttcctgaagatgccctcaccaacacaactcgacttcgctggtggcagccttttgtgatcagcaatggaattgtggtctctggggtggagcgtgctcagtgggcactggacaacattttgattggtggagcagaaatcaatcccagccaattggtggacacttttgatgatgaaggcacttcccatgaagaaaactggagtttttaccctaatgctgtaaggacagcaggattttgtggcaatccatcctttcacctctattggccaaataaaaagaaggacaagactcacaatgctctctcctcccgagaactcattatacagccaggatacatgatgcagtttaaaattgtggtgggttgtgaagccacttcttgtggtgaccttcattccgtaatgctggaatacactaaggatgcaagatcggattcctggcagctcgtacagacccagtgccttccttcctcttctaacagcattggctgctcccctttccagttccatgaagccaccatctacaactctgtcaacagctcaagctggaaaagaatcaccatccagctgcctgaccatgtctcctctagtgcaacacagttccgctggatccagaagggagaagaaactgagaagcaaagctgggcaattgaccacgtgtacattggagaggcttgccccaagctctgcagcgggcacggatactgcacgaccggtgccatctgcatctgcgacgagagcttccaaggtgatgactgctctgttttcagtcacgaccttcccagttatattaaagataattttgagtccgcaagagtcaccgaggcaaactgggagaccattcaaggtggagtcataggaagtggctgtgggcagctggccccctacgcccatggagactcactgtactttaatggctgtcagatcaggcaagcagctaccaagcctctggatctcactcgagcaagcaaaatcatgtttgttttgcaaattgggagcatgtcgcagacggacagctgcaacagtgacctgagtggcccccacgctgtggacaaggcagtgctgctgcaatacagcgtcaacaacgggatcacctggcatgtcatcgcccagcaccagccaaaggacttcacacaagctcagagagtgtcttacaatgtccccctggaggcacggatgaaaggagtcttactgcgctggtggcaaccacgccacaatggaacaggtcatgatcaatgggctttggaccatgtggaggtcgtcctagtaagcactcgcaaacaaaattacatgatgaatttttcacgacaacatgggctcagacatttctacaacagaagacgaaggtcacttaggcgatacccatgaagaatcaaaaagtttattttttttcttccaacatgtgatgtgttgctctccattcttttaaatctcgcactacatctgatatcaggaaatatctgtgaaggacttggtgattacctgaaagcccttctcaagaccgagtgtacaccactttcccacactgtgaactaatgacaagtgacttatttgctcataagtaaatgtcttcatgttgatgtgtccgtgaaagttgtgatctgttgtaatatcagttacagtggcagtattgacaataagaaacagtttaacagaaaaatgaaatttaagcacaaaaaatttaagagattttatgtttaaaatggcatttagcacagtatttaacattcttggtcacaaagctatttaagtggactgtatttcggctatgtctcatgttttatatgattaaattatcattgtttgtcctttatgtattctcttctacaatacaacacattgaaactgtatttacttgttatgttgtaatattttgctgctgaatttggggctacttatattctgcagaaaattaattgaaatacctattcaagaagatagttgtaaagatattgtatctcctttaatatactccttaaaaatgtatgttggtttagcgttgttttgtggataagaaaaatgcttgaccctgaaatattttctactttaaattgtggatgaagaccctatctcccacaaataagttcccatttccttgtctaaagatctttttttaagtgttctgtggctgatttactaacagtaactgccattttttgtctgtgataacagagtgatttgtaaaacagtggttgttttttcattgtgttttcttcgtggattgttttttctgcgggtcatattcataccttctgatgaagttgtacaacaccagcaacattataatggccctgtagctctgaatgctatttgtgtaactgaaaggttgcactctagggtgaaccaagctataaaagcccatgcttaaataaaaattatgtccaaaagccattgaa

SEQ ID NO: 152353 - DNA, 11571 bp, Artificial Sequence
  derived and/or modified sequence
ctcggcgggggcccgctcccaggcccgctcccgagcccgttccgctcccgtccgccttcttctcgccttctctccgcgtggctcctccgtcccggcgtctccaaaactgaatgagcgagcggcgcgtagggcgcgcggcggcggcggcggcggcggcggcatggagcgcagtggctgggcccggcagactttcctcctagcgctgttgctgggggcgacgctgagggcgcgcgcggcggctggctattacccccgcttttcgcccttctttttcctgtgcacccaccacggggagctggaaggggatggggagcagggcgaggtgctcatttccctgcatattgcgggcaaccccacctactacgttccgggacaagaataccatgtgacaatttcaacaagcaccttttttgacggcttgctggtgacaggactatacacatctacaagtgttcaggcatcacagagcattggaggttccagtgctttcggatttgggatcatgtctgaccaccagtttggtaaccagtttatgtgcagtgtggtagcctctcacgtgagtcacctgcccacaaccaacctcagtttcatctggattgctccacctgcgggcacaggctgtgtgaatttcatggctacagcaacacaccggggccaggttattttcaaagatgctttagcccagcagttgtgtgaacaaggagctccaacagatgtcactgtgcacccacatctagctgaaatacatagtgacagcattatcctgagagatgactttgactcctaccaccaactgcaattaaatccaaatatatgggttgaatgtaacaactgtgagactggagaacagtgtggcgcgattatgcatggcaatgccgtcaccttctgtgaaccatatggcccacgagaactgattaccacaggccttaatacaacaacagcttctgtcctccaattttccattgggtcaggttcatgtcgctttagttattcagaccccagcatcatcgtgttatatgccaagaataactctgcggactggattcagctagagaaaattagagccccttccaatgtcagcacaatcatccatatcctctaccttcctgaggacgccaaaggggagaatgtccaatttcagtggaagcaggaaaatcttcgtgtaggtgaagtgtatgaagcctgctgggccttagataacatcttgatcatcaattcagctcacagacaagtcgttttagaagatagtctcgacccagtggacacaggcaactggcttttcttcccaggagctacagttaagcatagctgtcagtcagatgggaactccatttatttccatggaaatgaaggcagcgagttcaattttgccaccaccagggatgtagatctttccacagaagatattcaagagcaatggtcagaagaatttgagagccagcctacaggatgggatgtcttgggagctgtcattggtacagaatgtggaacgatagaatcaggcttatcaatggtcttcctcaaagatggagagaggaaattatgcactccatccatggacactaccggttatgggaacctgaggttttactttgtgatgggaggaatttgtgaccctggaaattctcatgaaaatgacataatcctgtatgcaaaaattgaaggaagaaaagagcatataacactggataccctttcctattcctcatataaggttccgtctttggtttctgtggtcatcaatcctgaacttcagactcctgctaccaaattttgtctcaggcaaaagaaccatcaaggacataataggaatgtctgggctgtagactttttccatgtcttgcctgttctcccttctacaatgtctcacatgatacagttttccatcaatctgggatgtggaacgcatcagcctggtaacagtgtcagcttggaattttctaccaaccatgggcgctcctggtccctccttcacactgaatgcttacctgagatctgtgctggaccccacctcccccacagcactgtctactcctctgaaaactacagtgggtggaaccgaataacaattccccttcctaacgcagcactaacccggaacaccaggattcgctggagacaaacaggaccaatccttggaaacatgtgggcaattgataatgtttatattggcccgtcatgtctcaaattctgttctggcagaggacagtgcactagacatggttgcaagtgtgaccctggattttctggcccagcttgtgagatggcatcccagacattcccaatgtttatttctgaaagctttggcagttccaggctctcctcttaccataacttttactctatccgtggtgctgaagtcagctttggttgtggtgtcttggccagtggtaaggccctggttttcaacaaagatgggcggcgtcagctaattacatctttccttgacagctcacaatccaggtttctccagttcacactgagactggggagcaaatctgttctgagcacgtgcagagcccctgatcagcctggtgaaggagttttgttgcattattcttatgataatgggataacttggaaactcctggagcattattcatatctcagctatcatgagcccagaataatctccgtagaactaccaggtgatgcaaagcagtttggaattcagttcagatggtggcaaccgtatcattcttcccagagagaagatgtatgggctattgatgagattatcatgacatctgtgcttttcaacagcattagtcttgactttaccaatcttgtggaggtcactcagtctctgggattctaccttggaaatgttcagccatactgtggccacgactggaccctttgttttacaggagattctaaacttgcctcaagtatgcgctatgtggaaacacaatcaatgcagataggagcatcctatatgattcagttcagtttggtgatgggatgtggccagaaatacaccccacacatggacaaccaggtgaagctggagtactcaaccaaccacggccttacctggcacctcgtccaagaagaatgccttccaagtatgccaagttgtcaggaatttacatcagcaagtatttaccatgccagtgagtttacacagtggaggagagtcatagtgcttcttccccagaaaacttggtccagtgctacccgtttccgctggagccagagctattacacagctcaagacgagtgggctttggacagcatttacattgggcagcagtgccccaacatgtgcagtgggcatggctcatgcgatcatggcatatgcaggtgtgaccaggggtaccaaggcactgaatgccacccagaagctgcccttccgtccacaattatgtcagattttgagaaccagaatggctgggagtctgactggcaagaagttattgggggagaaattgtaaaaccagaacaagggtgtggtgtcatctcttctggatcatctctgtacttcagcaaggctgggaaaagacagctggtgagttgggacctggatacttcttgggtggactttgtccagttctacatccagataggcggagagagtgcttcatgcaacaagcctgacagcagagaggagggcgtcctccttcagtacagcaacaatgggggcatccagtggcacctgctagcagagatgtacttttcagacttcagcaaacccagatttgtctatctggagcttccagctgctgccaagaccccttgcaccaggttccgctggtggcagcccgtgttctcaggggaggactatgaccagtgggcagtcgatgacatcatcattctgtccgagaagcagaagcagatcatcccagttatcaatccaactttacctcagaacttttatgagaagccagcttttgattaccctatgaatcagatgagtgtgtggttgatgttggctaatgaaggaatggttaaaaatgaaaccttctgtgctgccacaccatcagcaatgatatttggaaaatcagatggagatcgatttgcagtaactcgagatttgaccctgaaacctggatatgtgctacagttcaagctaaacataggttgtgccaatcaattcagcagtactgctccagttcttcttcagtactctcatgatgctggtatgtcctggtttctggtgaaagaaggctgttacccggcttctgcaggcaaaggatgcgaaggaaactccagagaactaagtgagcccaccatgtatcacacaggggactttgaagaatggacaagaatcaccattgttattccaaggtctcttgcatccagcaagaccagattccgatggatccaggagagcagctcacagaaaaacgtgcctccatttggtttagatggagtgtacatatccgagccttgtcccagttactgcagtggccatggggactgcatttcaggagtgtgtttctgtgacctgggatatactgctgcacaaggaacctgtgtgtcaaatgtccccaatcacaatgagatgttcgataggtttgaggggaagctcagccctctgtggtacaagataacaggtgcccaggttggaactggctgtggaacacttaacgatggcaaatctctctacttcaatggccctgggaaaagggaagcccggacggtccctctggacaccaggaatatcagacttgttcaattttatatacaaattggaagcaaaacttcaggcattacctgcatcaaaccaagaactagaaatgaagggcttattgttcagtattcaaatgacaatgggatactctggcatttgcttcgagagttggacttcatgtccttcctggaaccacagatcatttccattgacctgccacaggacgcgaagacacctgcaacggcatttcgatggtggcaaccgcaacatgggaagcattcagcccagtgggctttggatgatgttcttataggaatgaatgacagctctcaaactggatttcaagacaaatttgatggctctatagatttgcaagccaactggtatcgaatccaaggaggtcaagttgatattgactgtctctctatggatactgctctgatattcactgaaaacataggaaaacctcgttatgctgagacctgggattttcatgtgtcagcatctacctttttgcagtttgaaatgagcatgggctgtagcaagcccttcagcaactcccacagtgtacagctccagtattctctgaacaatggcaaggactggcatcttgtcaccgaagagtgtgttcctccaaccattggctgtctgcattacacggaaagttcaatttacacctcggaaagattccagaattggaagcggatcactgtctaccttccactctccaccatttctcccaggacccggttcagatggattcaggccaactacactgtgggggctgattcctgggcgattgataatgttgtactggcctcagggtgcccttggatgtgctcaggacgagggatttgtgatgctggacgctgtgtgtgtgaccggggctttggtggaccctattgtgttcctgttgttcctctgccctcgattcttaaagacgatttcaatgggaatttacatcctgacctttggcctgaagtgtatggtgcagagagggggaatctgaatggtgaaaccatcaaatctggaacatctctaatttttaaaggggaaggactaaggatgcttatttcaagagatctagattgtacaaatacaatgtatgtccagttttcacttagatttatagcaaaaagtaccccagagagatctcactctattctgttacaattctccatcagtggaggaatcacttggcacctgatggatgaattttactttcctcaaacaacgaatatacttttcatcaatgttcccttgccatacactgcccaaaccaatgctacaagattcagactctggcaaccttataataacggtaagaaagaagaaatctggattgttgatgacttcattatcgatggaaataatgtaaacaaccctgtgatgctcttggatacatttgattttgggcccagagaagacaattggtttttctatcctggtggtaacatcggtctttattgtccatattcttcaaagggggcacctgaagaagattcagctatggtgtttgtttcaaatgaagttggtgagcattccattaccacccgtgacctaaatgtgaatgagaacaccatcatacaatttgagatcaacgttggctgttcgactgatagctcatccgcggatccagtgagactggaattttcaagggacttcggggcgacctggcaccttctgctgcccctctgctaccacagcagcagccacgtcagctctttatgctccaccgagcaccaccccagcagcacctactacgcaggaaccatgcagggctggaggagggaggtcgtgcactttgggaagctgcacctttgtggatctgtccgtttcagatggtaccagggattttaccctgccggctctcagccagtgacatgggccattgataatgtctacatcggtccccagtgtgaggagatgtgtaatggacaggggagctgtatcaatggaaccaaatgtatatgtgaccctggctactcaggtccaacctgtaaaataagcaccaaaaatcctgattttctcaaagatgatttcgaaggtcagctagaatctgatagattcttattaatgagtggtgggaaaccatctcgaaagtgtggaatcctttctagtggaaacaacctctttttcaatgaagatggcttgcgcatgttgatgacacgagacctggatttatcacatgctagatttgtgcagttcttcatgagactgggatgtggtaaaggcgttcctgaccccaggagtcaacccgtgctcctacagtattctctcaacggtggcctctcgtggagtcttcttcaggagttccttttcagcaattccagcaatgtgggcaggtacattgccctggagatacccttgaaagcccgttctggttctactcgccttcgctggtggcaaccgtctgagaatgggcacttctacagcccctgggttatcgatcagattcttattggaggaaatatttctggtaatacggtcttggaagatgatttcacaacccttgatagtaggaaatggctgcttcacccaggaggcaccaagatgcccgtgtgtggctctactggtgatgccctggtcttcattgaaaaggccagcacccgttacgtggtcagcacagacgttgccgtgaatgaggattccttcctacagatagacttcgctgcctcctgctcagtcacagactcttgttatgcgattgaattggaatactcagtagatcttggattgtcatggcacccattggtaagggactgtctgcctaccaatgtggaatgcagtcgctatcatctgcaacggatcctggtgtcagacactttcaacaagtggactagaatcactctgcctctccctccttataccaggtcccaagccactcgtttccgttggcatcaaccagctccttttgacaagcagcagacatgggcaatagataatgtctatatcggggatggctgcatagacatgtgcagtggccatgggagatgcatccagggaaactgcgtctgtgatgaacagtggggtggcctgtactgtgatgaccccgagacctctcttccaacccaactcaaagacaacttcaatcgagctccatccagtcagaactggctgactgtgaacggagggaaattgagtacagtgtgtggagccgtggcgtcgggaatggctctccatttcagtgggggttgtagtcgattattagtcactgtggatctaaacctcactaatgctgagttcatccaattttacttcatgtatgggtgcctgattacaccaaacaaccgtaaccaaggtgttctcttggaatattctgtcaatggaggcattacctggaacctgctcatggagattttctatgaccagtacagtaagcccggatttgtgaatatccttctccctcctgatgctaaagagattgccactcgcttccgctggtggcagccaagacatgacggcctggatcagaacgactgggccattgacaatgtcctcatctcaggctctgctgaccaaaggaccgttatgctggacaccttcagcagcgccccagtaccccagcatgagcgctcccctgcagatgccggccctgtcgggaggatcgcctttgacatgtttatggaagacaaaacttcagtgaatgagcactggctattccatgatgattgtacagtagaaagattctgtgactcccctgatggtgtgatgctctgtggcagtcatgatggacgggaggtgtatgcagtgacccatgacctgactcccactgaaggctggattatgcaattcaagatctcagttggatgtaaggtgtctgaaaaaattgcccagaatcaaattcatgtgcagtattctactgacttcggtgtgagttggaattatctggtccctcagtgcttgcctgctgacccaaaatgctctggaagtgtttctcagccatctgtattctttccaactaaagggtggaaaaggatcacctacccacttcctgaaagcttagtgggaaatccggtaaggtttaggttctatcagaagtactcagacatgcagtgggcaatcgataatttctacctgggccctggatgcttggacaactgcaggggccatggagattgcttaagggaacagtgcatctgtgatccgggatactcagggccaaactgctacttgacccacactctgaagactttcctgaaggaacgctttgacagtgaagaaatcaaacctgacttatggatgtccttagaaggtggaagtacttgcactgagtgtggaattcttgccgaggacactgcactctattttgggggatccactgtgagacaagcggttacacaagatttggatcttcgaggtgcaaagttcctgcaatactgggggcgcatcggtagtgagaacaacatgacctcttgccatcgtcccatctgccggaaggaaggcgtgctgttggactactctaccgatggaggaattacctggactttgctccatgagatggattaccagaaatacatttctgttagacacgactacatacttcttcctgaagatgccctcaccaacacaactcgacttcgctggtggcagccttttgtgatcagcaatggaattgtggtctctggggtggagcgtgctcagtgggcactggacaacattttgattggtggagcagaaatcaatcccagccaattggtggacacttttgatgatgaaggcacttcccatgaagaaaactggagtttttaccctaatgctgtaaggacagcaggattttgtggcaatccatcctttcacctctattggccaaataaaaagaaggacaagactcacaatgctctctcctcccgagaactcattatacagccaggatacatgatgcagtttaaaattgtggtgggttgtgaagccacttcttgtggtgaccttcattccgtaatgctggaatacactaaggatgcaagatcggattcctggcagctcgtacagacccagtgccttccttcctcttctaacagcattggctgctcccctttccagttccatgaagccaccatctacaactctgtcaacagctcaagctggaaaagaatcaccatccagctgcctgaccatgtctcctctagtgcaacacagttccgctggatccagaagggagaagaaactgagaagcaaagctgggcaattgaccacgtgtacattggagaggcttgccccaagctctgcagcgggcacggatactgcacgaccggtgccatctgcatctgcgacgagagcttccaaggtgatgactgctctgttttcagtcacgaccttcccagttatattaaagataattttgagtccgcaagagtcaccgaggcaaactgggagaccattcaaggtggagtcataggaagtggctgtgggcagctggccccctacgcccatggagactcactgtactttaatggctgtcagatcaggcaagcagctaccaagcctctggatctcactcgagcaagcaaaatcatgtttgttttgcaaattgggagcatgtcgcagacggacagctgcaacagtgacctgagtggcccccacgctgtggacaaggcagtgctgctgcaatacagcgtcaacaacgggatcacctggcatgtcatcgcccagcaccagccaaaggacttcacacaagctcagagagtgtcttacaatgtccccctggaggcacggatgaaaggagtcttactgcgctggtggcaaccacgccacaatggaacaggtcatgatcaatgggctttggaccatgtggaggtcgtcctgtgaagcactcgcaaacaaaattacatgatgaatttttcacgacaacatgggctcagacatttctacaacagaagacgaaggtcacttaggcgatacccatgaagaatcaaaaagtttattttttttcttccaacatgtgatgtgttgctctccattcttttaaatctcgcactacatctgatatcaggaaatatctgtgaaggacttggtgattacctgaaagcccttctcaagaccgagtgtacaccactttcccacactgtgaactaatgacaagtgacttatttgctcataagtaaatgtcttcatgttgatgtgtccgtgaaagttgtgatctgttgtaatatcagttacagtggcagtattgacaataagaaacagtttaacagaaaaatgaaatttaagcacaaaaaatttaagagattttatgtttaaaatggcatttagcacagtatttaacattcttggtcacaaagctatttaagtggactgtatttcggctatgtctcatgttttatatgattaaattatcattgtttgtcctttatgtattctcttctacaatacaacacattgaaactgtatttacttgttatgttgtaatattttgctgctgaatttggggctacttatattctgcagaaaattaattgaaatacctattcaagaagatagttgtaaagatattgtatctcctttaatatactccttaaaaatgtatgttggtttagcgttgttttgtggataagaaaaatgcttgaccctgaaatattttctactttaaattgtggatgaagaccctatctcccacaaataagttcccatttccttgtctaaagatctttttttaagtgttctgtggctgatttactaacagtaactgccattttttgtctgtgataacagagtgatttgtaaaacagtggttgttttttcattgtgttttcttcgtggattgttttttctgcgggtcatattcataccttctgatgaagttgtacaacaccagcaacattataatggccctgtagctctgaatgctatttgtgtaactgaaaggttgcactctagggtgaaccaagctataaaagcccatgcttaaataaaaattatgtccaaaagccattgaa

SEQ ID NO: 152354 - protein, 253 aa, Artificial Sequence
  derived and/or modified sequence
MARSLLLPLQILLLSLALETAGEEAQGDKIIDGAPCARGSHPWQVALLSGNQLHCGGVLVNERWVLTAAHCKMNEYTVHLGSDTLGDRRAQRIKASKSFRHPGYSTQTHVNDLMLVKLNSQARLSSMVKKVRLPSRCEPPGTTCTVSGWGTTTSPDVTFPSDLMCVDVKLISPQDCTKVYKDLLENSMLCAGIPDSKKNACNGDSGGPLVCRGTLQGLVSWGTFPCGQPNDPGVYTQVCKFTKWINDTMKKHR

SEQ ID NO: 152355 - protein, 140 aa, Artificial Sequence
  derived and/or modified sequence
MLVKLNSQARLSSMVKKVRLPSRCEPPGTTCTVSGWGTTTSPDVTFPSDLMCVDVKLISPQDCTKVYKDLLENSMLCAGIPDSKKNACNGDSGGPLVCRGTLQGLVSWGTFPCGQPNDPGVYTQVCKFTKWINDTMKKHR

SEQ ID NO: 152356 - DNA, 762 bp, Artificial Sequence
  derived and/or modified sequence
atggctcggagcctgctcctccctctgcagattctgcttctatctttagcgttagagaccgccggagaagaggcgcaaggagacaaaatcattgatggcgcaccgtgcgctagaggctcacatccctggcaggtagctctgctctccggcaatcagcttcactgtggcggagtgctcgtcaacgagagatgggtgcttaccgctgcccactgtaagatgaacgaatacacagttcacctgggttcagacacactgggcgaccggcgtgcccagcgtatcaaggcttccaaatcttttcggcaccctggatatagcacccagacccacgtcaacgatttgatgctggtaaaactaaacagccaagcccgactctcctccatggtaaagaaagtccgcctgccttctaggtgcgaaccccctggcacgacttgcactgtgagtggctgggggaccacaacctccccggacgtgactttccctagcgatttgatgtgcgtggacgttaaactgatctctccccaagactgtacaaaagtatacaaagatttgctggagaattccatgctgtgcgccggaatcccagactccaagaagaatgcctgcaatggcgattccggcggacctctggtttgtcggggtactctccagggtctcgtctcttgggggacctttccttgtggccaaccaaatgatccaggagtctacacgcaagtgtgcaaatttacgaaatggatcaacgataccatgaagaagcatagatag

SEQ ID NO: 152357 - DNA, 762 bp, Artificial Sequence
  derived and/or modified sequence
atggccaggtcattactcctacccctgcagatccttctattgtctctggccctagagacggcgggtgaagaagcacagggggataaaataattgatggagcgccatgtgcacgaggtagccatccttggcaggtggctcttctgtctggaaaccagctgcattgcggaggtgttctcgtgaacgaaagatgggtactcactgccgcacattgtaagatgaacgagtacaccgtacatctgggctctgacactctgggggacagacgagcgcagagaatcaaggcctctaagtctttccggcatcctggctatagtacgcagacgcatgtaaatgacttaatgcttgtgaagctcaactcccaggctaggctgagttcaatggtcaaaaaggtgagactcccaagcaggtgtgagccacccggtacaacctgcactgtgtccggatggggaaccaccacctcacctgatgtcacatttccatctgacttaatgtgtgtggatgtcaagctgatctctcctcaggattgcaccaaggtctataaagacctgttagaaaatagcatgctttgtgcaggcatacccgactcaaagaagaacgcttgcaacggggattcaggagggccacttgtgtgtaggggaactttgcaggggctcgtgagctggggaacctttccatgcggtcaacccaacgatcccggagtgtacacgcaggtctgtaagttcactaaatggattaacgacaccatgaagaagcacaggtag

SEQ ID NO: 152358 - DNA, 762 bp, Artificial Sequence
  derived and/or modified sequence
atggccaggagtcttttacttcccctacagattttgctgctgtcactggccctcgagactgcaggagaagaagcacagggagacaaaattattgacggagcgccctgtgcccgaggatcccacccttggcaggtcgccttattgtccggcaatcagctacactgcggaggtgtacttgtgaatgagcgttgggtcttaaccgccgcccactgcaaaatgaatgaatacacggtgcatctcggctcagataccttaggcgaccgccgtgctcaacgcataaaggccagtaagagcttccgccatcccggatacagtacccagactcacgtcaacgatttaatgctcgtcaaacttaactcgcaggcccgactgagttctatggtgaaaaaagtccgactccctagccgctgcgaacctcccggtaccacctgcactgtctccgggtggggtacaactacatccccggacgttacttttccgtctgacctgatgtgtgtagatgtcaagctaataagtcctcaggactgcactaaagtgtacaaggacctcttggaaaactcaatgctttgtgctggaattcccgattcaaaaaaaaacgcctgcaacggcgattcaggaggccctctggtctgccgaggaactctgcagggccttgtgtcttgggggaccttcccctgcggacagcccaatgaccccggagtgtatacccaagtttgcaagtttacaaagtggatcaacgatacgatgaaaaagcatcgctag

SEQ ID NO: 152359 - DNA, 762 bp, Artificial Sequence
  derived and/or modified sequence
atggctcgctcattattgctgccgctgcaaatcctacttctatccttagccttagaaacagctggtgaggaggctcagggggataagattatcgacggtgccccctgcgccaggggaagtcatccatggcaagtcgcgctgttatcaggcaatcaactacactgtggcggcgttttggtaaacgaaagatgggtacttacagccgcccactgtaaaatgaatgagtacacagtccacctcggaagtgacaccttaggagacagacgggcccaacgcattaaggcatcgaagtcatttcggcacccggggtacagtacccagactcacgtcaacgatctgatgctcgtcaagctgaatagtcaggctaggctgtcctccatggttaaaaaagtccggctgccttctaggtgtgagcctcccggtactacgtgcaccgtgagcggttggggcaccacaaccagtccagacgtaaccttcccctccgacctcatgtgtgtggatgtcaagctaatttctcctcaggattgtacaaaggtatataaagacttgctcgaaaactccatgctgtgcgcaggcataccagacagcaagaaaaatgcatgtaatggagattccggtggaccactcgtgtgtagaggcacccttcagggactggtcagttggggaacgttcccgtgcggacagccgaatgaccctggtgtctacacccaagtctgtaaattcaccaagtggattaatgacacaatgaagaaacatcgatag

SEQ ID NO: 152360 - DNA, 762 bp, Artificial Sequence
  derived and/or modified sequence
atggccagatcgttgttgctgcctttgcaaatactgttgctgtcccttgccctagaaacagctggagaagaggcacaaggggataagattattgatggggcgccctgtgctcgaggctctcacccctggcaggttgcactcctcagcggaaaccagcttcattgtggcggcgtgctggtcaacgagagatgggtgcttactgccgctcactgtaagatgaatgagtatactgtccatctcggttccgatactctgggggacagaagagcgcaacgcatcaaggcttccaagagtttcaggcatcccggatacagtacccagactcacgtcaacgatttaatgctcgtcaaacttaactcgcaggcccgactgagttctatggtgaaaaaagtccgactccctagccgctgcgaacctcccggtaccacctgcactgtctccgggtggggtacaactacatccccggacgttacttttccgtctgacctgatgtgtgtagatgtcaagctaataagtcctcaggactgcactaaagtgtacaaggacctcttggaaaactcaatgctttgtgctggaattcccgattcaaaaaaaaacgcctgcaatggggacagtggcggccccttggtctgtcggggaactcttcagggtctggtcagttgggggacttttccatgcgggcagcccaacgatcctggcgtctacacccaagtgtgtaagttcactaaatggattaatgatacaatgaagaaacatcggtag

SEQ ID NO: 152361 - DNA, 762 bp, Artificial Sequence
  derived and/or modified sequence
atggcgcggtcactcctgctcccccttcagattctcctcttaagcttagccctcgaaaccgccggtgaggaagcacagggtgataaaattattgacggggccccttgtgctcgtggatcacatccctggcaagtggctctactctctggcaatcagcttcactgtggaggggtcctcgtgaacgaaagatgggtgttaactgccgctcactgcaagatgaacgagtacactgtccacctggggtctgacactttgggtgacagaagggcacaaaggataaaggcatcgaagtcattcagacacccaggttactctactcagacccacgtaaatgacttgatgctggtaaaacttaatagtcaagctagactcagctccatggtgaagaaggtacgactgccctcccgttgtgagcctccaggaacaacttgcactgtatcaggttggggaacaaccacaagccccgacgtgacatttcctagtgatctgatgtgcgtggacgtaaagctcattagcccccaggactgtaccaaggtgtacaaggacttgttggaaaattcaatgctatgcgctggtattcccgatagcaaaaaaaatgcctgtaacggcgatagcggcgggccactggtctgtcgggggacgctgcagggcctggtttcatggggcacttttccttgcgggcagcctaatgacccaggagtttacacccaggtctgcaaatttacaaaatggataaatgacacaatgaagaagcaccgatag

SEQ ID NO: 152362 - DNA, 762 bp, Artificial Sequence
  derived and/or modified sequence
atggccagaagcctgctgctgcccctgcagatcctgctgctgagcctggccctggagaccgccggcgaggaggcccagggcgacaagatcatcgacggcgccccctgcgccagaggcagccacccctggcaggtggccctgctgagcggcaaccagctgcactgcggcggcgtgctggtgaacgagagatgggtgctgaccgccgcccactgcaagatgaacgagtacaccgtgcacctgggcagcgacaccctgggcgacagaagagcccagagaatcaaggccagcaagagcttcagacaccccggctacagcacccagacccacgtgaacgacctgatgctggtgaagctgaacagccaggccagactgagcagcatggtgaagaaggtgagactgcccagcagatgcgagccccccggcaccacctgcaccgtgagcggctggggcaccaccaccagccccgacgtgaccttccccagcgacctgatgtgcgtggacgtgaagctgatcagcccccaggactgcaccaaggtgtacaaggacctgctggagaacagcatgctgtgcgccggcatccccgacagcaagaagaacgcctgcaacggcgacagcggcggccccctggtgtgcagaggcaccctgcagggcctggtgagctggggcaccttcccctgcggccagcccaacgaccccggcgtgtacacccaggtgtgcaagttcaccaagtggatcaacgacaccatgaagaagcacagatag

SEQ ID NO: 152363 - DNA, 1927 bp, Artificial Sequence
  derived and/or modified sequence
tgccagcccaagtcggaacttggatcacatcagatcctctcgagctccagcaggagaggcccttcctcgcctggcagcccctgagcggctcagcagggcaccatggcaagatcccttctcctgcccctgcagatcttactgctatccttagccttggaaactgcaggagaagaagcccagggtgacaagattattgatggcgccccatgtgcaagaggctcccacccatggcaggtggccctgctcagtggcaatcagctccactgcggaggcgtcctggtcaatgagcgctgggtgctcactgccgcccactgcaagatgaatgagtacaccgtgcacctgggcagtgatacgctgggcgacaggagagctcagaggatcaaggcctcgaagtcattccgccaccccggctactccacacagacccatgttaatgacctcatgctcgtgaagctcaatagccaggccaggctgtcatccatggtgaagaaagtcaggctgccctcccgctgcgaaccccctggaaccacctgtactgtctccggctggggcactaccacgagcccagatgtgacctttccctctgacctcatgtgcgtggatgtcaagctcatctccccccaggactgcacgaaggtttacaaggacttactggaaaattccatgctgtgcgctggcatccccgactccaagaaaaacgcctgcaatggtgactcagggggaccgttggtgtgcagaggtaccctgcaaggtctggtgtcctggggaactttcccttgcggccaacccaatgacccaggagtctacactcaagtgtgcaagttcaccaagtggataaatgacaccatgaaaaagcatcgctaacgccacactgagttaattaactgtgtgcttccaacagaaaatgcacaggagtgaggacgccgatgacctatgaagtcaaatttgactttacctttcctcaaagatatatttaaaccaacctcatgccctgttgataaaccaatcaaattggtaaagacctaaaaccaaaacaaataaagaaacacaaaaccctcagtgctggagaagagtcagtgagaccagcactctcaaacactggaactggacgttcgtacagtctttacggaagacacttggtcaacgtacaccgagacccttattcaccacctttgacccagtaactctaatcttaggaagaacctactgaaacaaaaaaaatccaaaatgtagaacaagacttgaatttaccatgatattatttatcacagaaatgaagtgaaaccatcaaacatgttccaaaagtaccagatggcttaaataatagtctggcttggcacaacgatgttttttttctttgagacagagtctctgttgcttgggctgcaatgcagtgatgcaatcttggctcactgcaacctccgcctcctgggttcaagtgattctcgtgcttcagcctcccaagtacctgggactacaggtgtgcaccaccacaccaggctaattttttgtgtatttttactagagacagggtttcaccatgttggccagcatggtcttgaacgcctgacctcagatgatccacccaccttggcctcccaaagtgctgggattacaggcatgagccaccacggccagcccacaatgatattacaaacctattaaaaatgatacttagacagaattgtcagtattattcaagaacatttaggctataggatgttaaatgacaaaaggaaggacaaaaatatatatgtatgtgaccctacccataaaaaatgaaatattcacagaatcagatctgaaaacacatgtcccagactgcatactggggtcgtcatgaggtgtctccttccttctgtgtacttttccttgaatgtgcacttttataacatgaaaaataaaggtggggaaaaaagtctgaaga

SEQ ID NO: 152364 - DNA, 762 bp, Artificial Sequence
  derived and/or modified sequence
atggctcggtctctgctgctgcccctccagatactgctgctgtctctcgctctagagacggccggcgaggaagcccaaggcgacaagattatagatggagctccctgcgcgcgcgggtcccatccatggcaggtcgcacttcttagtggcaatcagctgcactgcggcggagtgctggtcaatgagcgctgggttctaacagctgcacactgcaagatgaatgaatatactgttcatttgggctctgacacgctcggggaccggcgggcgcagcgaatcaaagccagcaagtcctttagacaccccggctattctacccaaacccatgttaacgacctcatgctcgtgaagctgaacagccaggctcggctcagctctatggtcaagaaggtccggctcccatcaagatgcgaacctccagggactacctgcacggtgagcggctgggggactacaacatccccagatgttacgttcccatcggatcttatgtgtgtggacgtcaaactgatctcccctcaggactgcacaaaggtttacaaggatttgctcgaaaacagcatgttatgcgccggcatccccgacagcaagaaaaacgcctgtaatggagattccggaggtccccttgtatgccggggcactttgcaggggcttgtcagttgggggacttttccatgtggacagccaaatgatcccggcgtgtatacccaggtatgtaaattcacaaaatggattaatgacaccatgaaaaaacatcgctag

SEQ ID NO: 152365 - DNA, 762 bp, Artificial Sequence
  derived and/or modified sequence
atggcccgcagccttctactacccttgcagatccttctactatcactggccttagagacagctggggaggaagcgcagggtgacaaaattattgacggggccccctgtgcgaggggaagtcacccatggcaggtggcccttctgagcggcaatcagctgcattgcggcggggtgctggtaaatgaacggtgggtgctgacagctgctcattgcaaaatgaatgaatatacggtgcacctgggttcagacacccttggcgaccgccgagcccagagaatcaaggcttccaaatctttcagacatcccggctatagcacacagactcatgtcaatgatctcatgttggtgaaactcaattctcaggcgcgcttgtctagcatggtgaaaaaagttcgcctgccctctaggtgcgaaccgcccggaacaacgtgcaccgtctctggatggggaaccactacgagcccagacgttaccttcccatcagacctgatgtgtgtggacgtcaaattaatcagcccccaggattgcacaaaggtctacaaggatctcctggagaacagcatgctttgcgccggcattcccgatagcaagaagaatgcgtgcaacggcgactcaggagggccccttgtatgtagggggacattgcagggtttagttagttggggtactttcccctgtggtcagccaaacgacccaggggtgtatacccaagtctgtaaatttactaagtggattaatgacacgatgaagaaacataggtag

SEQ ID NO: 152366 - DNA, 762 bp, Artificial Sequence
  derived and/or modified sequence
atggcccggagcctgctgctgcccctgcagatcctgctgctgagcctggccctggagacagctggggaggaggcccagggcgacaagatcattgatggagccccctgtgcccggggcagccacccctggcaggtggccctgctgagcggcaaccagctgcactgcggcggcgtgctggtgaatgaacgctgggtgctgacagctgcccactgcaagatgaatgagtacacagtgcacctgggcagtgacaccctgggggaccggcgggcccagaggatcaaggccagcaagagcttccgccaccctggctacagcacccagacccacgtgaatgacctgatgctggtgaagctgaacagccaggcccggctgagctccatggtgaagaaggtgcggctgcccagccgctgtgagcccccaggcaccacctgcaccgtgtctggctggggcaccaccaccagcccagatgtgaccttccccagcgacctgatgtgtgtggatgtgaagctgatcagcccccaggactgcaccaaggtgtacaaggacctgctggagaacagcatgctgtgtgccggcatcccagacagcaagaagaatgcctgcaatggagacagcggcggccccctggtgtgccggggcaccctgcagggcctggtgtcctggggcaccttcccctgtggccagcccaatgaccccggggtgtacacccaggtgtgcaagttcaccaagtggatcaatgacaccatgaagaagcacaggtag

SEQ ID NO: 152367 - DNA, 762 bp, Artificial Sequence
  derived and/or modified sequence
atggcccggagcctgctgctgcccctgcagatcctgctgctgagcctcgccttagaaacagcaggggaggaggctcaaggtgacaaaataattgacggcgcaccatgcgccagaggctcacacccgtggcaggtggccctgctgagcgggaaccagctgcattgcggtggtgtgctcgttaacgagaggtgggtcctgacagccgcccactgtaagatgaacgaatacacagtgcacttaggctctgacaccctgggcgaccgccgggcgcagcgaatcaaagcatccaaatccttccgacacccagggtactctacccagactcatgtgaatgatttgatgctggtcaagctgaattcccaagccagactgtctagtatggtgaaaaaggtgaggctgccaagcagatgtgagccccctggcacaacatgcacagtgtcaggatggggaactactacatcccccgacgtgacttttccatctgatctgatgtgtgttgacgtcaaactcattagtccgcaggattgtaccaaagtgtataaggacctgctcgaaaactcaatgctgtgcgccggtattccagatagtaagaaaaatgcctgtaatggggactctggcggtccactcgtgtgtcggggtacacttcagggactggttagctggggtaccttcccatgcggtcagccaaatgatcctggcgtgtacacacaggtgtgtaagttcacgaaatggattaacgatacgatgaagaaacacaggtag

SEQ ID NO: 152368 - DNA, 762 bp, Artificial Sequence
  derived and/or modified sequence
atggcccggagcctgctgctgcccctgcagatcctgctgctgagcttagccctggaaaccgcaggcgaggaggcacagggcgataaaatcatcgatggtgccccgtgcgcacgaggctctcacccttggcaggtggctctcttgagcggtaaccagctacactgtgggggagtgctggtgaacgaacggtgggtcttgaccgctgcccactgcaaaatgaacgagtacaccgttcaccttggctcggatacactcggtgatagacgggcccagagaatcaaagcgagcaaatccttcaggcacccaggctactcaacgcagactcatgtgaacgacctgatgctggttaaacttaactctcaggcccgcctcagcagtatggttaagaaggttagactaccctcacgatgtgagccaccagggaccacatgcaccgtgtccggctggggaacaactacatcccctgacgtgacctttccatccgacctcatgtgcgtggatgtgaaactcatatctcctcaggattgcaccaaagtgtacaaagatcttctagagaactcgatgctttgcgcgggaattcccgattccaagaagaacgcatgtaacggagattctggagggcccctggtctgtcgcggaacacttcagggtttggtgagttggggtacatttccttgcggacagcccaacgatccaggagtttatacccaggtatgcaagttcactaagtggatcaatgacacaatgaaaaagcatcgatag

SEQ ID NO: 152369 - DNA, 1927 bp, Artificial Sequence
  derived and/or modified sequence
ggagagggtgatgctggctccaagcctgactctgctctcgagagctccagcaggagaggcccttcctcgcctggcagcccctgagcggctcagcagggcaccatggcaagatcccttctcctgcccctgcagatcttactgctatccttagccttggaaactgcaggagaagaagcccagggtgacaagattattgatggcgccccatgtgcaagaggctcccacccatggcaggtggccctgctcagtggcaatcagctccactgcggaggcgtcctggtcaatgagcgctgggtgctcactgccgcccactgcaagatgaatgagtacaccgtgcacctgggcagtgatacgctgggcgacaggagagctcagaggatcaaggcctcgaagtcattccgccaccccggctactccacacagacccatgttaatgacctcatgctcgtgaagctcaatagccaggccaggctgtcatccatggtgaagaaagtcaggctgccctcccgctgcgaaccccctggaaccacctgtactgtctccggctggggcactaccacgagcccagatgtgacctttccctctgacctcatgtgcgtggatgtcaagctcatctccccccaggactgcacgaaggtttacaaggacttactggaaaattccatgctgtgcgctggcatccccgactccaagaaaaacgcctgcaatggtgactcagggggaccgttggtgtgcagaggtaccctgcaaggtctggtgtcctggggaactttcccttgcggccaacccaatgacccaggagtctacactcaagtgtgcaagttcaccaagtggataaatgacaccatgaaaaagcatcgctaacgccacactgagttaattaactgtgtgcttccaacagaaaatgcacaggagtgaggacgccgatgacctatgaagtcaaatttgactttacctttcctcaaagatatatttaaaccaacctcatgccctgttgataaaccaatcaaattggtaaagacctaaaaccaaaacaaataaagaaacacaaaaccctcagtgctggagaagagtcagtgagaccagcactctcaaacactggaactggacgttcgtacagtctttacggaagacacttggtcaacgtacaccgagacccttattcaccacctttgacccagtaactctaatcttaggaagaacctactgaaacaaaaaaaatccaaaatgtagaacaagacttgaatttaccatgatattatttatcacagaaatgaagtgaaaccatcaaacatgttccaaaagtaccagatggcttaaataatagtctggcttggcacaacgatgttttttttctttgagacagagtctctgttgcttgggctgcaatgcagtgatgcaatcttggctcactgcaacctccgcctcctgggttcaagtgattctcgtgcttcagcctcccaagtacctgggactacaggtgtgcaccaccacaccaggctaattttttgtgtatttttactagagacagggtttcaccatgttggccagcatggtcttgaacgcctgacctcagatgatccacccaccttggcctcccaaagtgctgggattacaggcatgagccaccacggccagcccacaatgatattacaaacctattaaaaatgatacttagacagaattgtcagtattattcaagaacatttaggctataggatgttaaatgacaaaaggaaggacaaaaatatatatgtatgtgaccctacccataaaaaatgaaatattcacagaatcagatctgaaaacacatgtcccagactgcatactggggtcgtcatgaggtgtctccttccttctgtgtacttttccttgaatgtgcacttttataacatgaaaaataaaggtggggaaaaaagtctgaaga

SEQ ID NO: 152370 - RNA, 762 nt, Artificial Sequence
  derived and/or modified sequence
auggccaggagucuuuuacuuccccuacagauuuugcugcugucacuggcccucgagacugcaggagaagaagcacagggagacaaaauuauugacggagcgcccugugcccgaggaucccacccuuggcaggucgccuuauuguccggcaaucagcuacacugcggagguguacuugugaaugagcguugggucuuaaccgccgcccacugcaaaaugaaugaauacacggugcaucucggcucagauaccuuaggcgaccgccgugcucaacgcauaaaggccaguaagagcuuccgccaucccggauacaguacccagacucacgucaacgauuuaaugcucgucaaacuuaacucgcaggcccgacugaguucuauggugaaaaaaguccgacucccuagccgcugcgaaccucccgguaccaccugcacugucuccgggugggguacaacuacauccccggacguuacuuuuccgucugaccugauguguguagaugucaagcuaauaaguccucaggacugcacuaaaguguacaaggaccucuuggaaaacucaaugcuuugugcuggaauucccgauucaaaaaaaaacgccugcaacggcgauucaggaggcccucuggucugccgaggaacucugcagggccuugugucuugggggaccuuccccugcggacagcccaaugaccccggaguguauacccaaguuugcaaguuuacaaaguggaucaacgauacgaugaaaaagcaucgcuag

SEQ ID NO: 152371 - RNA, 762 nt, Artificial Sequence
  derived and/or modified sequence
auggcucgcucauuauugcugccgcugcaaauccuacuucuauccuuagccuuagaaacagcuggugaggaggcucagggggauaagauuaucgacggugcccccugcgccaggggaagucauccauggcaagucgcgcuguuaucaggcaaucaacuacacuguggcggcguuuugguaaacgaaagauggguacuuacagccgcccacuguaaaaugaaugaguacacaguccaccucggaagugacaccuuaggagacagacgggcccaacgcauuaaggcaucgaagucauuucggcacccgggguacaguacccagacucacgucaacgaucugaugcucgucaagcugaauagucaggcuaggcuguccuccaugguuaaaaaaguccggcugccuucuaggugugagccucccgguacuacgugcaccgugagcgguuggggcaccacaaccaguccagacguaaccuuccccuccgaccucauguguguggaugucaagcuaauuucuccucaggauuguacaaagguauauaaagacuugcucgaaaacuccaugcugugcgcaggcauaccagacagcaagaaaaaugcauguaauggagauuccgguggaccacucguguguagaggcacccuucagggacuggucaguuggggaacguucccgugcggacagccgaaugacccuggugucuacacccaagucuguaaauucaccaaguggauuaaugacacaaugaagaaacaucgauag

SEQ ID NO: 152372 - RNA, 762 nt, Artificial Sequence
  derived and/or modified sequence
auggccagaucguuguugcugccuuugcaaauacuguugcugucccuugcccuagaaacagcuggagaagaggcacaaggggauaagauuauugauggggcgcccugugcucgaggcucucaccccuggcagguugcacuccucagcggaaaccagcuucauuguggcggcgugcuggucaacgagagaugggugcuuacugccgcucacuguaagaugaaugaguauacuguccaucucgguuccgauacucugggggacagaagagcgcaacgcaucaaggcuuccaagaguuucaggcaucccggauacaguacccagacucacgucaacgauuuaaugcucgucaaacuuaacucgcaggcccgacugaguucuauggugaaaaaaguccgacucccuagccgcugcgaaccucccgguaccaccugcacugucuccgggugggguacaacuacauccccggacguuacuuuuccgucugaccugauguguguagaugucaagcuaauaaguccucaggacugcacuaaaguguacaaggaccucuuggaaaacucaaugcuuugugcuggaauucccgauucaaaaaaaaacgccugcaauggggacaguggcggccccuuggucugucggggaacucuucagggucuggucaguugggggacuuuuccaugcgggcagcccaacgauccuggcgucuacacccaaguguguaaguucacuaaauggauuaaugauacaaugaagaaacaucgguag

SEQ ID NO: 152373 - RNA, 762 nt, Artificial Sequence
  derived and/or modified sequence
auggcgcggucacuccugcucccccuucagauucuccucuuaagcuuagcccucgaaaccgccggugaggaagcacagggugauaaaauuauugacggggccccuugugcucguggaucacaucccuggcaaguggcucuacucucuggcaaucagcuucacuguggagggguccucgugaacgaaagauggguguuaacugccgcucacugcaagaugaacgaguacacuguccaccuggggucugacacuuugggugacagaagggcacaaaggauaaaggcaucgaagucauucagacacccagguuacucuacucagacccacguaaaugacuugaugcugguaaaacuuaauagucaagcuagacucagcuccauggugaagaagguacgacugcccucccguugugagccuccaggaacaacuugcacuguaucagguuggggaacaaccacaagccccgacgugacauuuccuagugaucugaugugcguggacguaaagcucauuagcccccaggacuguaccaagguguacaaggacuuguuggaaaauucaaugcuaugcgcugguauucccgauagcaaaaaaaaugccuguaacggcgauagcggcgggccacuggucugucgggggacgcugcagggccugguuucauggggcacuuuuccuugcgggcagccuaaugacccaggaguuuacacccaggucugcaaauuuacaaaauggauaaaugacacaaugaagaagcaccgauag

SEQ ID NO: 152374 - protein, 550 aa, Artificial Sequence
  derived and/or modified sequence
MAGLGASLHVWGWLMLGSCLLARAQLDSDGTITIEEQIVLVLKAKVQCELNITAQLQEGEGNCFPEWDGLICWPRGTVGKISAVPCPPYIYDFNHKGVAFRHCNPNGTWDFMHSLNKTWANYSDCLRFLQPDISIGKQEFFERLYVMYTVGYSISFGSLAVAILIIGYFRRLHCTRNYIHMHLFVSFMLRATSIFVKDRVVHAHIGVKELESLIMQDDPQNSIEATSVDKSQYIGCKIAVVMFIYFLATNYYWILVEGLYLHNLIFVAFFSDTKYLWGFILIGWGFPAAFVAAWAVARATLADARCWELSAGDIKWIYQAPILAAIGLNFILFLNTVRVLATKIWETNAVGHDTRKQYRKLAKSTLVLVLVFGVHYIVFVCLPHSFTGLGWEIRMHCELFFNSFQGFFVSIIYCYCNGEVQAEVKKMWSRWNLSVDWKRTPPCGSRRCGSVLTTVTHSTSSQSQVAASTRMVLISGKAAKIASRQPDSHITLPGYVWSNSEQDCLPHSFHEETKEDSGRQGDDILMEKPSRPMESNPDTEGCQGETEDVL

SEQ ID NO: 152375 - DNA, 1653 bp, Artificial Sequence
  derived and/or modified sequence
atggccggcctgggcgccagcctgcacgtgtggggctggctgatgctgggcagctgcctgctggccagagcccagctggacagcgacggcaccatcaccatcgaggagcagatcgtgctggtgctgaaggccaaggtgcagtgcgagctgaacatcaccgcccagctgcaggagggcgagggcaactgcttccccgagtgggacggcctgatctgctggcccagaggcaccgtgggcaagatcagcgccgtgccctgccccccctacatctacgacttcaaccacaagggcgtggccttcagacactgcaaccccaacggcacctgggacttcatgcacagcctgaacaagacctgggccaactacagcgactgcctgagattcctgcagcccgacatcagcatcggcaagcaggagttcttcgagagactgtacgtgatgtacaccgtgggctacagcatcagcttcggcagcctggccgtggccatcctgatcatcggctacttcagaagactgcactgcaccagaaactacatccacatgcacctgttcgtgagcttcatgctgagagccaccagcatcttcgtgaaggacagagtggtgcacgcccacatcggcgtgaaggagctggagagcctgatcatgcaggacgacccccagaacagcatcgaggccaccagcgtggacaagagccagtacatcggctgcaagatcgccgtggtgatgttcatctacttcctggccaccaactactactggatcctggtggagggcctgtacctgcacaacctgatcttcgtggccttcttcagcgacaccaagtacctgtggggcttcatcctgatcggctggggcttccccgccgccttcgtggccgcctgggccgtggccagagccaccctggccgacgccagatgctgggagctgagcgccggcgacatcaagtggatctaccaggcccccatcctggccgccatcggcctgaacttcatcctgttcctgaacaccgtgagagtgctggccaccaagatctgggagaccaacgccgtgggccacgacaccagaaagcagtacagaaagctggccaagagcaccctggtgctggtgctggtgttcggcgtgcactacatcgtgttcgtgtgcctgccccacagcttcaccggcctgggctgggagatcagaatgcactgcgagctgttcttcaacagcttccagggcttcttcgtgagcatcatctactgctactgcaacggcgaggtgcaggccgaggtgaagaagatgtggagcagatggaacctgagcgtggactggaagagaacccccccctgcggcagcagaagatgcggcagcgtgctgaccaccgtgacccacagcaccagcagccagagccaggtggccgccagcaccagaatggtgctgatcagcggcaaggccgccaagatcgccagcagacagcccgacagccacatcaccctgcccggctacgtgtggagcaacagcgagcaggactgcctgccccacagcttccacgaggagaccaaggaggacagcggcagacagggcgacgacatcctgatggagaagcccagcagacccatggagagcaaccccgacaccgagggctgccagggcgagaccgaggacgtgctgtag

SEQ ID NO: 152376 - DNA, 1653 bp, Artificial Sequence
  derived and/or modified sequence
atggcagggctcggagccagcttacacgtgtggggttggctgatgctgggatcatgcctgttggcacgggcacaactcgattcggacggtacgatcactatcgaggaacagatagtactggtactaaaagcaaaggtgcaatgcgagctgaatattacagcccagctccaagaaggtgaggggaattgcttccctgagtgggacggtctcatttgttggccgaggggcaccgtggggaagatcagcgcagtgccttgccccccgtatatttacgacttcaatcataaaggcgtggcattccggcactgtaatccgaacggaacatgggactttatgcattcattgaacaaaacctgggccaattacagcgactgtttaaggttcctacagcctgacatatccattggtaaacaagagttcttcgagcgactctacgtgatgtacactgtggggtacagcatcagcttcggctcattagctgtggctatattgataatcggatacttcaggcggctccattgtaccaggaactatattcatatgcacttgttcgttagcttcatgctgcgcgctaccagcatcttcgttaaagatagagtagtccacgcacacattggcgttaaggagctcgagagcttaatcatgcaggatgatccgcagaactccattgaggccacgtccgtggataagtcacagtacatcggttgtaagatcgccgtagtaatgttcatttatttcctcgcaaccaactattattggatcctcgtggagggtctatatctccacaacctcattttcgtcgccttcttttcagacactaaatatttgtgggggttcattctgattggctggggttttcccgccgccttcgtggccgcatgggccgtagccagagccactctggccgacgccagatgttgggagctatccgctggcgacatcaaatggatttaccaggccccaattttggctgctattgggctaaactttattctatttctgaacacagttcgcgtgctcgccacaaagatctgggagacgaacgctgtaggccatgatacacgaaagcagtatcggaaattggccaaatcaactcttgtattagtcttggtgtttggagtccattacatcgtcttcgtgtgtctgccccattcatttacaggactagggtgggagatccgcatgcactgtgagctgttctttaattcctttcaggggttttttgtaagtatcatctattgttactgcaacggggaggtgcaggctgaggttaaaaagatgtggagcagatggaacctgagcgtagactggaagcgtactcccccatgtggctctcggaggtgcggcagcgtgctgaccacagtgacccattcaacctcttcgcagtctcaggttgctgcgagcacccggatggtgttgattagtggaaaggctgctaagattgccagtcgacagccagatagccatatcactctgcccggctatgtgtggagcaatagtgaacaagactgccttcctcatagcttccatgaagaaacaaaagaggactctggccgacagggcgatgacatccttatggaaaagccatcaaggccaatggagtcaaatcccgacactgagggctgccaaggtgaaacagaggacgtcctgtag

SEQ ID NO: 152377 - DNA, 1653 bp, Artificial Sequence
  derived and/or modified sequence
atggccggcctgggcgccagcctgcacgtgtggggctggctgatgctgggcagctgcctgctggcccgggcccagctggacagtgatggcaccatcaccatcgaggagcagatcgtgctggtgctgaaggccaaggtgcagtgtgagctgaacatcacagcccagctgcaggagggggagggcaactgcttccctgagtgggatggcctcatctgctggccccggggcaccgtgggcaagatctctgctgtgccctgccccccctacatctatgacttcaaccacaagggcgtggccttccgccactgcaaccccaacggcacctgggacttcatgcacagcctgaacaagacctgggccaactacagcgactgcctgcgcttcctgcagcctgacatcagcatcggcaagcaggagttctttgagcggctgtatgtgatgtacacagtgggctacagcatcagctttggcagcctggccgtggccatcctgatcatcggctacttccggcggctgcactgcaccaggaactacatccacatgcacctgtttgtgtccttcatgctgcgggccaccagcatctttgtgaaggacagagtggtgcacgcccacatcggcgtgaaggagctggagagcctcatcatgcaggatgacccccagaacagcattgaggccacctctgtggacaagagccagtacatcggctgcaagattgctgtggtgatgttcatctacttcctggccaccaactactactggatcctggtggagggcctgtacctgcacaacctgatctttgtggccttcttcagtgacaccaagtacctgtggggcttcatcctgattggctggggcttccctgctgcctttgtggccgcctgggccgtggcccgggccaccctggctgatgcccgctgctgggagctgtctgctggggacatcaagtggatctaccaggcccccatcctggccgccatcggcctgaacttcatcctcttcctgaacacagtgcgggtgctggccaccaagatctgggagaccaatgctgtgggccatgacaccaggaagcagtacaggaagctggccaagagcaccctggtgctggtgctggtgtttggagtgcactacatcgtgtttgtgtgcctgccccacagcttcaccggcctgggctgggagatccgcatgcactgtgagctgttcttcaacagcttccagggcttctttgtgtccatcatctactgctactgcaatggagaggtgcaggccgaggtgaagaagatgtggagccgctggaacctgtctgtggactggaagaggaccccaccctgtggcagccgccgctgtggctctgtgctgaccaccgtgacccacagcaccagcagccagagccaggtggccgccagcaccaggatggtgctgatcagcggcaaggccgccaagatcgccagccggcagcctgacagccacatcaccctgcccggctacgtgtggagcaacagcgagcaggactgcctgccccacagcttccacgaggagaccaaggaggacagcggccggcagggagatgacatcctgatggagaagcccagccggcccatggagagcaacccagacacagagggctgccagggcgagacagaagatgtgctgtag

SEQ ID NO: 152378 - DNA, 1653 bp, Artificial Sequence
  derived and/or modified sequence
atggccggcctgggcgccagcctgcacgtgtggggctggctgatgctgggttcttgcttgctagcgagagcccagctggattccgacggcacaattactatcgaggaacaaattgtactggtcctgaaggctaaggtccaatgtgagctgaacattaccgcacagcttcaggaaggagagggaaattgtttccccgagtgggacggccttatttgttggccacgcggaacagtcggcaagataagcgcagtgccctgtcctccgtacatatatgactttaatcataaaggcgttgccttccgccactgcaatcccaacggaacctgggacttcatgcacagtcttaacaagacatgggcgaactactcggattgccttaggtttcttcaaccagacatctccattggaaagcaagaattctttgaaagactttacgtgatgtatacggttggctactccatctctttcggctccttggcagttgccatcctgattattggatacttcagaagactgcattgcacacgcaactatattcacatgcacctatttgtgagctttatgctgagagcaacgtccatttttgtgaaggatagggtcgttcacgcacacattggagtgaaggaactggagtccctgataatgcaagacgatccacaaaactccatagaggctacttctgtggacaaatcccagtacattggctgtaagattgcagtcgttatgttcatttatttcctggctacaaactattactggattctggtcgagggcctgtatctccataacctgatcttcgtcgcgttctttagcgacaccaagtacctgtggggatttatcctgatcgggtggggatttcctgccgcttttgtggccgcctgggcagtcgctcgcgcaacgttggcagacgccaggtgttgggaactgagcgccggggatattaaatggatctaccaggcccctattcttgctgccatcgggttgaactttattctattcctgaataccgtgcgagtcctggccacaaaaatctgggaaacgaatgcagtcggccatgataccagaaagcagtacagaaaactcgccaagtcgactctggtgcttgtgctagtatttggggttcactatatcgtgttcgtctgtctgccccactcctttacaggactcggctgggagatcagaatgcactgcgaactgttctttaatagctttcagggtttttttgtgtccatcatttactgctactgcaacggggaagttcaggcggaagttaaaaaaatgtggtctcggtggaatttgagtgtggactggaaaagaaccccaccctgcggaagccggagatgtggctcagtcctaaccacagtcacccattctacatcaagtcagagccaggtagcagcttcaactaggatggtacttatctctgggaaagcagccaaaatcgccagtcgtcagccggactctcatatcacattacccggatacgtttggtctaatagcgaacaggactgtctgccacattcatttcatgaggagacgaaggaggacagcggtcgccagggggacgacatactaatggagaagcccagcagacctatggaatcaaacccagacacagaggggtgccagggggaaacagaagatgtgctgtag

SEQ ID NO: 152379 - DNA, 2713 bp, Artificial Sequence
  derived and/or modified sequence
cgcgccgcggcgcagcagcacgcgggttctgagaagcgcgtggctccggcgacaagaccccaagcaccctcggccggtggcccgggcccgaccaccccagctgcgcgtcgttactggccacaagtttgctctgggccagccaagttggcaacttggaagcttctcccgggctctggaggagggtccctgcttcttcctacagccgttccgggcatggccgggctgggggcgtcgctccacgtctggggttggctaatgctcggcagctgcctcctggccagagcccagctggattctgatggcaccattactatagaggagcagattgtccttgtgctgaaagcgaaagtacaatgtgaactcaacatcacagctcaactccaggagggagaaggtaattgtttccctgaatgggatggactcatttgttggcccagaggaacagtggggaaaatatcggctgttccatgccctccttatatttatgacttcaaccataaaggagttgctttccgacactgtaaccccaatggaacatgggattttatgcacagcttaaataaaacatgggccaattattcagactgccttcgctttctgcagccagatatcagcataggaaagcaagaattctttgaacgcctctatgtaatgtataccgttggctactccatctcttttggttccttggctgtggctattctcatcattggttacttcagacgattgcattgcactaggaactatatccacatgcacttatttgtgtctttcatgctgagagctacaagcatctttgtcaaagacagagtagtccatgctcacataggagtaaaggagctggagtccctaataatgcaggatgacccacaaaattccattgaggcaacttctgtggacaaatcacaatatatcgggtgcaagattgctgttgtgatgtttatttacttcctggctacaaattattattggatcctggtggaaggtctctacctgcataatctcatctttgtggctttcttttcggacaccaaatacctgtggggcttcatcttgataggctgggggtttccagcagcatttgttgcagcatgggctgtggcacgagcaactctggctgatgcgaggtgctgggaacttagtgctggagacatcaagtggatttatcaagcaccgatcttagcagctattgggctgaattttattctgtttctgaatacggttagagttctagctaccaaaatctgggagaccaatgcagttgggcatgacacaaggaagcaatacaggaaactggccaaatcgacactggtcctggtcctagtctttggagtgcattacatcgtgttcgtatgcctgcctcactccttcactgggctcgggtgggagatccgcatgcactgtgagctcttcttcaactcctttcagggtttctttgtgtctatcatctactgctactgcaatggagaggttcaggcagaggtgaagaagatgtggagtcggtggaacctctccgtggactggaaaaggacaccgccatgtggcagccgcagatgcggctcagtgctcaccaccgtgacgcacagcaccagcagccagtcacaggtggcggccagcacacgcatggtgcttatctctggcaaagctgccaagatcgccagcagacagcctgacagccacatcactttacctggctatgtctggagtaactcagagcaggactgcctgccacactctttccacgaggagaccaaggaagatagtgggaggcagggagatgatattctaatggagaagccttccaggcctatggaatctaacccagacactgaaggatgccaaggagaaactgaggatgttctctgaatggacatttgtggctgactttcatgggctggtccaatggctggttgtgtgagagggcttggctgatactcctatgcttgagttcaaaggctgaaaattcagttaaggtgttacttaataatagtttttaggctccatgaattggctcctgtaaatactaacgacatgaaaatgcaagtgtcaatggagtagtttattaccttctattggcatcaagttttcctctaaattaatgtatggtatttgctctgtgattgttcatttttttctgctacttttgggtagaaaaaagattcaattgcttggctgtagctttctctcatatatatcaccctaaatataatgaagatcttttagtgtgtatcattttccttttagaaactagtattctcttatttcttactttaatgtacttctatcactgcatttattttgcctgtgcataggagcaattaggatctaaaaaaatatatgggaagataaaagatctaagaacaagtacttgctggaaaattagttggctggacattgataaaataatgcatttataacaattacatgtgtttctgggaacaaggaaaatttctcaaaaaagaatatttcacacatcccttcttttgaatggcctctttgtgaccagccagacctcaggtcttcactctttcttctttgtaaactatgtcatgtggaaagatttcctcagttagtgagcttgtgtctgcaaattgattttgtttgtaatgtattttgatagcaaatcatgctgcatctatatctttttcttgtttgagctgttactacattgtacatggcatgtgggatcaattaaaaatttgttttaaaaata

SEQ ID NO: 152380 - DNA, 1653 bp, Artificial Sequence
  derived and/or modified sequence
atggccggtctgggcgcatcgcttcacgtctggggctggctgatgctaggttcttgcctcctcgcgagagcacagctggactcagatggtactattacgatcgaggagcaaattgtgctcgtattgaaagccaaggtccagtgtgagcttaacatcacggcccagttgcaggaaggggagggaaattgttttcctgagtgggatggcctcatttgttggccacgaggaacagtgggcaagatctctgctgtcccgtgtcccccatacatctacgattttaaccataagggcgtggccttcaggcattgtaatcctaatggcacttgggactttatgcactctcttaacaagacatgggccaactacagtgattgcctgcgcttcctgcagccagatattagcattggaaagcaggagtttttcgagcgactgtacgtcatgtatacggtgggatattcaatcagtttcggaagccttgccgttgccattctgatcatagggtactttaggcgtcttcactgtactaggaattatatccatatgcacctcttcgtgagctttatgttgcgtgctacatcaatcttcgtgaaggaccgcgtggtgcacgctcatatcggggtgaaggagcttgaaagcctaatcatgcaggacgacccgcagaatagcattgaagccacctccgttgacaagtctcagtatataggttgtaaaattgccgtcgtcatgtttatctattttctcgccaccaactattactggatcctggtggaagggctgtacctccacaatctgattttcgtggcctttttctccgatactaagtacttgtggggttttattttgattggctggggtttcccagctgcctttgtcgcagcttgggccgttgcccgagccacactggcggatgcaaggtgttgggaactgtccgctggagacatcaaatggatctaccaagcaccaatcctcgccgcaatcgggctcaatttcattctgtttctgaacacagtacgcgtgctcgccacaaagatctgggaaacgaatgccgtgggtcacgacactagaaaacaataccgcaagttagccaagtccactctggtgttagttctcgtgttcggtgtgcactacatcgtgttcgtgtgtctgccgcacagcttcactggactggggtgggaaattagaatgcactgtgagctctttttcaacagtttccaggggttctttgtgtccattatatactgctactgcaacggcgaggtccaagcggaggtgaaaaaaatgtggtcgcgctggaacctctccgtcgactggaaacggacacccccatgtggcagtcgccgatgcgggtccgttctcaccacggtgacccattccacttccagtcagagtcaggtagccgcatcaacccggatggttctcattagcggtaaagcggctaaaatcgcctcgcgtcagccggacagtcacatcacactaccagggtacgtgtggtcaaattccgagcaggattgcttaccacacagttttcatgaggagacaaaagaggattccggaagacagggtgatgatatcttgatggagaagccaagccgtcccatggaaagcaacccagacaccgagggctgccagggagagacagaagacgtgctatag

SEQ ID NO: 152381 - protein, 919 aa, Artificial Sequence [sequence omitted]

SEQ ID NO: 152382 - DNA, 2760 bp, Artificial Sequence
  derived and/or modified sequence
atgaaattcgcctaccggttctctaacctgcttgggaccgtttacagacgaggtaacttgaattttacctgcgacggtaatagcgtcattagtccggtgggcaacagagtgacagtgttcgacctaaagaacaacaagagtgataccctgcccctggcaactcggtacaacgtaaagtgtgtgggcctcagtcccgacggacgattagccattatagtggatgagggtggtgacgcccttctagtaagtctggtctgccgtagtgtattacaccactttcacttcaaaggcagcgtgcacagtgtgtccttcagcccggatggtcggaaattcgttgttactaaaggaaatattgctcagatgtaccacgcccccgggaaaaagagggagtttaatgcttttgtcctggacaaaacctacttcgggccttacgatgagaccacatgcatcgactggacggacgacagcagatgctttgtggttgggtctaaggacatgtcgacctgggtctttggcgctgagcggtgggataacttgatctactatgcactaggcggccacaaagacgcaatcgtcgcatgctttttcgaatccaattcccttgacctttacagtttatcccaggatggcgtgttgtgtatgtggcaatgcgatacaccacccgaggggcttaggctaaaacctccggcgggatggaaagctgacctgctgcagcgcgaagaggaggaagaggaagaagaggatcaggaaggcgaccgcgaaacaaccataagaggaaaggccacacccgcagaagaagagaagacagggaaggtgaagtattcccgtttagccaagtatttcttcaacaaggagggagattttaataacctgaccgctgcagccttccacaagaagagtcacctccttgtgaccgggtttgcatctggaatctttcacctgcacgagctaccagagttcaacctgattcattccctttctatctcagatcagagtatagccagtgtggcaattaactctagcggagactggattgcatttggatgttctggcctggggcagctccttgtatgggagtggcagtccgaaagttatgtgctgaagcagcagggccactttaatagcatggtggcgctggcctattcaccagacggtcagtacatcgtgacaggcggcgatgatggcaaggttaaggtgtggaatactctgagcgggttttgcttcgttaccttcacagagcactcatcaggtgtcaccggcgtcacctttaccgctacgggctatgtggttgtgaccagcagcatggacgggaccgtaagggcattcgatctgcaccggtataggaatttccgaacttttacatccccccggcctactcaatttagctgcgttgccgttgacgcctccggggaaatcgttagtgcgggggcgcaggactcgtttgaaatttttgtctggagcatgcaaacaggccgcctcctggacgtgttgtctggacacgaggggcccatcagtgggctgtgcttcaaccctatgaaatccgtgctcgcaagcgcctcctgggacaagactgttagactgtgggacatgtttgacagttggcgtacaaaagaaaccttagcgctgacttccgacgcactagcagtaacatttcgacctgacggggccgaactcgccgttgcaaccttgaactctcagataaccttttgggatccggaaaacgctgtgcagaccggaagcatcgagggtagacacgacctcaagacgggtcgaaaggagctcgacaaaattactgccaagcatgccgctaaggggaaagccttcacagccctctgctactccgctgacggtcactctatccttgccggcggaatgagcaagtttgtctgtatataccatgtgagggagcaaatcctgatgaagaggttcgagatctcttgcaacctgtccctcgacgccatggaggagtttcttaatcgccggaaaatgacggaattcggcaatttagctttgattgaccaggacgcaggtcaggaggacggcgtggctataccactgcctggtgtcaggaaaggcgacatgtcttcccgccacttcaaacccgagatcagggttaccagtctcagatttagcccaactgggagatgctgggcagccaccactaccgagggtctgttaatttactcccttgacacccgtgtgctgttcgaccctttcgagctggacacttcagtgactccgggtagggtgagagaggctctgaggcagcaggatttcacacgggctattctgatggcactccggcttaatgaatctaaactggtgcaggaggccctggaggctgtgcccagaggcgaaatcgaagttgtgacttcttctctcccggaactgtatgtagaaaaggtgcttgagttcttagcctctagcttcgaggtgagtagacacttggagttctatctgctctggacccacaaacttctgatgctgcacggccagaaactcaagtcccgcgccgggaccctgctcccagtcatccagttccttcagaaatctatccagcggcacttagacgacctgtcaaaactgtgctcctggaaccactacaacatgcaatatgctctggccgtcagcaaacagagggggactaagagatctctggatcccttaggcagcgaagaggaagccgaagccagtgaggacgattcactgcatctgctggggggcggtggcagagactcagaggaggagatgctcgcctag

SEQ ID NO: 152383 - DNA, 2760 bp, Artificial Sequence
  derived and/or modified sequence
atgaagtttgcctaccgcttcagcaacctgctgggcaccgtgtaccgccggggcaacctgaacttcacctgtgatggcaacagcgtcatcagccctgtgggcaacagagtgacagtgtttgacctgaagaacaacaagagtgacaccctgcccctggccacccgctacaacgtgaagtgtgtgggcctgagcccagatggccgcctggccatcatcgtggatgagggcggagatgccctgctggtgtccctggtgtgccgctctgtgctgcaccacttccacttcaagggctctgtgcacagcgtgtccttctccccagatggcaggaagtttgtggtgaccaagggcaacatcgcccagatgtaccacgcccctgggaagaagcgggagttcaatgcctttgtgctggacaagacctacttcggcccctatgatgagaccacctgcatcgactggacagatgacagccgctgctttgtggtgggcagcaaggacatgagcacctgggtgtttggagctgagcgctgggacaacctgatctactatgccctgggcggccacaaggatgccatcgtggcctgcttctttgagagcaacagcctggacctgtacagcctgagccaggatggagtgctgtgcatgtggcagtgtgacaccccacctgagggcctgcggctgaagcccccagctggctggaaggctgacctgctgcagcgggaggaggaggaggaggaggaggaggaccaggagggggaccgggagaccaccatccggggcaaggccaccccagctgaggaggagaagacaggcaaggtgaagtacagccggctggccaagtacttcttcaacaaggagggggacttcaacaacctgacagctgctgccttccacaagaagagccacctgctggtgactggatttgccagcggcatcttccacctgcacgagctgcctgagttcaacctgatccacagcctgagcatcagtgaccagagcatcgcctctgtggccatcaacagcagcggggactggatcgccttcggctgcagcggcctgggccagctgctggtgtgggagtggcagagcgagagctatgtgctgaagcagcagggccacttcaacagcatggtggccctggcctacagcccagatggccagtacatcgtgactggaggagatgatggcaaggtgaaggtgtggaacaccctgagcggcttctgctttgtgaccttcacagagcacagcagcggcgtgactggagtgaccttcaccgccaccggctacgtggtggtgaccagctccatggatggcaccgtgcgggcctttgacctgcaccgctacagaaacttccgcaccttcaccagcccccggcccacccagttcagctgtgtggccgtggatgccagcggggagatcgtgtctgctggggcccaggacagctttgagatctttgtgtggagcatgcagacaggccgcctgctggatgtgctgagcggccacgagggccccatcagcggcctgtgcttcaaccccatgaagtctgtgctggccagcgcctcctgggacaagacagtgcggctgtgggacatgtttgacagctggaggaccaaggagaccctggccctgaccagtgatgccctggccgtgaccttccggccagatggagctgagctggccgtggccaccctgaacagccagatcaccttctgggaccctgaaaatgctgtgcagacaggcagcattgagggcagacatgacctgaagacaggcaggaaggagctggacaagatcacagccaagcacgccgccaagggcaaggccttcaccgccctgtgctacagcgcagatggccacagcatcctggccggcggcatgagcaagtttgtgtgcatctaccacgtgcgggagcagatcctgatgaagagatttgagatcagctgcaacctgagcctggatgccatggaggagttcctgaacagaaggaagatgacagaatttggaaacctggccctgattgaccaggatgctggccaggaggatggagtggccatccccctgcccggggtgaggaaaggagacatgagcagccgccacttcaagccagagatccgggtgaccagcctgcgcttcagccccaccggccgctgctgggccgccaccaccacagagggcctgctgatctacagcctggacaccagggtgctgtttgacccctttgagctggacacctctgtgaccccaggccgggtgcgggaggccctgcggcagcaggacttcacccgggccatcctgatggccctgcggctgaatgaaagcaagctggtgcaggaggccctggaggccgtgcccagaggagaaattgaggtggtgaccagcagcctgcctgagctgtatgtggagaaggtgctggagttcctggccagcagctttgaggtgagccgccacctggagttctacctgctgtggacccacaagctgctgatgctgcacggccagaagctgaagagccgggccggcaccctgctgcctgtgatccagttcctgcagaagagcatccagaggcacctggatgacctgagcaagctgtgctcctggaaccactacaacatgcagtatgccctggccgtgtccaagcagaggggcaccaagaggagcctggaccccctgggcagcgaggaggaggccgaggcctctgaagatgacagcctgcacctgctgggcggcggcggccgggacagcgaggaggagatgctggcctag

SEQ ID NO: 152384 - DNA, 2760 bp, Artificial Sequence
  derived and/or modified sequence
atgaagttcgcctaccggttcagcaacctgctgggcaccgtgtacagacggggcaatttgaattttacatgtgacgggaactcagtaattagcccggtgggaaacagggtaacagttttcgacttgaaaaacaataagagcgatacccttccactcgcaacccgttataacgtcaaatgtgtgggactgagtcccgacggccggctggccatcatcgtggatgaaggtggcgacgctctactcgtttccctcgtttgtcgcagcgtgctgcatcattttcatttcaaggggtcagttcactcggttagcttcagcccagacgggaggaagtttgtggtaaccaaaggcaatatcgcacagatgtaccacgccccaggaaagaagagagagtttaacgctttcgtactggacaagacttatttcggcccctacgatgaaaccacgtgtatcgactggaccgatgactcgcgctgtttcgtggtcggcagcaaagacatgtccacttgggtgttcggcgctgagcgctgggataatcttatctactacgcactcggcggccataaggacgcgatcgtggcctgttttttcgagtccaacagtcttgacctgtatagtctgtctcaggatggggtgctgtgcatgtggcaatgcgacaccccacccgaaggcctgcgtctgaagccccctgcgggatggaaggccgatctgctgcagagagaggaagaggaagaagaggaagaagatcaggaaggtgacagagaaacaacaattaggggaaaagctacgcccgccgaagaagagaagacaggcaaagtgaagtacagcaggctggctaagtacttctttaacaaggagggggactttaataatctaactgcagccgcctttcataaaaaaagccatctcttggtaactggctttgcgtccggaatcttccacctgcatgaactgcccgaatttaacctaattcacagtttgtccatttcagatcaatcaatcgcatctgtagccattaatagctctggcgactggatcgcatttggctgctccggacttgggcagcttttggtttgggagtggcaatctgaaagctacgtgctgaagcagcagggccacttcaattccatggtcgcgctggcctattctccagacgggcaatacattgtgaccggcggagatgacggcaaggtcaaggtgtggaatactttaagcggattctgctttgttactttcaccgaacattcatccggggtgaccggggtgacatttacagcaactggctacgtggtggtcacatctagtatggacggcacagtgcgggccttcgaccttcacaggtatagaaattttaggacatttacttctccccgcccaactcaattctcctgtgtggctgtggacgcttcgggagagatcgtctctgctggagctcaagattctttcgaaattttcgtttggagtatgcagaccggaaggctgctcgatgtgctctccgggcatgaaggccctatatctggactatgcttcaatccgatgaaaagcgttctcgcatctgccagctgggacaagactgtacgtctttgggacatgtttgacagctggaggaccaaagaaactctggctctcacctccgacgcactcgcggttaccttcaggcccgatggtgccgaactcgcagtcgccacactgaacagtcagataaccttctgggacccggagaacgcggtccagacaggcagcatagaagggcgccatgacctaaaaacgggacggaaagagctggacaagataaccgctaagcatgctgctaaaggaaaggccttcaccgctctgtgttattccgccgatggacactctattctagctgggggtatgtccaagttcgtatgtatatatcatgtgcgcgaacaaatcttgatgaagcggtttgagatcagttgtaacctttccctcgacgccatggaagaattcctgaacaggcgcaaaatgaccgagttcggcaaccttgctctcattgatcaagatgcaggtcaggaggacggagttgcaatcccccttccaggcgtcaggaagggggatatgagttcacgccattttaaaccggagattagagtgacttccttgcgattttctcctaccggccgttgctgggccgcaaccacaacagaagggctcctgatttactctctggatacgcgagtgctatttgacccattcgagttggacacgtcagtcaccccaggcagagtgcgggaggccctgcggcaacaggactttacgcgggcaatcctaatggctctaagactgaatgagtcaaaacttgtgcaggaagccctggaggcggtgcccaggggggaaatcgaggttgtgacgagttctctaccggagctgtacgtcgagaaagtcctagagtttttggctagcagctttgaagtgagcaggcaccttgaattctatttgctgtggacccataagttactcatgctccatggtcagaagctgaagtccagggctggcacacttcttcccgtgatccagtttttgcagaaatccatccaacgccatctggatgatctttctaagctatgcagttggaaccattacaacatgcagtatgccctggcggtgagcaagcaacggggcactaagcggtcccttgaccccctgggctcggaagaggaggcagaggcctccgaagatgactctttacacctgttaggcggaggtggcagagactctgaagaagagatgctggcctag

SEQ ID NO: 152385 - DNA, 2760 bp, Artificial Sequence
  derived and/or modified sequence
atgaaattcgcatataggttttcaaacctgctagggacagtgtatcggaggggcaatctcaattttacctgcgacggaaatagcgtgattagccctgtggggaaccgagtaacggtatttgacctgaaaaataacaaatcggatacattgccgttggcaaccagatacaatgtgaaatgcgtgggtctctctcccgacggaagactggctatcattgttgatgagggtggggacgctctgctggtctctctggtctgtagaagtgtgctgcaccatttccattttaaagggagcgttcactctgtctctttcagtcccgacggcagaaaatttgttgtgactaaaggcaacatagcccagatgtatcacgctccagggaaaaagcgcgagtttaacgcattcgtcttggataaaacatactttggcccttacgacgagaccacctgcattgactggaccgacgattcccggtgttttgtcgttggttcaaaggacatgtcaacttgggtgttcggcgctgagcgatgggacaatttgatctattacgcattgggaggtcataaggacgccattgtcgcttgcttctttgaatccaattcacttgacctgtactccctctcccaggatggggtactgtgcatgtggcagtgcgatacccccccagaagggttgaggctcaagccgccagcaggatggaaggcggacttactgcagcgtgaagaagaagaagaggaggaagaagaccaagagggggacagagagaccacaattagggggaaagctacccccgcagaagaagagaaaaccgggaaggttaagtattcacggctggctaaatatttctttaacaaagagggggactttaataacctgacagcagcggcatttcataagaaaagtcatctcctcgtgacaggattcgcgagcgggattttccatctgcacgagctgccagaattcaatttgatccattccctctctatctccgatcagtccatcgcaagcgtcgcgataaacagttccggggattggatcgctttcggctgttcagggctcggccagttgttggtctgggagtggcaaagcgagtcctacgtcctcaagcaacagggtcacttcaactccatggtggcattagcatactcacccgatgggcagtatatcgtgaccgggggtgacgacggcaaagtcaaagtgtggaacactctctctggcttttgtttcgtgacattcactgagcattcttctggcgttactggcgtaacatttacagccactgggtatgtcgtggtgacctcctctatggatgggaccgtgagggcttttgaccttcaccgttatcgaaattttcggaccttcacatcgcccagacccacacagtttagctgcgtggccgtggacgccagcggagagattgtatctgccggagctcaggacagcttcgagatcttcgtttggtcaatgcagactggacggctcctggacgtgctgtcgggccacgagggccctatttctggactgtgcttcaatccaatgaagtcagtactcgcaagtgcttcctgggacaagactgtccgcctctgggatatgtttgattcttggcgcaccaaagagactctcgctttgactagcgatgcccttgctgtgacattccggccagacggggctgagctcgcagtcgccactctcaacagccagatcactttctgggatcccgagaacgccgtccaaacaggtagcatagagggaaggcacgatttgaagaccggtcgcaaggagctcgataagataacagccaaacatgctgccaaggggaaagcattcacagcactgtgctatagtgccgatgggcattcaattctggctgggggtatgtcaaagtttgtctgcatctaccacgtgcgcgagcagatcctgatgaaaaggttcgaaatctcctgtaacctgagcctcgatgccatggaagagttcctcaatcgccgaaaaatgacagaatttggtaatttggccttaatcgaccaggacgccggtcaagaggatggtgtcgccatccccctcccaggcgtgcgaaaaggggatatgtcttcccgacacttcaagccagagatcagagttacaagtctgcgatttagccccactggccgttgttgggctgccacgacgacagaaggactgctcatctactccctggacactcgggtgctgttcgatccctttgaactggatacatctgtgactccaggaagagtgcgggaggccctgcggcagcaggactttactagagcaatccttatggccttgcggctgaacgaaagtaaactggtccaagaggcccttgaggcggtaccaagaggggaaatagaggtagttacttcatcgttaccggagctttacgtcgaaaaggttctggaatttctggctagttcttttgaggtctctagacaccttgagttttacctcctgtggacacacaaacttctgatgctgcatggtcagaagctgaaatctcgtgccggaacattactgcctgtcatccagtttctccaaaagtctattcagagacatctcgacgacctgtcgaagttgtgttcttggaaccactacaatatgcagtatgccctcgcagtctcgaaacagagaggcaccaaacggagtctcgaccccctcgggtctgaggaagaggcagaggcctccgaggatgacagcctgcaccttctgggcggagggggtcgcgacagtgaagaggagatgctcgcctag

SEQ ID NO: 152386 - DNA, 3292 bp, Artificial Sequence
  derived and/or modified sequence
gtgggcggtgcacgccgtcgcttcccggaagtgcgtgctgtgggcggtgccgcgcggacccccgggaagtgtctctgtgggcggccgccgggttgagctgcggcacacgtgcgacggccgtgatgaagttcgcttaccggttttcaaatttgctgggtacggtgtaccggcgtgggaacctaaattttacctgcgatggaaattcagttatcagtcccgtgggcaatagagtcactgtatttgaccttaaaaacaacaaatctgacacgctgcccctggccactcggtacaacgtcaagtgcgtggggctgtccccggatggccgcctcgctatcatcgtcgatgaagggggcgatgcgctgctggtcagcctggtctgcaggtctgtgctgcaccacttccacttcaagggctctgtgcacagtgtgtccttctcccctgatggcaggaagtttgttgtcacaaagggtaacattgcccagatgtatcatgcccctgggaagaagcgggagttcaacgccttcgttctggacaagacctattttgggccctacgatgagaccacctgcatcgactggacggatgactccaggtgctttgtggttgggagcaaagacatgtccacctgggtgttcggagccgagcgctgggacaacctcatctactatgcactggggggacataaggatgccatcgtggcctgcttctttgaatccaacagcctggacctgtactcactcagccaggacggagtgctgtgcatgtggcagtgtgacacgccccccgagggcttgcggctgaagccccctgcgggctggaaagcagacctgttgcagcgggaggaggaagaggaggaggaggaggaccaggagggcgacagagagaccaccatccggggaaaagccactccggccgaggaggagaagacaggaaaagtgaagtactcacggctggccaagtacttcttcaataaagaaggggattttaacaacctgacagctgcagcatttcataagaagtctcacctcttggtcactggctttgcttctggaatcttccatcttcatgagctgccagagtttaacctcatccactccctgagcatttcagatcagagcatcgcctcagtggccatcaatagctcgggggactggattgcttttggctgttcaggcctgggccagctgctggtgtgggagtggcagagtgagtcctacgtgctcaagcagcagggccacttcaacagcatggtggccctggcctactcgcccgacggacagtacatcgtgactggcggggacgacggcaaggtcaaggtgtggaacaccctcagcggcttctgcttcgtcacttttacggagcactccagcggggtgaccggtgtgacctttactgccaccggctacgttgtggtgacctcatccatggacgggaccgtgcgagcctttgaccttcacaggtaccgaaacttccgcaccttcacctctccacgccccacccagttctcctgtgtggcggtggatgcgagcggtgagatcgtctctgcaggggcgcaggactcctttgagattttcgtgtggtccatgcagacaggcaggctccttgatgttttgtctggacacgaagggcccatcagtggtctgtgttttaacccaatgaagtccgtcctggccagtgcctcctgggacaagacagtgcgcctatgggacatgtttgacagctggaggaccaaggagacgctggccctgacctctgatgctctggctgtgacttttcgccctgatggtgcggagctggctgtggccacactgaactcacagatcaccttctgggaccctgagaacgcggtgcagacgggctccattgagggcaggcatgacctcaagactggcaggaaggagctggacaagattacagccaagcacgcggccaaggggaaggccttcaccgccctgtgctactctgcagacggccacagcatcctggcgggaggcatgtccaagttcgtgtgcatctaccacgtccgtgagcagattctcatgaagaggttcgagatctcttgcaacctgtctttggacgccatggaggaatttttgaaccgaagaaaaatgacagagtttggcaacctggcactaattgatcaggatgctgggcaggaggatggagtcgcgataccactgccaggcgtcaggaaaggtgacatgagttctcggcacttcaaacctgagatcagggtgacctcactccgcttctctcccactgggcgctgctgggcggccaccaccacggagggactcctcatctactccctggacacccgcgtgctctttgacccgtttgagctggacaccagcgtcacccccgggagggtgcgcgaggcactgcgccagcaggacttcaccagggccatcctcatggccctccggctcaacgagagcaaactggtgcaggaggccctggaggcggtgcccaggggcgagattgaagtggtcacctcctcccttcctgaactgtatgtggagaaagtgctggagtttttagcttcctcctttgaagtgtctcgccacctggaattctacctcctctggactcacaaactgctcatgttgcacggacagaagctgaagtccagagccgggacgctgctgcctgtcattcagttcctccagaagagcatccagcggcacctggacgacctgtcgaaactctgtagctggaaccactataacatgcagtacgcactagcagtttccaagcagcggggcacaaaacgctccctagacccgctgggaagtgaggaggaggcagaagcatctgaagatgacagcctgcatctgcttggaggaggaggcagagactcagaagaagagatgctggcctagagccagccggttgcagcgttggattgtgccggctaagacctgccagggagatgggacccttgtgccacctgggccagcaaagaggaggggtccagagaacagctgaaatactgtcactagtggtagtgacttgcttttcctgtgcacacatgtagcccatcaggacagcgagccgacgggtcacgccaggggccggcacgcactggcacctggccccaggagcggggccgtgtgaacggtgatgaatgttgaaaatgcgtctcagagaggtattcacatgaactttgtatgagacttatttatatctttaacataaaggtttgataaagaacttagggattaaaaaaaagatggagttttctaacgtgaggatgaagtctacacttcagattaaaaagggttatgttgta

SEQ ID NO: 152387 - DNA, 2760 bp, Artificial Sequence
  derived and/or modified sequence
atgaagttcgcctacagattcagcaacctgctgggcaccgtgtacagaagaggcaacctgaacttcacctgcgacggcaacagcgtgatcagccccgtgggcaacagagtgaccgtgttcgacctgaagaacaacaagagcgacaccctgcccctggccaccagatacaacgtgaagtgcgtgggcctgagccccgacggcagactggccatcatcgtggacgagggcggcgacgccctgctggtgagcctggtgtgcagaagcgtgctgcaccacttccacttcaagggcagcgtgcacagcgtgagcttcagccccgacggcagaaagttcgtggtgaccaagggcaacatcgcccagatgtaccacgcccccggcaagaagagagagttcaacgccttcgtgctggacaagacctacttcggcccctacgacgagaccacctgcatcgactggaccgacgacagcagatgcttcgtggtgggcagcaaggacatgagcacctgggtgttcggcgccgagagatgggacaacctgatctactacgccctgggcggccacaaggacgccatcgtggcctgcttcttcgagagcaacagcctggacctgtacagcctgagccaggacggcgtgctgtgcatgtggcagtgcgacaccccccccgagggcctgagactgaagccccccgccggctggaaggccgacctgctgcagagagaggaggaggaggaggaggaggaggaccaggagggcgacagagagaccaccatcagaggcaaggccacccccgccgaggaggagaagaccggcaaggtgaagtacagcagactggccaagtacttcttcaacaaggagggcgacttcaacaacctgaccgccgccgccttccacaagaagagccacctgctggtgaccggcttcgccagcggcatcttccacctgcacgagctgcccgagttcaacctgatccacagcctgagcatcagcgaccagagcatcgccagcgtggccatcaacagcagcggcgactggatcgccttcggctgcagcggcctgggccagctgctggtgtgggagtggcagagcgagagctacgtgctgaagcagcagggccacttcaacagcatggtggccctggcctacagccccgacggccagtacatcgtgaccggcggcgacgacggcaaggtgaaggtgtggaacaccctgagcggcttctgcttcgtgaccttcaccgagcacagcagcggcgtgaccggcgtgaccttcaccgccaccggctacgtggtggtgaccagcagcatggacggcaccgtgagagccttcgacctgcacagatacagaaacttcagaaccttcaccagccccagacccacccagttcagctgcgtggccgtggacgccagcggcgagatcgtgagcgccggcgcccaggacagcttcgagatcttcgtgtggagcatgcagaccggcagactgctggacgtgctgagcggccacgagggccccatcagcggcctgtgcttcaaccccatgaagagcgtgctggccagcgccagctgggacaagaccgtgagactgtgggacatgttcgacagctggagaaccaaggagaccctggccctgaccagcgacgccctggccgtgaccttcagacccgacggcgccgagctggccgtggccaccctgaacagccagatcaccttctgggaccccgagaacgccgtgcagaccggcagcatcgagggcagacacgacctgaagaccggcagaaaggagctggacaagatcaccgccaagcacgccgccaagggcaaggccttcaccgccctgtgctacagcgccgacggccacagcatcctggccggcggcatgagcaagttcgtgtgcatctaccacgtgagagagcagatcctgatgaagagattcgagatcagctgcaacctgagcctggacgccatggaggagttcctgaacagaagaaagatgaccgagttcggcaacctggccctgatcgaccaggacgccggccaggaggacggcgtggccatccccctgcccggcgtgagaaagggcgacatgagcagcagacacttcaagcccgagatcagagtgaccagcctgagattcagccccaccggcagatgctgggccgccaccaccaccgagggcctgctgatctacagcctggacaccagagtgctgttcgaccccttcgagctggacaccagcgtgacccccggcagagtgagagaggccctgagacagcaggacttcaccagagccatcctgatggccctgagactgaacgagagcaagctggtgcaggaggccctggaggccgtgcccagaggcgagatcgaggtggtgaccagcagcctgcccgagctgtacgtggagaaggtgctggagttcctggccagcagcttcgaggtgagcagacacctggagttctacctgctgtggacccacaagctgctgatgctgcacggccagaagctgaagagcagagccggcaccctgctgcccgtgatccagttcctgcagaagagcatccagagacacctggacgacctgagcaagctgtgcagctggaaccactacaacatgcagtacgccctggccgtgagcaagcagagaggcaccaagagaagcctggaccccctgggcagcgaggaggaggccgaggccagcgaggacgacagcctgcacctgctgggcggcggcggcagagacagcgaggaggagatgctggcctag

SEQ ID NO: 152388 - protein, 606 aa, Artificial Sequence
  derived and/or modified sequence
MAVAGPAPGAGARPRLDLQFLQRFLQILKVLFPSWSSQNALMFLTLLCLTLLEQFVIYQVGLIPSQYYGVLGNKDLEGFKTLTFLAVMLIVLNSTLKSFDQFTCNLLYVSWRKDLTEHLHRLYFRGRAYYTLNVLRDDIDNPDQRISQDVERFCRQLSSMASKLIISPFTLVYYTYQCFQSTGWLGPVSIFGYFILGTVVNKTLMGPIVMKLVHQEKLEGDFRFKHMQIRVNAEPAAFYRAGHVEHMRTDRRLQRLLQTQRELMSKELWLYIGINTFDYLGSILSYVVIAIPIFSGVYGDLSPAELSTLVSKNAFVCIYLISCFTQLIDLSTTLSDVAGYTHRIGQLRETLLDMSLKSQDCEILGESEWGLDTPPGWPAAEPADTAFLLERVSISAPSSDKPLIKDLSLKISEGQSLLITGNTGTGKTSLLRVLGGLWTSTRGSVQMLTDFGPHGVLFLPQKPFFTDGTLREQVIYPLKEVYPDSGSADDERILRFLELAGLSNLVARTEGLDQQVDWNWYDVLSPGEMQRLSFARLFYLQPKYAVLDEATSALTEEVESELYRIGQQLGMTFISVGHRQSLEKFHSLVLKLCGGGRWELMRIKVE

SEQ ID NO: 152389 - DNA, 1467 bp, Artificial Sequence
  derived and/or modified sequence
atgctgattgttctgaactcaacgcttaaatctttcgaccagtttacatgtaacctgctgtacgtctcctggcggaaagatctcacagaacacctgcataggctctacttccgtggacgcgcctactacactctgaatgtgttaagagacgatatagacaaccccgaccagcggatctcacaggatgtggagagattttgtaggcagctgagttcaatggctagtaagttgattatctccccctttacactggtgtactacacttaccagtgtttccagtctaccggctggctgggacccgtaagcattttcggctacttcatactgggcacagtggttaataaaacactgatgggccctatagtgatgaagctggtacaccaagagaaactggagggcgatttcagagccggccacgtcgaacacatgcgcacagaccgacgcctccaaaggttgttacagactcaacgggaactcatgtcaaaggagctatggctgtatataggaattaatacctttgactatctcggatctattctaagctatgtggttattgcaattcccatctttagcggagtctacggggacctgagccctgctgagttgtcaacactcgtctcaaagaacgcctttgtctgtatttaccttatatcatgcttcactcaactaattgatttgtccaccacactcagcgacgtggccgggtacactcatcgaatcggccaactcagagaaacgttacttgacatgagcctgaagtctcaggactgtgaaatactaggcgaaagcgaatggggattggacacacccccaggatggccagcagctgagccggcagacacagctttcctgctcgagcgcgtaagcatctctgcgccttcttccgacaaacctctaatcaaggatttaagccttaagatttcagaaggacagtctctgctcatcactgggaacacaggcaccgggaagacatctttgcttcgcgtactaggtggcctgtggactagcactcggggtagtgtgcaaatgctgaccgattttgggccacacggagtactcttcctgccacagaagcccttctttactgatgggacccttcgggaacaagtcatttaccccctcaaggaagtataccccgattccggctccgcagacgatgaaaggattctcaggttcctggaactggctgggctgtctaatctggtggctcgtactgaaggcctcgaccagcaagtggactggaactggtacgatgtgctctccccaggtgagatgcaacgtttatcattcgcaagattgttctacctacagcccaagtatgcggtgctggatgaggcgacctcagctttgacagaggaggttgagtcagaactctaccggatcgggcagcaacttggaatgacatttatttccgtgggtcacagacagagtctggagaaggtcccggtgctcacaaggatggcctag

SEQ ID NO: 152390 - DNA, 1821 bp, Artificial Sequence
  derived and/or modified sequence
atggcagtcgccggccctgcccctggtgccggagccaggccacgcttggacctgcagtttttgcagagatttctgcagatcctgaaagtcttgttcccgtcatggtcttcacagaatgcgctgatgttcttgacacttctttgcctaacactgctcgaacagtttgtgatctatcaagttggcttaataccgtcccagtattatggcgtgctgggtaacaaagatctcgaaggcttcaaaacgttaaccttccttgccgtgatgttaattgtgcttaactcgaccctgaaaagtttcgaccaattcacatgcaaccttttatacgtgagctggaggaaggacttgacagagcacctacatcgactatatttccgtggtagggcatactatacacttaacgtcctgcgagatgatatcgacaatcctgaccagaggatttctcaggacgtggagcgattttgtagacagctgtcctctatggcatcgaagctcatcatctctccatttaccctggtctactacacttaccaatgctttcagtctaccgggtggttggggcctgtcagcatctttggatattttatcctgggcaccgtcgtgaacaagacactgatgggccctatagtgatgaagctggtacaccaagagaagttagagggcgatttccgttttaagcatatgcaaattcgggtgaatgccgaaccggcggccttctatcgcgctgggcacgtggaacacatgcgaacagaccgccgcctgcagaggctgctacagactcagagggagctgatgtctaaggaactttggctgtacataggaatcaacacatttgactatctgggcagtattctctcttacgtcgtgatagccatcccaattttttccggagtgtacggagatctctccccagctgagcttagcactcttgtcagtaaaaatgctttcgtgtgcatttatctgatctcatgcttcacacagctgatcgacctgagcactaccctctctgatgtggccggatacactcacagaatcggacagctgcgggagaccttgctggatatgagcctgaaatctcaggattgtgaaattttaggggaaagtgaatggggcctagacaccccgcccggatggccagccgccgagcctgctgataccgccttcttgctggaacgcgtttccatctctgctccgtcctccgacaagcctttaattaaggacctatccctaaagatcagcgaggggcagagcctgttgataactggcaatactggcactggaaagacttcactcttgcgcgtgctaggaggtctgtggacttcaacacgcggaagcgtgcaaatgctaacagactttgggcctcatggcgttctttttttaccacaaaaaccgtttttcaccgatggaacattacgcgaacaggtcatctatcccctaaaagaagtctatcctgattctggatcggccgatgatgagcgcatccttcggtttcttgagctcgccgggctctcaaatctggtcgcacgaaccgagggtttggaccagcaggtggactggaactggtacgacgtactgagccctggagagatgcagcgattgagcttcgctcggcttttttacctgcagccgaagtacgcagtcctcgatgaagctacaagtgccctcactgaggaggttgaatccgaactgtaccggatcggtcagcagctcggcatgacatttatatcggtgggacatcggcaaagcctcgaaaagtttcatagtctggtcctgaaactgtgcgggggcggcagatgggaattgatgagaataaaagtggagtag

SEQ ID NO: 152391 - DNA, 1467 bp, Artificial Sequence
  derived and/or modified sequence
atgctgattgtgctgaacagcaccctgaagagctttgaccagttcacctgcaacctgctgtatgtgtcctggaggaaggacctgacagagcacctgcaccggctgtacttccggggccgggcctactacaccctgaatgtgctgagagatgacatcgacaacccagaccagaggatcagccaggatgtggagcgcttctgccggcagctgagctccatggccagcaagctgatcatcagccccttcaccctggtgtactacacctaccagtgcttccagagcacaggctggctgggccctgtgtccatcttcggctacttcatcctgggcaccgtggtgaacaagaccctgatgggccccatcgtgatgaagctggtgcaccaggagaagctggagggggacttccgggccggccacgtggagcacatgaggacagaccggcggctgcagaggctgctgcagacccagcgggagctgatgagcaaggagctgtggctgtacatcggcatcaacacctttgactacctgggcagcatcctgtcctatgtggtgattgccatccccatcttctctggagtgtatggagacctgagccctgctgagctgagcaccctggtgtccaagaatgcctttgtgtgcatctacctgatcagctgcttcacccagctgattgacctgagcaccaccctgagtgatgtggccggctacacccaccgcatcggccagctgcgggagaccctgctggacatgagcctgaagagccaggactgtgagatcctgggggagagcgagtggggcctggacaccccacctggctggccagctgctgagcctgctgacacagccttcctgctggagcgggtgtccatcagcgcccccagcagtgacaagcccctcatcaaggacctgagcctgaagatcagcgagggccagagcctgctgatcaccggcaacacaggaacaggcaagaccagcctgctgcgggtgctgggcggcctgtggaccagcacccggggctctgtgcagatgctgacagactttggcccccacggcgtgctcttcctgccccagaagcccttcttcacagatggcaccctgcgggagcaggtgatctaccccctgaaggaggtgtacccagattctggcagcgcagatgatgagcgcatcctgcgcttcctggagctggccggcctgagcaacctggtggccaggacagagggcctggaccagcaggtggactggaactggtatgatgtgctgagccctggagagatgcagaggctgagctttgcccggctcttctacctgcagcccaagtatgctgtgctggatgaggccaccagcgccctgacagaggaggtggagagcgagctgtacagaattggccagcagctgggcatgaccttcatctctgtgggccaccggcagagcctggagaaggtgcctgtgctgaccaggatggcctag

SEQ ID NO: 152392 - DNA, 1821 bp, Artificial Sequence
  derived and/or modified sequence
atggctgtggccggccctgcccctggggccggggcccggccccggctggacctgcagttcctgcagcgcttcctgcagatcctgaaggtgctcttccccagctggagcagccagaatgccctgatgttcctgaccctgctgtgcctgaccctgctggagcagtttgtgatctaccaggtgggcctcatccccagccagtactacggcgtgctgggcaacaaggacctggagggcttcaagaccctgaccttcctggccgtgatgctgattgtgctgaacagcaccctgaagagctttgaccagttcacctgcaacctgctgtatgtgtcctggaggaaggacctgacagagcacctgcaccggctgtacttccggggccgggcctactacaccctgaatgtgctgagagatgacatcgacaacccagaccagaggatcagccaggatgtggagcgcttctgccggcagctgagctccatggccagcaagctgatcatcagccccttcaccctggtgtactacacctaccagtgcttccagagcacaggctggctgggccctgtgtccatcttcggctacttcatcctgggcaccgtggtgaacaagaccctgatgggccccatcgtgatgaagctggtgcaccaggagaagctggagggggacttccgcttcaagcacatgcagatccgggtgaatgctgagcctgctgccttctacagagctggccacgtggagcacatgaggacagaccggcggctgcagaggctgctgcagacccagcgggagctgatgagcaaggagctgtggctgtacatcggcatcaacacctttgactacctgggcagcatcctgtcctatgtggtgattgccatccccatcttctctggagtgtatggagacctgagccctgctgagctgagcaccctggtgtccaagaatgcctttgtgtgcatctacctgatcagctgcttcacccagctgattgacctgagcaccaccctgagtgatgtggccggctacacccaccgcatcggccagctgcgggagaccctgctggacatgagcctgaagagccaggactgtgagatcctgggggagagcgagtggggcctggacaccccacctggctggccagctgctgagcctgctgacacagccttcctgctggagcgggtgtccatcagcgcccccagcagtgacaagcccctcatcaaggacctgagcctgaagatcagcgagggccagagcctgctgatcaccggcaacacaggaacaggcaagaccagcctgctgcgggtgctgggcggcctgtggaccagcacccggggctctgtgcagatgctgacagactttggcccccacggcgtgctcttcctgccccagaagcccttcttcacagatggcaccctgcgggagcaggtgatctaccccctgaaggaggtgtacccagattctggcagcgcagatgatgagcgcatcctgcgcttcctggagctggccggcctgagcaacctggtggccaggacagagggcctggaccagcaggtggactggaactggtatgatgtgctgagccctggagagatgcagaggctgagctttgcccggctcttctacctgcagcccaagtatgctgtgctggatgaggccaccagcgccctgacagaggaggtggagagcgagctgtacagaattggccagcagctgggcatgaccttcatctctgtgggccaccggcagagcctggagaagttccacagcctggtgctgaagctgtgtggcggcggccgctgggagctgatgaggatcaaggtggagtag

SEQ ID NO: 152393 - DNA, 1467 bp, Artificial Sequence
  derived and/or modified sequence
atgctgatcgtgctgaacagcaccctgaagagcttcgaccagttcacctgtaacctgctgtacgtttcatggaggaaggatctgaccgagcatctccataggctttattttcggggtagggcttattacacactgaacgttctaagagatgatatagacaaccccgatcagagaataagccaggacgtcgagaggttctgtaggcagctgagcagcatggcgtcaaagctgatcatctctccattcaccctcgtctactacacgtaccaatgctttcagagcacgggctggctaggcccagtgagcatcttcggctacttcatacttggaacggtggtgaacaagactcttatgggaccaatagttatgaaattagtgcaccaagaaaagttggaaggcgactttcgggcaggtcacgtagagcatatgcgaacggatcggcggctccaaagactcttgcagacccagcgggagcttatgtctaaggagctctggctttatattggtattaacacttttgactacttgggcagtattctctcatatgttgttattgctatacccattttcagcggagtatatggtgacctcagcccagccgagctgtcaactctcgtgagtaaaaatgcgttcgtatgtatttatctgatctcatgctttacgcaactgatagacctgagcaccaccctgtctgatgtagctggctacacacaccgaatcggccaactacgggagaccctactggacatgtcactcaaatcgcaagattgcgagatactcggggagtctgagtggggattagacactccaccaggttggcccgccgctgagccggcagatactgctttcctcctggaacgggtgtctatctctgcgcctagctctgacaaacctctgatcaaagatctgagcctgaagattagcgagggccagtcgctgctcattactgggaacacaggcaccgggaagacttctttgttaagggtgcttgggggattgtggactagtacaagaggcagcgttcaaatgttaaccgactttggacctcatggtgtgctattccttccgcaaaaacctttcttcacggacgggacactgagggagcaggtgatctaccccctcaaagaagtttatcctgacagcgggagcgccgatgacgaacgaatactcaggtttctggagttggcgggccttagcaatcttgtggcacgcaccgaaggtttggatcagcaggtggactggaattggtatgatgttctgagccccggggagatgcagaggctctcctttgctcgccttttctatctgcagcccaaatacgccgttctggatgaagctacatctgccttgactgaagaggtggagtcggaattatataggatcggccaacagctcggtatgacttttatctcagtgggccaccggcaatctcttgaaaaggtacctgtcctgactagaatggcctag

SEQ ID NO: 152394 - DNA, 1821 bp, Artificial Sequence
  derived and/or modified sequence
atggccgtggccggccccgcccccggcgccggcgcccggccccggctcgatctccagttccttcagcgcttccttcagattctgaaagtccttttcccttcctggagcagccagaacgctttgatgttcctgaccctcctctgcttgactcttcttgagcagtttgtgatttatcaggtcgggctcatcccgtctcagtattatggtgttctgggaaataaggacttagagggtttcaaaaccctgacgttcctggcagttatgctaatcgtgctgaacagcaccctaaagagttttgaccagttcacttgtaacctgctgtacgtgagctggcgcaaggacctgaccgagcatctgcaccgtctgtattttcgtggaagggcctattacactttgaacgtgctgcgagatgacatcgataatcccgaccagcggatttcccaggacgtcgaacgtttctgtcggcagttgagcagcatggcgagcaagctcatcatcagcccatttacactggtgtattatacataccaatgctttcagagtacaggatggctggggcccgtgtcaatttttggctactttatcttggggacagttgtgaacaaaacactcatgggaccaattgttatgaagttagtccatcaagaaaagcttgagggggacttccgattcaagcacatgcaaatccgcgtgaatgccgagcccgcggccttttatagggcagggcatgtagaacacatgcggaccgatcggcgccttcagaggctacttcaaacacagcgggagttaatgtctaaagagctgtggctctacattggtatcaacactttcgattatctcggtagtatcctgtcttacgttgtgatcgcgatacctatcttctcaggagtgtacggagacctgtccccagccgagctctccacattggtcagtaaaaatgcattcgtgtgtatctatttaatcagttgttttacccaattgatagatttgtctacgacactgagcgacgtcgcgggctacactcacagaatagggcaactaagggagacactgttggacatgagcctcaagagtcaggactgcgagattttgggcgagagcgaatggggcctagataccccccccgggtggcccgcagctgaacccgccgacaccgcattccttttagagagggtgtcaatctccgcaccgagttcagacaaacccctcattaaagacctgtcactaaagatctccgaggggcagtcactgctcataactgggaacactggaacaggcaaaacttccttgctgcgagtgctgggcggtctgtggacttccactaggggttctgtgcagatgctcacggactttggcccacatggtgttttgtttctgccccagaagccattttttactgacggaactctccgagaacaagttatttacccgctcaaggaagtgtatcctgattctggttcagccgacgatgagcgtattctgagatttcttgaactcgcaggtcttagcaacttggttgccaggacagaaggcctagatcagcaggtcgactggaattggtatgatgtgctgtctccaggagaaatgcaaaggttaagttttgctagattattctacctgcagcctaaatatgcagtgctcgacgaggctaccagtgctctgacggaggaggtcgagtcggagctgtaccgcataggtcagcagctcggcatgacgtttattagcgtcggccaccggcagtccctggaaaaatttcatagtctggtcctgaaactgtgtggaggaggacgctgggagctcatgcgcatcaaagtcgagtag

SEQ ID NO: 152395 - DNA, 1467 bp, Artificial Sequence
  derived and/or modified sequence
atgctgatcgtcttgaactctactctgaagtcttttgaccagtttacctgtaatctgctgtacgtatcttggaggaaggatttaactgagcatcttcaccgcctgtacttccgcggacgtgcgtactacaccctgaacgtgcttagagatgacattgacaaccccgatcagcgcatctcccaagacgtggaacgcttctgcagacagttgtcatcaatggcctccaagctgattatttcgccctttacactcgtttattatacataccagtgtttccagagcaccggctggctgggacctgtgtctatctttgggtactttatactcgggactgtagtgaacaagaccctgatgggcccaatcgtaatgaaacttgtgcatcaggagaagctcgagggagattttcgagccggtcatgttgaacacatgcggaccgatcggagactccagcggcttctgcagactcagcgtgaacttatgtcaaaggagctgtggctgtacattggaataaatactttcgactacctgggtagtattctttcttatgtggtgatcgccataccaatcttttccggcgtgtatggggacctgagccccgcagaattgtccacccttgtcagcaaaaacgcctttgtctgcatctaccttattagctgctttacacagctaattgatctctctaccacactgtctgatgtggcagggtacacacacagaatcgggcagctccgggagaccctactggacatgagcctgaagtctcaagactgcgagatcctgggagaatcagagtggggtcttgacacccctcccggatggcccgcagcagagccagctgacactgccttcctcctagagcgggtaagcataagcgccccttctagtgataagcccctgatcaaggacctaagcctgaagatatcagagggacaatctctgttgatcaccggtaacacaggcacaggcaagacttctttgctgcgtgttttgggcggactctggacctcgaccaggggtagcgtccagatgctgaccgacttcggcccacatggagtgttatttttgccccagaaaccctttttcactgatggaacacttcgcgaacaggtcatctatcctctcaaggaggtgtaccctgatagcggaagcgctgatgatgagaggattctgcgatttctggagcttgctggcttatcaaatttagtggctcggacagaagggttggatcaacaggtggactggaattggtacgatgtgttgtctccaggagagatgcagagactgagctttgcaaggctgttctatctgcagccaaagtatgctgttctcgatgaagctacctccgccctgactgaagaagtagagtctgaactttatcggatcggccaacagttgggcatgacattcatttcagtcggacataggcagtctctggagaaggtgcccgtgctgacaaggatggcctag

SEQ ID NO: 152396 - DNA, 1821 bp, Artificial Sequence
  derived and/or modified sequence
atggcagtcgcaggaccagccccaggggctggggctaggccaaggctggacttgcagttcctgcagaggttcctccagatcctgaaggttttgtttccatcgtggagctcccagaatgccttaatgttcttaacacttctgtgtctgacactgttggagcagtttgttatataccaggtgggacttattccgtcccagtattacggggttctcgggaacaaagacctagagggatttaagacgttaacattcctggccgtcatgctgattgtgcttaatagtactctgaagagctttgaccagttcacatgcaacctgctgtacgtgagctggcgaaaagatcttaccgaacacttgcaccgactctatttcagaggcagggcgtattataccctgaatgtgttgagagatgacatcgataaccctgatcagcgcatctcacaggatgtggagagattttgccgccagctatcctccatggcttccaaacttatcatatctcccttcaccctggtttactatacttatcagtgcttccagagtaccggttggctcgggcctgtgagcattttcggatattttattctcggcacagtcgtgaacaaaaccttaatggggccaatcgtgatgaaactcgtgcaccaggagaagttggaaggcgatttcagattcaagcatatgcaaattcgagtgaacgcggagcccgctgcattttaccgcgctggccatgttgagcatatgcggacagatcgcagactgcagaggcttctgcagacacaacgcgaactcatgtccaaggaactgtggctctacatcggtatcaacaccttcgactatctgggatccatcctctcttatgtggtcatcgccattcctatctttagcggcgtctatggcgacctgagcccagccgagttgtctacgctagtgtctaagaatgcctttgtctgtatttatctcatctcctgctttactcagctgatcgatctttcaaccacccttagcgatgtcgccggttatactcatcgtattggccagcttagagaaacgttgctcgacatgtccctaaagtcccaggattgcgaaattctgggagaatcagaatggggccttgacaccccacccggttggccagccgctgaaccagccgacacagcattcctcctcgaaagagtatcaatttcagccccatcctccgacaagccactgatcaaagatctctcccttaaaatctcagagggtcagagtctgctgattactggcaacactggcactggtaagaccagcctgctgagggtgttgggaggcctctggacatccactcgagggtccgtgcagatgttgaccgattttgggccacacggtgtgctattcctgccacagaaacctttcttcaccgacggtactctgcgcgaacaggtgatctaccctctgaaggaggtataccctgacagcgggtctgcagacgacgaaaggatcttgaggtttctagaacttgccggtttgtccaatttagtggcacggaccgagggactggatcagcaagtcgactggaactggtacgatgtgcttagtcccggagagatgcagagactgtcatttgccagactgttttatctgcagccaaaatacgctgttctggatgaggccacctctgcgttaactgaggaagtcgaatctgagctttatagaataggacagcagttgggaatgaccttcatatccgtaggtcaccggcaatctctggagaaatttcatagcttggtcctgaagctctgcggaggcggtagatgggagctcatgcgtatcaaggtggaatag

SEQ ID NO: 152397 - DNA, 1770 bp, Artificial Sequence
  derived and/or modified sequence
tctacccagtactgaactaggggcagctgggctccagagtccctcgggtctcaggtcatggcggtcgcggggcccgcgcccggagctggcgccagagcaatttgtgatctaccaggttggcttgatccccagtcagtactatggggtcctgggaaacaaagacttggaagggtttaagactctgacattcctggctgtcatgctcattgttctgaactccacgctgaagagctttgatcagttcacctgcaacctgctgtatgtgagctggaggaaggacctcactgagcaccttcaccgcctctacttccggggccgtgcgtactacaccctcaacgtgctgcgggatgacatcgataacccggaccagcgcatcagccaggacgtggagcgattctgccggcagctcagcagcatggccagcaagctcatcatctccccgttcaccctcgtctactacacttaccagtgcttccaaagcacaggctggctcgggcctgtgagcatcttcgggtatttcatcctggggaccgtggtgaacaaaactttgatgggccccattgtgatgaagctggtgcatcaggagaagctggagggagattttagagctgggcatgtggagcacatgaggacagaccgcaggctgcagagactccttcagacccagagggagctgatgtccaaggagctctggctgtacatcggcatcaacacctttgactatctgggcagcatcctgagttacgttgtcatcgcaatccccattttcagcggggtctatggagacctgagtcccgcagagcttagcaccctggtcagcaagaatgcctttgtgtgcatctacctcatcagctgcttcacccagctcatcgacctgtccacgacgctctcagatgtggctggctacacgcacagaattgggcagcttcgggagacgcttctggacatgtccctgaagtcacaggactgcgagatcctgggcgagagcgagtggggcttggacacacccccagggtggccagcggcagagccagcagacacagcatttctccttgagcgggtctccatctctgccccctcctctgacaaacccctaatcaaggatctgagcctaaagatctccgagggacagagcctgctcatcacaggcaacacgggcactggcaagacctccttgctccgggttctgggtggcctctggacgagtacacggggctcagtgcagatgctgacggactttgggccccatggggtgctattcctgccacaaaagccattcttcactgacgggacccttcgggagcaggtgatatatcccctgaaggaggtctaccccgactcaggttctgccgatgatgagaggatcttgaggttcttggaattggcaggcctgtccaacttggtggcaaggacagagggcctggaccagcaggtggactggaactggtatgatgttctgtccccgggggagatgcaacggctctcctttgcccgactcttctacctgcagccgaagtacgcagtgcttgatgaagccaccagtgccctgacagaggaagtggagagcgagctctatcgcatcggccagcagctggggatgacgttcatcagtgtgggacatcggcagagccttgagaaggtacccgtgctcacaaggatggcctgaggaggagaaagaacccaaaggctcagcctggccagggccagaggcccctcaaaacggggagtagcagtagcagagagaaccgagtggcctcctctgccagcggc

SEQ ID NO: 152398 - DNA, 3003 bp, Artificial Sequence
  derived and/or modified sequence
cgcttccgggagagtccgcgtctcccgcaccttcctctctatcaaacgccgtctctgtggtagccggggccccgcccctcctcggactctacccagtactgaactaggggcagctgggctccagagtccctcgggtctcaggtcatggcggtcgcggggcccgcgcccggagctggcgccaggcccaggttagatctgcaatttctccagcggttcctgcagatactgaaggttttgtttccttcttggtcatcacaaaatgccttgatgttcctgacccttttgtgcctgaccctactggagcaatttgtgatctaccaggttggcttgatccccagtcagtactatggggtcctgggaaacaaagacttggaagggtttaagactctgacattcctggctgtcatgctcattgttctgaactccacgctgaagagctttgatcagttcacctgcaacctgctgtatgtgagctggaggaaggacctcactgagcaccttcaccgcctctacttccggggccgtgcgtactacaccctcaacgtgctgcgggatgacatcgataacccggaccagcgcatcagccaggacgtggagcgattctgccggcagctcagcagcatggccagcaagctcatcatctccccgttcaccctcgtctactacacttaccagtgcttccaaagcacaggctggctcgggcctgtgagcatcttcgggtatttcatcctggggaccgtggtgaacaaaactttgatgggccccattgtgatgaagctggtgcatcaggagaagctggagggagattttaggttcaagcacatgcagattcgggtgaatgcggagcctgctgctttctacagagctgggcatgtggagcacatgaggacagaccgcaggctgcagagactccttcagacccagagggagctgatgtccaaggagctctggctgtacatcggcatcaacacctttgactatctgggcagcatcctgagttacgttgtcatcgcaatccccattttcagcggggtctatggagacctgagtcccgcagagcttagcaccctggtcagcaagaatgcctttgtgtgcatctacctcatcagctgcttcacccagctcatcgacctgtccacgacgctctcagatgtggctggctacacgcacagaattgggcagcttcgggagacgcttctggacatgtccctgaagtcacaggactgcgagatcctgggcgagagcgagtggggcttggacacacccccagggtggccagcggcagagccagcagacacagcatttctccttgagcgggtctccatctctgccccctcctctgacaaacccctaatcaaggatctgagcctaaagatctccgagggacagagcctgctcatcacaggcaacacgggcactggcaagacctccttgctccgggttctgggtggcctctggacgagtacacggggctcagtgcagatgctgacggactttgggccccatggggtgctattcctgccacaaaagccattcttcactgacgggacccttcgggagcaggtgatatatcccctgaaggaggtctaccccgactcaggttctgccgatgatgagaggatcttgaggttcttggaattggcaggcctgtccaacttggtggcaaggacagagggcctggaccagcaggtggactggaactggtatgatgttctgtccccgggggagatgcaacggctctcctttgcccgactcttctacctgcagccgaagtacgcagtgcttgatgaagccaccagtgccctgacagaggaagtggagagcgagctctatcgcatcggccagcagctggggatgacgttcatcagtgtgggacatcggcagagccttgagaagtttcattccttggttctgaaactctgtggaggaggaagatgggagctgatgagaatcaaagtggaatgaagctctggcttttggaaggagagccacactgtggcgggtcggcggccctcaggagagaccaggaggactgacagcgaagatcgagctcaggttcgccacatagatcccgtgcaggagccacatgggtcctgtgcaggacccctagcagtggtgggctgagcccaggtctaggtttctgtgggggacactgaatctcccagtgttcagtctcccaggactctgctgcctcagccagagcctccatatgcttgaagtgctgattacctacaaatgatttcagatcatgtttgctaaagagaaatctggaagtgtgagatctgtaagaaatgaaagaaatgactcttggagtcaagagatctggaaatcttttaatcagttaaattgtgcagcaatagatttttaactttaactgaccatttaagttttttaataagttttttacaaagaaaagttaaacattaaaaagaattacagctttctgtcttctctatcatggaatgatcttttttattgaatctccagatttgtatttgacagcttggtgggaagggaagcacactctgctgttctggaatcttatgcccagggtttttcacttctccccacatctccctttccacttgccagtgttgtgtagttagaacctgaaccactaacttccaggggcctttggtctgccctaccttaacccaaatgaaagtaaatccctttccccttagccaaaataaggttgggttttctaaaaaaatagtctatattagggaacaacaacagcaaattagacaaaacccagaaagcacaaagcatgaggtggagttactgtgcccaaagtcctcactcagaccagtgcccctccagttcagttgtctatgtattaccttccttaccttcataatttttgccaggcttctgtacttctagtacttgagttacttaatatttttaaaaacaaaccttttaagtttaaatggatttttaagtgaaattttacacttaacatagatggaaagtaactaaaaataaatacaagaaaaacca

SEQ ID NO: 152399 - DNA, 1467 bp, Artificial Sequence
  derived and/or modified sequence
atgctgatcgtgctgaacagcaccctgaagagcttcgaccagttcacctgcaacctgctgtacgtgagctggagaaaggacctgaccgagcacctgcacagactgtacttcagaggcagagcctactacaccctgaacgtgctgagagacgacatcgacaaccccgaccagagaatcagccaggacgtggagagattctgcagacagctgagcagcatggccagcaagctgatcatcagccccttcaccctggtgtactacacctaccagtgcttccagagcaccggctggctgggccccgtgagcatcttcggctacttcatcctgggcaccgtggtgaacaagaccctgatgggccccatcgtgatgaagctggtgcaccaggagaagctggagggcgacttcagagccggccacgtggagcacatgagaaccgacagaagactgcagagactgctgcagacccagagagagctgatgagcaaggagctgtggctgtacatcggcatcaacaccttcgactacctgggcagcatcctgagctacgtggtgatcgccatccccatcttcagcggcgtgtacggcgacctgagccccgccgagctgagcaccctggtgagcaagaacgccttcgtgtgcatctacctgatcagctgcttcacccagctgatcgacctgagcaccaccctgagcgacgtggccggctacacccacagaatcggccagctgagagagaccctgctggacatgagcctgaagagccaggactgcgagatcctgggcgagagcgagtggggcctggacaccccccccggctggcccgccgccgagcccgccgacaccgccttcctgctggagagagtgagcatcagcgcccccagcagcgacaagcccctgatcaaggacctgagcctgaagatcagcgagggccagagcctgctgatcaccggcaacaccggcaccggcaagaccagcctgctgagagtgctgggcggcctgtggaccagcaccagaggcagcgtgcagatgctgaccgacttcggcccccacggcgtgctgttcctgccccagaagcccttcttcaccgacggcaccctgagagagcaggtgatctaccccctgaaggaggtgtaccccgacagcggcagcgccgacgacgagagaatcctgagattcctggagctggccggcctgagcaacctggtggccagaaccgagggcctggaccagcaggtggactggaactggtacgacgtgctgagccccggcgagatgcagagactgagcttcgccagactgttctacctgcagcccaagtacgccgtgctggacgaggccaccagcgccctgaccgaggaggtggagagcgagctgtacagaatcggccagcagctgggcatgaccttcatcagcgtgggccacagacagagcctggagaaggtgcccgtgctgaccagaatggcctag

SEQ ID NO: 152400 - DNA, 1821 bp, Artificial Sequence
  derived and/or modified sequence
atggccgtggccggccccgcccccggcgccggcgccagacccagactggacctgcagttcctgcagagattcctgcagatcctgaaggtgctgttccccagctggagcagccagaacgccctgatgttcctgaccctgctgtgcctgaccctgctggagcagttcgtgatctaccaggtgggcctgatccccagccagtactacggcgtgctgggcaacaaggacctggagggcttcaagaccctgaccttcctggccgtgatgctgatcgtgctgaacagcaccctgaagagcttcgaccagttcacctgcaacctgctgtacgtgagctggagaaaggacctgaccgagcacctgcacagactgtacttcagaggcagagcctactacaccctgaacgtgctgagagacgacatcgacaaccccgaccagagaatcagccaggacgtggagagattctgcagacagctgagcagcatggccagcaagctgatcatcagccccttcaccctggtgtactacacctaccagtgcttccagagcaccggctggctgggccccgtgagcatcttcggctacttcatcctgggcaccgtggtgaacaagaccctgatgggccccatcgtgatgaagctggtgcaccaggagaagctggagggcgacttcagattcaagcacatgcagatcagagtgaacgccgagcccgccgccttctacagagccggccacgtggagcacatgagaaccgacagaagactgcagagactgctgcagacccagagagagctgatgagcaaggagctgtggctgtacatcggcatcaacaccttcgactacctgggcagcatcctgagctacgtggtgatcgccatccccatcttcagcggcgtgtacggcgacctgagccccgccgagctgagcaccctggtgagcaagaacgccttcgtgtgcatctacctgatcagctgcttcacccagctgatcgacctgagcaccaccctgagcgacgtggccggctacacccacagaatcggccagctgagagagaccctgctggacatgagcctgaagagccaggactgcgagatcctgggcgagagcgagtggggcctggacaccccccccggctggcccgccgccgagcccgccgacaccgccttcctgctggagagagtgagcatcagcgcccccagcagcgacaagcccctgatcaaggacctgagcctgaagatcagcgagggccagagcctgctgatcaccggcaacaccggcaccggcaagaccagcctgctgagagtgctgggcggcctgtggaccagcaccagaggcagcgtgcagatgctgaccgacttcggcccccacggcgtgctgttcctgccccagaagcccttcttcaccgacggcaccctgagagagcaggtgatctaccccctgaaggaggtgtaccccgacagcggcagcgccgacgacgagagaatcctgagattcctggagctggccggcctgagcaacctggtggccagaaccgagggcctggaccagcaggtggactggaactggtacgacgtgctgagccccggcgagatgcagagactgagcttcgccagactgttctacctgcagcccaagtacgccgtgctggacgaggccaccagcgccctgaccgaggaggtggagagcgagctgtacagaatcggccagcagctgggcatgaccttcatcagcgtgggccacagacagagcctggagaagttccacagcctggtgctgaagctgtgcggcggcggcagatgggagctgatgagaatcaaggtggagtag

SEQ ID NO: 152401 - protein, 775 aa, Artificial Sequence
  derived and/or modified sequence
MAALDSLSLFTSLGLSEQKARETLKNSALSAQLREAATQAQQTLGSTIDKATGILLYGLASRLRDTRRLSFLVSYIASKKIHTEPQLSAALEYVRSHPLDPIDTVDFERECGVGVIVTPEQIEEAVEAAINRHRPQLLVERYHFNMGLLMGEARAVLKWADGKMIKNEVDMQVLHLLGPKLEADLEKKFKVAKARLEETDRRTAKDVVENGETADQTLSLMEQLRGEALKFHKPGENYKTPGYVVTPHTMNLLKQHLEITGGQVRTRFPPEPNGILHIGHAKAINFNFGYAKANNGICFLRFDDTNPEKEEAKFFTAICDMVAWLGYTPYKVTYASDYFDQLYAWAVELIRRGLAYVCHQRGEELKGHNTLPSPWRDRPMEESLLLFEAMRKGKFSEGEATLRMKLVMEDGKMDPVAYRVKYTPHHRTGDKWCIYPTYDYTHCLCDSIEHITHSLCTKEFQARRSSYFWLCNALDVYCPVQWEYGRLNLHYAVVSKRKILQLVATGAVRDWDDPRLFTLTALRRRGFPPEAINNFCARVGVTVAQTTMEPHLLEACVRDVLNDTAPRAMAVLESLRVIITNFPAAKSLDIQVPNFPADETKGFHQVPFAPIVFIERTDFKEEPEPGFKRLAWGQPVGLRHTGYVIELQHVVKGPSGCVESLEVTCRRADAGEKPKAFIHWVSQPLMCEVRLYERLFQHKNPEDPTEVPGGFLSDLNLASLHVVDAALVDCSVALAKPFDKFQFERLGYFSVDPDSHQGKLVFNRTVTLKEDPGKV

SEQ ID NO: 152402 - DNA, 2328 bp, Artificial Sequence
  derived and/or modified sequence
atggcagcactggactcgctatccctgttcacaagcctgggtttgagcgagcagaaagcaagagaaactctgaagaattcagcactctcagcccagcttagggaggctgctacgcaggcacagcagacgctgggatcgacgatcgacaaggccacaggaatcctgctctatggtttggcgtctagactgcgagacacacgccgcctgtccttcctcgtttcgtatatcgctagcaaaaagattcacactgagcctcagttgtccgctgctttagaatatgtccgttctcacccgctggatccgatagacaccgttgacttcgagagagaatgtggcgtaggggtgattgtgactcccgagcagatcgaagaagcggtggaggccgctatcaacaggcataggccccaactgctcgtggagcgctatcacttcaacatgggcctcctcatgggcgaggcaagggccgtcctgaagtgggccgacgggaagatgattaagaacgaagtcgatatgcaggtgttgcatctgctcgggcccaaattggaagccgatctcgaaaagaaattcaaggtggccaaggctagactagaggagacggacagaagaactgccaaagatgtggtggaaaatggcgaaacagccgaccagacattgtcgctcatggagcaattgcgtggagaggccctgaaattccataaacccggcgagaactataagacacccgggtacgtcgttactcctcacaccatgaatctgctcaagcagcatctggaaataaccggcggacaagtgaggacacgctttcccccagaacctaacggcatcctccacattgggcatgctaaggccatcaattttaactttggttatgccaaagccaataacgggatctgcttcctgcgtttcgacgacactaatccggagaaggaagaggcaaaatttttcacggctatctgtgatatggttgcgtggcttggctataccccttacaaagtgacctacgctagtgactacttcgatcaattgtacgcctgggccgtggagctgatcaggagagggctggcgtacgtttgccatcagagaggggaagagctaaaggggcataatacgttgccatccccatggcgcgaccgtccgatggaggagtccctgctgctctttgaggccatgcggaagggaaaattttccgagggcgaggccacactgcgaatgaagctggttatggaggatggaaagatggaccctgtggcttaccgtgtaaagtacaccccacatcaccgcacaggggataaatggtgcatatatcctacctacgactacacccactgcctttgcgacagtatagagcacatcacacattcactgtgcaccaaggagtttcaggctcgacggtcgagctatttctggctttgcaatgcgctggacgtctattgtcctgttcagtgggagtacggccggctgaacctccactatgcagtcgtatccaagcgaaagattctgcagttggtggccaccggggcagtgcgggattgggatgaccctcgcctgtttaccctcaccgctctccgaaggcggggtttccctcccgaggctatcaataacttctgtgctcgagttggcgtcactgtggctcaaacaactatggaaccccatctcctcgaagcatgcgttagagatgtgctgaacgacaccgccccccgcgccatggcagttttagaatccctgcgggtcattataacaaactttcctgccgctaaaagtctagacatccaggtgcctaacttccccgccgatgaaactaaaggcttccatcaggttcctttcgcgcctatcgttttcattgagcgcactgatttcaaggaagagccagaacctggctttaaacgcctggcatggggccagcccgttggactacgccatacggggtatgtcatagagctccaacacgttgtgaaaggaccaagtggttgtgtggagtcgcttgaagttacttgccgccgagcagatgccggggaaaagcctaaggccttcattcactgggtgagccagcctttgatgtgtgaagttcggctatacgagcgcctattccagcataagaatcctgaggacccgaccgaggtccccggaggatttctaagcgatcttaaccttgcctccctgcacgtggttgatgcagctctagttgattgctccgtggctcttgctaaaccgtttgacaaatttcaattcgagcgacttgggtacttctcagtggacccagacagccatcaaggaaaattggtcttcaatcgcaccgtaaccctgaaggaggaccccggcaaggtgtag

SEQ ID NO: 152403 - DNA, 2763 bp, Artificial Sequence
  derived and/or modified sequence
agaaaagtcagagcaaaaccacgcctgtgtcttcctcctgcctcagggacgaacaccttccttccaggtccgtggcaaatatctccaaaagccctgccgcctgccaacaccccttcaagttcccagttccacggaggcggaagcaaagcccccggaaaggccggtttgtccgccctgtgttgtttaaaggggatagacgaccttggagcgccccgccccctcccgccaaggaaggaccccattggctctccccggaggcttcactctcattggtcagcgagtgaatgccgacctgcagactggggcctaagtttcttttagtttccggtgtctctgcaatggcggctctagactccctgtcgctcttcactagcctcggcctgagcgagcagaaggcccgcgagacgctcaagaactcggctctgagcgcgcagctgcgcgaggccgctactcaggctcagcagaccctgggttccaccattgacaaagctaccgggatcctgttatatggcttggcctcccgactcagggatacccggcgtctctccttccttgtaagctacatagccagtaagaagatccacactgagccccagctaagcgctgcccttgagtatgtgcggagtcaccccttggaccccatcgacactgtggacttcgagcgggaatgtggcgtgggtgtcattgtgaccccagagcagattgaggaggctgtggaggctgctattaacaggcaccggccccagctcctggtggaacgttaccatttcaacatggggctgctgatgggagaggctcgggctgtgctgaagtgggcagatggcaaaatgatcaagaatgaagtggacatgcaggtcctccaccttctgggccccaagttggaggctgatctggagaagaagttcaaggtggcaaaagctcggctagaagaaacagaccggaggacggcaaaggatgtggtggagaatggcgagactgctgaccagaccctgtctctgatggagcagctccggggggaggcccttaagttccacaagcctggtgagaactacaagaccccaggctatgtggtcactccacacaccatgaatctactaaagcagcacctggagattactggtgggcaggtacgtacccggttcccgccagaacccaatggaatcctgcatattggacatgccaaagccatcaatttcaactttggctatgccaaggccaacaatggcatctgttttctgcgttttgatgacaccaaccctgagaaggaggaagcaaagttcttcacggccatctgtgacatggtagcctggctaggctacacaccttacaaagtcacatatgcgtctgactattttgaccagctatatgcgtgggctgtggagctcatccgcaggggtctggcttatgtgtgccaccagcgaggagaggagctcaaaggccataatactctgccttcaccctggagagaccgtcccatggaggagtcactgctgctctttgaggcaatgcgcaagggcaagttttcagagggcgaggccacactacggatgaagctggtgatggaggatggcaagatggaccctgtagcctatcgagtcaagtatacaccacaccaccgcacaggggacaaatggtgcatctatcccacctacgactacacacactgcctctgtgactccatcgagcacatcactcactcactctgcaccaaggaattccaggcccgacgctcttcctacttctggctttgcaatgcactggacgtctattgccctgtgcagtgggagtatggccgcctcaacctgcactatgctgttgtctctaagaggaagatcctccagcttgtagcaactggtgctgtgcgggactgggatgacccacggctctttacactcacggccctgcgacggcggggcttcccacctgaggccatcaacaacttctgtgcccgggtgggagtgactgtggcacaaaccacaatggagccacatcttctagaagcctgtgtgcgtgatgtgctgaatgacacagccccacgagccatggctgtgctggagtcactacgggtcatcatcaccaactttcctgctgccaagtccttggacatccaggtgcccaacttcccagctgatgagaccaaaggcttccatcaggttccctttgcacccattgtcttcattgagaggactgacttcaaggaggagccagagccaggatttaagcgcctggcttggggccagcctgtgggcctgaggcatacaggctacgtcattgagctgcagcatgttgtcaagggccccagtggttgtgtagagagtctggaggtgacctgcagacgggcagatgctggagagaagccaaaggcctttattcactgggtgtcacagcctttgatgtgtgaggttcgcctctatgagcgactattccagcacaagaaccctgaagatcctactgaggtgcctggtggatttttaagtgacctgaacctggcatcactacacgtggtggatgcagcattagtggactgctctgtggccctggcaaaacccttcgacaagttccagtttgagcgtcttggatatttctccgtggatccagacagccatcagggaaagcttgtctttaaccgaactgtcacactgaaggaagacccaggaaaggtgtgagctggaagcactgaacctacctcatcctcctggagggtgtggctaccctcgccaccccaaattccatgtcaataaagaacagctaaattctcctaga

SEQ ID NO: 152404 - DNA, 2328 bp, Artificial Sequence
  derived and/or modified sequence
atggccgccctggacagcctgagcctcttcaccagcctgggcctgtctgagcagaaggcccgggagaccctgaagaacagcgccctgagcgcccagctgcgggaggccgccacccaggcccagcagaccctgggcagcaccatcgacaaggccaccggcatcctgctgtatggcctggccagccggctgcgggacacccggcggctgtccttcctggtgtcctacatcgccagcaagaagatccacacagagccccagctgtctgctgccctggagtatgtgcgcagccaccccctggaccccatcgacacagtggactttgagcgggagtgtggggtgggcgtcatcgtgaccccagagcagatcgaggaggccgtggaggccgccatcaacagacaccggccccagctgctggtggagcgctaccacttcaacatgggcctgctgatgggagaggcccgggctgtgctgaagtgggcagatggcaagatgatcaagaatgaggtggacatgcaggtgctgcacctgctgggccccaagctggaggccgacctggagaagaagttcaaggtggccaaggcccggctggaggagacagacagaagaacagccaaggatgtggtggagaatggagaaacagctgaccagaccctgagcctgatggagcagctgcggggggaggccctgaagttccacaagccaggagagaactacaagaccccaggctacgtggtgaccccccacaccatgaacctgctgaagcagcacctggagatcaccggcggccaggtgaggacccgcttccccccagagcccaacggcatcctgcacatcggccacgccaaggccatcaacttcaactttggctacgccaaggccaacaacggcatctgcttcctgcgctttgatgacaccaaccctgagaaggaggaggccaagttcttcaccgccatctgtgacatggtggcctggctgggctacaccccctacaaggtgacctacgccagtgactactttgaccagctgtatgcctgggccgtggagctgatcagaagaggcctggcctacgtgtgccaccagagaggagaggagctgaagggccacaacaccctgcccagcccctggagggaccggcccatggaggagagcctgctgctgtttgaggccatgaggaagggcaagttcagcgagggggaggccaccctgaggatgaagctggtgatggaggatggcaagatggaccctgtggcctacagagtgaagtacaccccccaccacaggactggagacaagtggtgcatctaccccacctatgactacacccactgcctgtgtgacagcattgagcacatcacccacagcctgtgcaccaaggagttccaggcccggcgcagcagctacttctggctgtgcaatgccctggatgtgtactgccctgtgcagtgggagtatggccgcctgaacctgcactatgctgtggtgtccaagaggaagatcctgcagctggtggccactggagctgtgcgggactgggatgaccccaggctcttcaccctgacagccctgcggcggcggggcttccccccagaggccatcaacaacttctgtgcccgggtgggcgtgacagtggcccagaccaccatggagccccacctgctggaggcctgtgtgagagatgtgctgaatgacacagccccccgggccatggctgtgctggagagcctgcgggtcatcatcaccaacttccctgctgccaagagcctggacatccaggtgcccaacttcccagcagatgagaccaagggcttccaccaggtgccctttgcccccatcgtgttcatcgagaggacagacttcaaggaggagcctgagcccggcttcaagaggctggcctggggccagcctgtgggcctgcggcacacaggctacgtgattgagctgcagcacgtggtgaagggccccagcggctgtgtggagagcctggaggtgacctgccggcgggcagatgctggggagaagcccaaggccttcatccactgggtgtcccagcccctgatgtgtgaggtgcggctgtatgaaagactcttccagcacaagaaccctgaggaccccacagaggtgcctgggggcttcctgagtgacctgaacctggccagcctgcacgtggtggatgctgccctggtggactgcagcgtggccctggccaagccctttgacaagttccagtttgagcggctgggctacttctctgtggaccctgacagccaccagggcaagctggtgttcaacagaacagtgaccctgaaggaggaccccgggaaggtgtag

SEQ ID NO: 152405 - DNA, 2328 bp, Artificial Sequence
  derived and/or modified sequence
atggccgccctggacagcctgagcctgttcaccagcctgggcctgtcagaacagaaggctcgggagacactgaagaattccgctctgagtgcccagttaagagaagcagccacccaggcccagcagacactgggctccacaattgataaggcgaccggcattctcctgtatgggttagcctctcgacttagagacacccgcaggttgtcttttctggtgtcctatattgctagtaaaaaaattcatactgagccccagctgtccgctgccctggaatacgtaagaagccatccacttgatcccatagatacagtcgattttgagcgcgagtgcggtgttggcgttatagttacacccgagcagattgaggaggcagtggaggctgcaataaatagacacaggcctcagttactcgtggagaggtatcacttcaacatggggctcctgatgggcgaagctcgggcagtgctaaagtgggctgatggcaaaatgatcaaaaacgaggtcgacatgcaggtactgcacctcttgggtccaaaattagaggctgacctggaaaaaaaattcaaggtggcgaaggcccggctcgaagaaactgaccggcggaccgccaaagacgttgtggaaaacggcgagacagcagatcaaaccctgtccctcatggaacagttacgtggagaagccctgaagttccataaaccgggggagaattacaagacaccagggtacgtggttacaccacacacaatgaatcttcttaaacagcatctggagatcacaggcggccaagtccgcacccgattcccacccgaacctaacggaattctgcacattggacacgctaaggccatcaatttcaactttggctatgcgaaagcgaataatgggatttgcttcctgcgatttgacgacactaaccctgagaaggaggaagctaagtttttcactgccatctgcgatatggtcgcatggctgggctacacaccatataaggtaacatatgcaagcgactacttcgatcagctttatgcctgggcagtagaactgattagacgtggtttggcctacgtgtgtcatcaacgcggcgaggagttaaaagggcataatactcttccatctccatggcgggacaggcccatggaggagtcactcctgctgttcgaggcaatgcgtaagggcaaattctccgaaggggaagccaccctgcgaatgaagcttgtaatggaagatggtaaaatggaccctgtcgcgtaccgagtgaagtacaccccccatcatcggaccggcgacaaatggtgcatctatccaacgtacgattatacacactgcctgtgcgactcgatcgagcacattacccattcactttgtacgaaagagttccaggccagacgttcttcatacttctggctctgcaatgcactggacgtctattgcccggtgcagtgggaatacggcaggctcaatttgcactacgctgtggtgtcgaaacggaagatcctgcagttggtcgccactggagctgtgagagactgggacgatcctaggctgtttaccttaaccgctctccgacggagaggttttccccccgaggccattaacaacttctgcgctagagtgggtgtgacagttgcccagaccaccatggaaccacatttgctggaagcatgcgtccgggatgtgctcaacgatacggcccctcgggcaatggccgtgctcgaatcccttcgcgttattataacgaacttcccggcggccaaaagcttggacatccaggttcccaacttccctgccgatgagactaaaggattccaccaggtgccattcgctccgatagtgttcatcgaacgaacagactttaaggaagagccagagccaggatttaagcgactcgcctggggacagcccgtcggcttgcgtcacaccggttacgtcattgagctccagcacgtggtgaaggggccatctggatgtgtagagtccttggaagtcacttgccgaagagcagatgcgggagagaaaccaaaggccttcatacactgggtgtcgcagcccttgatgtgcgaggtgcgactctacgaaaggctcttccaacataagaacccagaggaccctactgaagtgcctggcggattcctttcggacctaaacctcgcttctcttcacgtggtcgatgctgctctcgtggattgttccgtggcgcttgccaagccattcgacaaatttcaattcgaacgcctcgggtatttttcagtggacccagactctcatcagggtaagttggtgttcaacagaactgtaactctgaaagaagatcccggcaaagtgtag

SEQ ID NO: 152406 - DNA, 2328 bp, Artificial Sequence
  derived and/or modified sequence
atggcagcacttgatagcctgtccctgtttaccagtttgggcctgtcggaacagaaagctagggaaacgctgaagaattcagccctgagtgcgcagcttcgtgaagctgccacccaggcgcagcagacgctcggctccactattgacaaggccacagggattctcctatatggtctggcctcccgtctgagagacacccgccgactgtctttcctggtcagctacatcgctagcaaaaaaatacacacggagccacaactttcagcggcactggaatacgtgcgttctcaccctctggatccgattgacactgtggattttgaaagagaatgcggagtgggcgtcatcgtcactccagagcaaatcgaggaggccgttgaggcagccatcaaccgacaccggcctcaactactggtggaacggtaccacttcaatatgggcctgctcatgggagaggcgagggctgtgttgaagtgggctgatgggaagatgatcaagaacgaagtagacatgcaggtgctgcacctgttggggccaaagctggaggccgatttggaaaagaaattcaaggtcgcaaaagctcgcctggaggagaccgatagaaggactgctaaagatgtggtcgagaacggggagacagcagaccagacgttatccctaatggaacagctacgaggcgaggccttgaagtttcacaaaccaggggaaaactacaagacacccggatacgttgtcaccccccacacgatgaatctactgaaacagcacttggagatcaccggtggccaggtccgtacccgattcccgccagaacccaatggcattctgcatattggccacgccaaggcgattaatttcaattttggctatgcgaaggccaacaatggtatctgtttcctcaggttcgacgacaccaaccccgaaaaagaagaagccaagttcttcacagcaatctgcgacatggtggcctggctggggtatactccttacaaggtcacatacgcgtcagattatttcgaccagctgtacgcatgggccgtggaacttatccgcaggggtttggcgtacgtatgccaccagcgaggagaagagctgaagggacacaacacacttccgtctccttggagagacagaccaatggaagaatcgcttctactgttcgaggcaatgcgcaagggcaagttttccgaaggcgaagctaccctacgaatgaaactagtcatggaagatggcaaaatggacccggtcgcataccgcgttaaatacacccctcatcatcgcactggagataagtggtgtatctatcctacctatgattacacccattgtctctgcgattctattgaacatattacacatagcctctgtactaaggaatttcaggcccgacgtagctcttatttttggctttgtaatgcgctggatgtgtattgtccagtccaatgggaatatgggaggctgaaccttcattatgccgtggtaagcaaaaggaagatcctgcagctggttgctacgggcgcagttagggattgggatgatccccgactgtttaccctaactgccctccgacgtaggggtttccctccagaggctattaacaatttctgcgccagggttggggtgaccgtggctcagacgaccatggagccacatctacttgaagcttgcgttcgggacgttctgaacgacaccgccccaagggccatggcagtgcttgagtcactccgcgtgatcatcacaaattttcccgcagcgaagtccttagacattcaggtaccaaatttcccagctgacgagacaaagggcttccaccaggttccttttgcaccgattgtgtttatcgaacggacagattttaaggaggagccagagcccggtttcaaaaggctggcctgggggcaaccagtcggcctgcgccacactggatatgtgatcgagctccagcacgtcgtgaaagggccatccggctgcgttgagtcgctcgaggtcacctgccgcagagcagatgctggcgaaaagccaaaggcttttatccactgggtctctcagccccttatgtgtgaagtccggctgtacgagagactcttccaacacaaaaatccagaagatcccacagaggtgcccggaggctttctgtcagacctcaacttggccagtctgcatgtggtagatgccgctctggtggactgctctgtggccctagccaaaccatttgataaatttcagttcgaacgcttagggtacttttctgtcgaccctgactcacaccagggcaagctcgtgtttaaccgcactgtgacccttaaggaagatcccggtaaggtgtag

SEQ ID NO: 152407 - DNA, 2328 bp, Artificial Sequence
  derived and/or modified sequence
atggccgccctggacagcctgagcctgttcaccagcctgggcctgagcgagcagaaggccagagagaccctgaagaacagcgccctgagcgcccagctgagagaggccgccacccaggcccagcagaccctgggcagcaccatcgacaaggccaccggcatcctgctgtacggcctggccagcagactgagagacaccagaagactgagcttcctggtgagctacatcgccagcaagaagatccacaccgagccccagctgagcgccgccctggagtacgtgagaagccaccccctggaccccatcgacaccgtggacttcgagagagagtgcggcgtgggcgtgatcgtgacccccgagcagatcgaggaggccgtggaggccgccatcaacagacacagaccccagctgctggtggagagataccacttcaacatgggcctgctgatgggcgaggccagagccgtgctgaagtgggccgacggcaagatgatcaagaacgaggtggacatgcaggtgctgcacctgctgggccccaagctggaggccgacctggagaagaagttcaaggtggccaaggccagactggaggagaccgacagaagaaccgccaaggacgtggtggagaacggcgagaccgccgaccagaccctgagcctgatggagcagctgagaggcgaggccctgaagttccacaagcccggcgagaactacaagacccccggctacgtggtgaccccccacaccatgaacctgctgaagcagcacctggagatcaccggcggccaggtgagaaccagattcccccccgagcccaacggcatcctgcacatcggccacgccaaggccatcaacttcaacttcggctacgccaaggccaacaacggcatctgcttcctgagattcgacgacaccaaccccgagaaggaggaggccaagttcttcaccgccatctgcgacatggtggcctggctgggctacaccccctacaaggtgacctacgccagcgactacttcgaccagctgtacgcctgggccgtggagctgatcagaagaggcctggcctacgtgtgccaccagagaggcgaggagctgaagggccacaacaccctgcccagcccctggagagacagacccatggaggagagcctgctgctgttcgaggccatgagaaagggcaagttcagcgagggcgaggccaccctgagaatgaagctggtgatggaggacggcaagatggaccccgtggcctacagagtgaagtacaccccccaccacagaaccggcgacaagtggtgcatctaccccacctacgactacacccactgcctgtgcgacagcatcgagcacatcacccacagcctgtgcaccaaggagttccaggccagaagaagcagctacttctggctgtgcaacgccctggacgtgtactgccccgtgcagtgggagtacggcagactgaacctgcactacgccgtggtgagcaagagaaagatcctgcagctggtggccaccggcgccgtgagagactgggacgaccccagactgttcaccctgaccgccctgagaagaagaggcttcccccccgaggccatcaacaacttctgcgccagagtgggcgtgaccgtggcccagaccaccatggagccccacctgctggaggcctgcgtgagagacgtgctgaacgacaccgcccccagagccatggccgtgctggagagcctgagagtgatcatcaccaacttccccgccgccaagagcctggacatccaggtgcccaacttccccgccgacgagaccaagggcttccaccaggtgcccttcgcccccatcgtgttcatcgagagaaccgacttcaaggaggagcccgagcccggcttcaagagactggcctggggccagcccgtgggcctgagacacaccggctacgtgatcgagctgcagcacgtggtgaagggccccagcggctgcgtggagagcctggaggtgacctgcagaagagccgacgccggcgagaagcccaaggccttcatccactgggtgagccagcccctgatgtgcgaggtgagactgtacgagagactgttccagcacaagaaccccgaggaccccaccgaggtgcccggcggcttcctgagcgacctgaacctggccagcctgcacgtggtggacgccgccctggtggactgcagcgtggccctggccaagcccttcgacaagttccagttcgagagactgggctacttcagcgtggaccccgacagccaccagggcaagctggtgttcaacagaaccgtgaccctgaaggaggaccccggcaaggtgtag

SEQ ID NO: 152408 - protein, 192 aa, Artificial Sequence
  derived and/or modified sequence
MQAIKCVVVGDGAVGKTCLLISYTTNAFPGEYIPTVFDNYSANVMVDGKPVNLGLWDTAGQEDYDRLRPLSYPQTDVFLICFSLVSPASFENVRAKWYPEVRHHCPHTPILLVGTKLDLRDDKDTIERLRDKKLAPITYPQGLAMAREIGSVKYLECSALTQRGLKTVFDEAIRAVLCPPPVKKPGKKCTVF

SEQ ID NO: 152409 - DNA, 579 bp, Artificial Sequence
  derived and/or modified sequence
atgcaggcaattaagtgcgttgtcgtcggcgacggggccgtgggcaagacatgcctgctgatcagttatacaacaaacgccttccctggggagtacattccgacggtcttcgataactactccgctaacgttatggtggacggaaagccggtgaacctagggctctgggacacagcagggcaggaagactacgacaggctgcgaccattgtcctacccacagacggatgtatttcttatctgcttttctttggtgtctcctgccagctttgaaaacgtcagagctaaatggtatcccgaagttagacaccactgtccacacacccccattctgcttgttgggactaagctggacttgcgagacgataaggatacgatagaacgtctacgcgataagaagttggcacctataacctatccgcagggcttggctatggcaagagaaataggctccgtcaagtatctggaatgctcagcactgacacagcgagggctgaagacagtgtttgatgaagccattagggccgtgctttgccccccccctgttaagaaaccaggaaagaagtgcacagttttctag

SEQ ID NO: 152410 - DNA, 579 bp, Artificial Sequence
  derived and/or modified sequence
atgcaggccatcaagtgtgtggtggtgggagatggagctgtgggcaagacctgcctgctgatctcctacaccaccaatgccttccctggagagtacatccccaccgtgtttgacaactacagcgccaacgtgatggtggatggcaagcctgtgaacctgggcctgtgggacacagctggccaggaggactatgaccggctgcggcccctgagctacccccagacagatgtgttcctgatctgcttcagcctggtgtccccagccagctttgaaaatgtgcgggccaagtggtacccagaggtgcgccaccactgcccccacacccccatcctgctggtgggcaccaagctggacctgagagatgacaaggacaccatcgagcggctgcgggacaagaagctggcccccatcacctacccccagggcctggccatggcccgggagatcggctctgtgaagtacctggagtgcagcgccctgacccagaggggcctgaagacagtgtttgatgaggccatccgggctgtgctgtgccccccacctgtgaagaagccaggcaagaagtgcaccgtcttctag

SEQ ID NO: 152411 - DNA, 579 bp, Artificial Sequence
  derived and/or modified sequence
atgcaggccatcaagtgcgtggtggtgggcgacggcgccgtgggcaaaacctgccttctgatctcttatacgacaaacgcgtttccaggagaatacattccaaccgtgttcgacaactattccgcgaatgtgatggtagacgggaagcctgtgaatctgggattgtgggacactgccggacaagaggactacgacaggttgcggcccctttcctacccccagaccgacgtgttcttgatctgttttagtcttgtttcacccgccagctttgagaacgtgcgcgcaaaatggtacccagaggtaaggcaccactgtccccacacacccatacttctggttggtacaaagctagaccttcgagacgacaaagacacgatagagcgcctcagagataaaaaactggccccaatcacttacccacaaggtctggccatggcccgggagatcgggagcgtgaagtacctggagtgtagcgccctgacacagagaggcttgaaaacagtgtttgacgaagcaatcagggccgtcctatgcccacctccagtcaagaagcctggcaagaagtgtacagtcttctag

SEQ ID NO: 152412 - DNA, 579 bp, Artificial Sequence
  derived and/or modified sequence
atgcaagccattaagtgtgtcgttgtgggcgacggcgcagtcgggaaaacgtgtctgcttatttcttacaccactaacgcattcccaggggagtatattccgactgtatttgacaactatagcgctaatgtgatggtcgacggcaagcccgtgaatctggggctttgggacaccgctggacaagaggactacgatagactacggccactatcctatccacagacggatgtctttctgatctgcttcagtctcgtgagtccggcttcattcgagaatgttagggccaagtggtacccagaagttcgccaccactgtccacatacacctattttgctggttggcacaaaactggatctccgggacgacaaagacaccattgagcgcctgcgggataaaaaactggccccaataacataccctcaaggactagccatggccagggaaattggatccgttaagtacttggaatgtagtgccttgacgcagcgaggcctgaagaccgtgtttgatgaggccatcagggccgttctttgcccaccacccgtgaaaaagcctggaaaaaagtgcactgtcttctag

SEQ ID NO: 152413 - DNA, 1057 bp, Artificial Sequence
  derived and/or modified sequence
tgtctccggccgatcgctcggcgctcgggtccgcggccgctgcggcgccgggcatttctccgcagctcggctcgcggccgcgcccgccgccgcccggcccgcgcccatgcaggccatcaagtgcgtggtggtcggcgacggcgccgtggggaagacatgcttgctgatcagctacacgaccaacgccttccccggagagtacatccccaccgtttttgacaactactctgccaacgtgatggtggacgggaaaccagtcaacttggggctgtgggacacagcgggtcaggaggactacgatcggctgcggccactctcctacccccaaactgacgtctttctgatctgcttctctctggtgagcccggcctccttcgagaatgttcgtgccaagtggtacccggaggtgcggcaccactgcccccacacgcccatcctcctggtgggcaccaagctggacctccgcgacgacaaggacaccattgagcggctgcgggacaagaagctggcacccatcacctacccacagggcctggccatggcccgggagattggctctgtgaaatacctggagtgctcagccctgacccagcggggcctgaagacagtgtttgacgaggcgatccgcgcggtgctctgcccgcccccagtgaagaagccggggaagaagtgcaccgtcttctagagccctggcccacccgagcctgagggctggcggggagcagccctggacgtgtccgctgttgtgttgagacgtgtggtgtccctgagtcggctgtggggagcggtgggggtgggccggggggaagcatggggatgaggctgggtggcaggatcctgtcctctctgccgcctcattctggggtgtggctccagccttccctggcccccgccggaggccgggagggagcagggtctccctcagggctgcaggggcaggtgcagggaagccccaggatgggcttccctggagggggagggtgggggggagttctgttccttgtgccccgaggtggggcagccccttctcattttatacaataaacattctccacct

SEQ ID NO: 152414 - DNA, 579 bp, Artificial Sequence
  derived and/or modified sequence
atgcaggccatcaagtgcgtggtggtgggcgacggcgccgtgggcaagacctgcctgctgatcagctacaccaccaacgccttccccggcgagtacatccccaccgtgttcgacaactacagcgccaacgtgatggtggacggcaagcccgtgaacctgggcctgtgggacaccgccggccaggaggactacgacagactgagacccctgagctacccccagaccgacgtgttcctgatctgcttcagcctggtgagccccgccagcttcgagaacgtgagagccaagtggtaccccgaggtgagacaccactgcccccacacccccatcctgctggtgggcaccaagctggacctgagagacgacaaggacaccatcgagagactgagagacaagaagctggcccccatcacctacccccagggcctggccatggccagagagatcggcagcgtgaagtacctggagtgcagcgccctgacccagagaggcctgaagaccgtgttcgacgaggccatcagagccgtgctgtgccccccccccgtgaagaagcccggcaagaagtgcaccgtgttctag

SEQ ID NO: 152415 - protein, 363 aa, Artificial Sequence
  derived and/or modified sequence
MAVTITLKTLQQQTFKIRMEPDETVKVLKEKIEAEKGRDAFPVAGQKLIYAGKILSDDVPIRDYRIDEKNFVVVMVTKTKAGQGTSAPPEASPTAAPESSTSFPPAPTSGMSHPPPAAREDKSPSEESAPTTSPESVSGSVPSSGSSGREEDAASTLVTGSEYETMLTEIMSMGYERERVVAALRASYNNPHRAVEYLLTGIPGSPEPEHGSVQESQVSEQPATEAAGENPLEFLRDQPQFQNMRQVIQQNPALLPALLQQLGQENPQLLQQISRHQEQFIQMLNEPPGELADISDVEGEVGAIGEEAPQMNYIQVTPQEKEAIERLKALGFPESLVIQAYFACEKNENLAANFLLSQNFDDE

SEQ ID NO: 152416 - protein, 198 aa, Artificial Sequence
  derived and/or modified sequence
MLTEIMSMGYERERVVAALRASYNNPHRAVEYLLTGIPGSPEPEHGSVQESQVSEQPATEAAGENPLEFLRDQPQFQNMRQVIQQNPALLPALLQQLGQENPQLLQQISRHQEQFIQMLNEPPGELADISDVEGEVGAIGEEAPQMNYIQVTPQEKEAIERLKALGFPESLVIQAYFACEKNENLAANFLLSQNFDDE

SEQ ID NO: 152417 - DNA, 1092 bp, Artificial Sequence
  derived and/or modified sequence
atggccgtgaccatcaccctgaagaccctgcagcagcagaccttcaagatcagaatggagcccgacgagaccgtgaaggtgctgaaggagaagatcgaggccgagaagggcagagacgccttccccgtggccggccagaagctgatctacgccggcaagatcctgagcgacgacgtgcccatcagagactacagaatcgacgagaagaacttcgtggtggtgatggtgaccaagaccaaggccggccagggcaccagcgccccccccgaggccagccccaccgccgcccccgagagcagcaccagcttcccccccgcccccaccagcggcatgagccaccccccccccgccgccagagaggacaagagccccagcgaggagagcgcccccaccaccagccccgagagcgtgagcggcagcgtgcccagcagcggcagcagcggcagagaggaggacgccgccagcaccctggtgaccggcagcgagtacgagaccatgctgaccgagatcatgagcatgggctacgagagagagagagtggtggccgccctgagagccagctacaacaacccccacagagccgtggagtacctgctgaccggcatccccggcagccccgagcccgagcacggcagcgtgcaggagagccaggtgagcgagcagcccgccaccgaggccgccggcgagaaccccctggagttcctgagagaccagccccagttccagaacatgagacaggtgatccagcagaaccccgccctgctgcccgccctgctgcagcagctgggccaggagaacccccagctgctgcagcagatcagcagacaccaggagcagttcatccagatgctgaacgagccccccggcgagctggccgacatcagcgacgtggagggcgaggtgggcgccatcggcgaggaggccccccagatgaactacatccaggtgaccccccaggagaaggaggccatcgagagactgaaggccctgggcttccccgagagcctggtgatccaggcctacttcgcctgcgagaagaacgagaacctggccgccaacttcctgctgagccagaacttcgacgacgagtag

SEQ ID NO: 152418 - DNA, 597 bp, Artificial Sequence
  derived and/or modified sequence
atgctgaccgagatcatgagcatgggctacgagagagagagagtggtggccgccctgagagccagctacaacaacccccacagagccgtggagtacctgctgaccggcatccccggcagccccgagcccgagcacggcagcgtgcaggagagccaggtgagcgagcagcccgccaccgaggccgccggcgagaaccccctggagttcctgagagaccagccccagttccagaacatgagacaggtgatccagcagaaccccgccctgctgcccgccctgctgcagcagctgggccaggagaacccccagctgctgcagcagatcagcagacaccaggagcagttcatccagatgctgaacgagccccccggcgagctggccgacatcagcgacgtggagggcgaggtgggcgccatcggcgaggaggccccccagatgaactacatccaggtgaccccccaggagaaggaggccatcgagagactgaaggccctgggcttccccgagagcctggtgatccaggcctacttcgcctgcgagaagaacgagaacctggccgccaacttcctgctgagccagaacttcgacgacgagtag

SEQ ID NO: 152419 - DNA, 1092 bp, Artificial Sequence
  derived and/or modified sequence
atggccgtaacgataacattgaagactctccagcagcagacattcaagattaggatggagcccgacgaaaccgtcaaagtgttgaaagaaaagattgaagccgagaaggggagggacgcgtttcccgttgcaggccagaaacttatctacgcaggaaagattctgtccgacgacgtaccaatcagagattacagaattgatgagaaaaacttcgtggtggttatggtaaccaagaccaaggccggacagggaacctcagcaccccctgaagcatcacctacagcagcgcctgagtcatccacttcttttcctcccgcacctacctctggcatgtcacatcccccaccagccgcaagggaagacaagtccccttcagaagaatcggcccccacaacttccccagagtcagtctcaggaagcgtacctagttccggatctagtggacgcgaggaagacgcagccagtactctggtgacggggagtgaatacgaaaccatgctgactgagattatgtcaatgggatacgaacgggagagggtcgttgctgccttgcgtgcttcctataataacccccaccgggcagttgagtatctactgacaggaatcccaggctctcctgaacccgagcacggaagcgttcaggagtcacaggtgtctgagcagcctgcgacggaggcggctggcgagaaccccctggagttcctgcgcgaccagccccaattccagaatatgcggcaagtgatccagcaaaatcccgctcttctcccggctctcttgcagcaacttggtcaagagaatcctcagctgttgcagcagatctccaggcaccaagagcaatttatccaaatgctcaacgaaccgcctggagaacttgccgacattagcgacgtggaaggggaggtgggcgccatcggagaagaagccccccagatgaattacattcaggtgacaccccaagagaaggaagctatcgaacgactaaaggcactgggatttccagaatccctggtcatccaggcatattttgcgtgtgaaaagaatgagaatttggcggcaaatttcctgttgtctcagaacttcgacgatgaatag

SEQ ID NO: 152420 - DNA, 597 bp, Artificial Sequence
  derived and/or modified sequence
atgcttacagagatcatgagtatgggatatgagcgcgagcgtgtggtcgcagctctgagggctagctataataatcctcatcgagccgtcgagtatcttctcactggtatccccgggtcccctgaaccagagcacggttcagtgcaggaatctcaagtaagcgagcagcccgctaccgaggctgccggagagaaccctctggagtttctaagagatcagccccaatttcagaacatgcggcaagtaattcagcagaatccggctctgcttcctgctttgctgcagcagctcgggcaggaaaacccccaactcctacagcagatttcaaggcaccaggaacagtttattcagatgttgaacgaacctcctggcgagcttgccgacatctcggacgttgagggggaggtcggggccataggcgaagaagccccacaaatgaattatatacaggtgacacctcaagagaaagaagcgatcgagaggcttaaagctctgggattcccggaatcactagtaatacaggcttactttgcttgtgagaagaacgagaatttagctgcgaactttttactgtcacaaaacttcgatgacgaatag

SEQ ID NO: 152421 - DNA, 1092 bp, Artificial Sequence
  derived and/or modified sequence
atggctgttacaattactttgaaaactctgcaacagcagacgtttaaaattagaatggaacctgacgaaactgtcaaggttctgaaggaaaagattgaggccgagaagggcagggatgcctttccagtcgcgggccagaaattgatttacgctgggaagatcctgtcagatgacgtcccgatacgcgactataggattgacgaaaaaaactttgttgtggtaatggttactaagaccaaagctgggcaggggacatccgcacccccagaggcatctcctaccgcagctccagaatcgagcacatcctttcctcctgcacccacgtctggaatgagccatccacctccggctgcccgagaggataagtccccgtcagaagagagcgctccaacaaccagtcccgagagcgtgtccggatccgtcccatcctccgggagtagcgggagagaggaagacgctgcctccactctggtcaccgggtccgagtacgaaacgatgctaaccgagatcatgtccatgggatatgagagggaacgagtcgtggctgcactccgcgccagttataacaacccccatagggcagtggaatatctgttaactggcatccccggttcgcccgaaccggaacatggatcagtccaggaatctcaggttagcgagcaacccgccactgaagccgccggcgaaaatcctctcgaatttctgagggatcaaccacagttccagaatatgcggcaagtgattcagcaaaatcctgcactcttgccggctctcttacagcagcttggccaggaaaaccctcagctcctgcagcagatatctcgacaccaggagcaattcatccagatgctgaatgagcctccaggagagcttgcagatattagcgacgtggagggtgaggtgggagccatcggggaggaggccccccagatgaactacatacaagttacgccccaagaaaaggaagctatcgagaggttgaaggccctgggtttccctgagagcctcgtgattcaggcctattttgcttgcgagaaaaacgaaaatcttgcagctaattttctattgagccagaattttgatgatgaatag

SEQ ID NO: 152422 - DNA, 1092 bp, Artificial Sequence
  derived and/or modified sequence
atggctgtgaccatcaccctgaagaccctgcagcagcagaccttcaagatccgcatggagccagatgagaccgtgaaggtgctgaaggagaagattgaggccgagaagggcagagatgccttccctgtggccggccagaagctgatctatgccggcaagatcctgagtgatgatgtgcccatccgggactacagaattgatgagaagaactttgtggtggtgatggtgaccaagaccaaggccggccagggcaccagcgcccctcctgaggccagccccacagctgcccctgagagcagcaccagcttccccccagcccccaccagcggcatgagccaccccccacctgctgcccgggaggacaagagccccagcgaggagagcgcccccaccaccagccctgagagcgtgtctggctctgtgcccagcagcggcagcagcggccgggaggaggatgctgccagcaccctggtgactggaagtgaatatgagaccatgctgacagagatcatgtccatgggctatgagcgggagcgggtggtggccgccctgcgggccagctacaacaacccccacagagctgtggagtacctgctgaccggcatccctggcagccctgagcctgagcacggctctgtgcaggagagccaggtgtctgagcagcctgccacagaggccgccggggagaaccccctggagttcctgcgggaccagccccagttccagaacatgaggcaggtgatccagcagaacccagccctgctgcctgccctgctgcagcagctgggccaggagaacccccagctgctgcagcagatcagccgccaccaggagcagttcatccagatgctgaatgaacctcctggagagctggccgacatcagtgatgtggagggggaggtgggcgccatcggggaggaggccccccagatgaactacatccaggtgaccccccaggagaaggaggccatcgagcggctgaaggccctgggcttccctgagagcctggtgatccaggcctactttgcctgtgagaagaatgaaaacctggccgccaacttcctgctgagccagaactttgatgatgaatag

SEQ ID NO: 152423 - DNA, 597 bp, Artificial Sequence
  derived and/or modified sequence
atgctgacagagatcatgtccatgggctatgaaagagagcgggtggtggccgccctgcgggccagctacaacaacccccacagagctgtggagtacctgctgaccggcatccctggcagccctgagcctgagcacggctctgtgcaggagagccaggtgtctgagcagcctgccacagaagctgctggggagaaccccctggagttcctgcgggaccagccccagttccagaacatgaggcaggtgatccagcagaacccagccctgctgcctgccctgctgcagcagctgggccaggagaacccccagctgctgcagcagatcagccgccaccaggagcagttcatccagatgctgaatgagcccccaggagagctggccgacatcagtgatgtggagggggaggtgggcgccatcggggaggaggccccccagatgaactacatccaggtgaccccccaggagaaggaggccatcgagcggctgaaggccctgggcttccctgagagcctggtgatccaggcctactttgcctgtgagaagaatgaaaacctggccgccaacttcctgctgagccagaactttgatgatgaatag

SEQ ID NO: 152424 - DNA, 1092 bp, Artificial Sequence
  derived and/or modified sequence
atggccgtgaccatcaccctgaagaccctgcagcagcagaccttcaagattagaatggaaccagacgagacagtgaaagttctcaaggaaaagattgaagccgagaaagggagggatgcttttcctgtagcaggacagaagctgatctacgccggcaaaatcctgagcgatgatgtacccatccgtgactacaggatcgatgagaagaacttcgtggttgttatggtgacaaagaccaaggcaggacagggcacctccgctccccctgaagcgtctccgaccgctgccccagagagcagtacctcttttccccccgctccgacctcagggatgagccaccctcctccagctgctagggaagacaagagtccgtccgaggaatcagccccaaccacaagccctgaaagcgtgtccggaagtgtcccgagtagcggatcttctggcagagaggaagatgctgccagtacactggtgactggctccgagtatgaaaccatgctaacagaaatcatgtccatgggatacgagcgtgagagagttgtagccgccttaagagcaagctataacaatcctcatcgggcagtagaatacctattgacaggaattccaggcagccccgaaccagagcatgggtcggtacaggagtcccaggtgtcagaacagcctgcaactgaggccgcgggggagaatcccttggaatttcttcgcgatcagccgcaatttcagaacatgcgccaagtaattcagcagaatccagctctgcttcctgctctcctgcagcaactcggccaggagaaccctcagctgctgcaacaaataagcagacatcaggagcagttcattcagatgttgaacgagccgcctggtgagcttgctgatatcagcgacgtggagggagaggtaggggccattggggaggaagccccacaaatgaactatatacaggtaacaccgcaggagaaggaagccatcgagcgcctgaaagctctggggttccccgagagtttagtgatccaggcttactttgcttgtgagaagaatgagaatctggccgcaaattttctgctgtcccaaaattttgatgacgagtag

SEQ ID NO: 152425 - DNA, 597 bp, Artificial Sequence
  derived and/or modified sequence
atgctgaccgagatcatgagcatgggctacgagcgggagcgggtggttgccgctctcagagcctcctataacaacccacatcgcgcggtggagtatttactgactgggattccgggatcaccagagcctgagcacggatcagttcaggagagccaagtgagtgaacagcccgcaaccgaggcggctggcgaaaaccccttggaatttctgcgagaccagccacagttccagaacatgcggcaggtcattcaacagaacccagcgctgctgcctgcactcctgcagcaactgggccaagagaatccccagctcttgcagcaaattagtagacaccaggagcaattcattcagatgctgaatgaacctcctggtgagttagctgatatcagcgacgtggaaggtgaggttggagccattggcgaagaggcgcctcagatgaactatatacaggtaacaccacaagagaaggaagcaattgaaagactgaaggcgctgggattcccagaatcactagttattcaggcatactttgcttgcgaaaagaacgaaaatctcgcagctaacttcttgctgtctcagaatttcgatgatgaatag

SEQ ID NO: 152426 - DNA, 1092 bp, Artificial Sequence
  derived and/or modified sequence
atggccgtgaccatcaccctgaagaccctgcagcagcagaccttcaagatcagaatggaacctgacgaaaccgtcaaggtcctaaaggagaagattgaggcagagaaaggccgtgacgctttcccagttgcaggccagaagctgatatatgcaggcaaaatcctctcagatgacgtgcccatcagggactaccgcatcgatgaaaagaactttgttgtggtgatggttactaaaaccaaggccggacaagggacatcggctcctcccgaggcttcaccaactgctgccccagagtcgtccacttcattcccaccagcacctaccagtggcatgtctcacccaccaccggccgcccgagaagataagtctcccagcgaggaatccgctcctaccacatcccccgagtcggtgagcggatctgtgccctcctccggaagctcaggaagggaagaggacgccgcttccaccctcgttactggcagtgaatacgagacaatgcttaccgagatcatgagcatgggctatgaacgggaacgggtggtcgctgccctccgcgcctcctacaataaccctcatagggctgtggagtacctgctgactggaatccccggaagtcctgagcctgaacatggcagtgtgcaggagtctcaggtgtccgaacaacctgcaactgaggctgccggggaaaatccactggagtttttacgagaccagccccagtttcagaatatgcggcaggtcattcaacagaaccctgccctactaccagcgctgttacagcaactgggccaggaaaacccccagctgctgcagcagatttccagacaccaggagcaattcatccagatgttgaatgagccacctggcgagcttgcagacatatctgatgtcgagggggaagtgggagcgatcggagaagaggccccccagatgaactacattcaagtcaccccccaggaaaaagaagcgatcgagcggttaaaagctctgggcttccccgaaagcctcgttatacaggcttacttcgcctgtgagaaaaacgagaacctcgctgccaactttcttctaagtcaaaactttgacgacgagtag

SEQ ID NO: 152427 - DNA, 1092 bp, Artificial Sequence
  derived and/or modified sequence
atggctgtgacaattacactgaagaccctgcaacagcagacctttaaaatccgcatggaaccagacgagactgtcaaagtcctgaaagagaagatcgaagcggagaaaggacgggatgcgttccccgtggctggacaaaagctcatctacgccggaaagatcctatctgatgatgtcccaatccgggactatagaattgacgaaaaaaatttcgtggttgtcatggtgacaaaaacgaaggcagggcaaggaacttcagccccacccgaagcttcaccgacagcagcgccagagtcatctacctcattccccccagcccctacttccgggatgtctcatcctcctcccgctgctcgggaggataaatctccctccgaggaatccgcccctacaacgagccccgagtcagtgtccgggtctgtgccatccagtgggtcctccgggcgtgaggaagatgctgcatccacgctggtcacaggctcagaatacgaaacaatgctgaccgagatcatgtccatgggctatgagagggagagagtggtggcggctcttcgggcttcctataataacccccacagagctgtcgaatatctgcttacgggtattcccggaagtcctgaacctgagcatggatctgtgcaggagtctcaggtctctgagcaaccagctaccgaggccgcaggagagaacccccttgaattcctacgggatcagccgcaattccagaatatgagacaggttattcagcagaatcctgcacttctgcctgccttactgcagcagttggggcaggagaacccacagctgctgcagcagattagtcgacatcaggaacagttcatccagatgctcaacgaaccacctggggaactcgccgacatcagtgatgtagaaggagaggtcggagccataggggaagaggcaccgcaaatgaattatatccaggtgaccccgcaggaaaaggaggctattgagagactgaaggctctgggatttcctgagtccctcgtgatccaggcttactttgcatgtgaaaagaacgaaaacctggccgctaattttctgctgtcccagaattttgacgacgagtag

SEQ ID NO: 152428 - DNA, 597 bp, Artificial Sequence
  derived and/or modified sequence
atgttgacagagattatgtccatgggttatgagcgcgaacgcgtcgtggcggcactgcgcgcttcctacaacaatccccatcgggctgtggaatatcttctaacaggaatccctggttcacctgaacctgagcatggcagcgtccaggagagccaagttagcgagcagcctgccacagaggccgcaggcgagaatccgctcgaatttctccgcgaccagcctcagtttcagaatatgcgtcaggttatccagcagaacccggcattgctgcccgctctgctgcaacagctggggcaggaaaatccacagctcctgcagcagatttctagacaccaggaacaatttattcaaatgctgaacgagcctcccggagaacttgccgatattagcgacgtggagggggaagtcggcgctattggtgaagaggccccacagatgaactacattcaggtgactccacaggaaaaagaagccatcgagaggctgaaggcacttggttttcctgaatccctcgtaatacaggcctattttgcttgcgagaaaaacgagaacttggccgcaaatttcttgctctctcaaaattttgatgacgagtag

SEQ ID NO: 152429 - DNA, 1092 bp, Artificial Sequence
  derived and/or modified sequence
atggcagtcactataacgctgaaaacactgcaacagcagacattcaagatcaggatggaacctgatgagaccgtgaaggtgttgaaggaaaaaatcgaagcagaaaaaggaagagacgcgtttcccgtggccggtcaaaagctcatttacgccggtaaaatcctgagcgatgacgtgccaatacgcgactatcgtattgatgagaagaattttgtggtcgtgatggtcacaaagactaaagctggtcaggggacctccgcccctccagaggcgtcacctacggcagcccctgagagctccacttcctttccacccgctcccactagcgggatgtctcacccgccacccgcagccagggaagataagtctccctccgaagagagtgcccctaccacaagtcctgaaagcgtaagcggtagtgtgccaagcagtggaagcagtgggagagaagaagatgccgctagtacactcgtgactggctcagagtacgaaaccatgttgactgaaatcatgtctatgggatacgagagggaaagagtggtggcggcactgcgcgctagctacaataatccccatagggccgtagaatacctgcttaccgggatccccggaagccccgaacctgaacacggatccgttcaagagtcacaggtctcggaacaaccagccaccgaagcagctggagaaaaccccttggagtttcttagagaccaaccacagtttcagaatatgagacaggtaatccagcagaatcccgcacttctgccagccctcctgcagcaactcggtcaggagaatccgcaactgctgcagcagatctcccgtcatcaggagcagttcattcaaatgctgaatgaacctccgggtgagttagccgacatctcagatgtggaaggcgaggttggggctatcggggaggaagctccacagatgaattacatccaggtgacaccgcaagagaaggaagctatcgagaggctgaaggcgcttggttttcctgaatcattggtcatccaggcgtattttgcttgtgagaagaatgagaatctcgcggctaactttttactgagtcagaactttgatgacgaatag

SEQ ID NO: 152430 - DNA, 1786 bp, Artificial Sequence
  derived and/or modified sequence
ccggaagtggtcggcgcgcggcgcggcgcgcctgggcgctaagatggcggcggcgtgagttgcatgttgtgtgaggatcccggggccgccgcgtcgctcgggccccgccatggccgtcaccatcacgctcaaaacgctgcagcagcagaccttcaagatccgcatggagcctgacgagacggtgaaggtgctaaaggagaagatagaagctgagaagggtcgtgatgccttccccgtggctggacagaaactcatctatgccggcaagatcttgagtgacgatgtccctatcagggactatcgcatcgatgagaagaactttgtggtcgtcatggtgaccaagaccaaagccggccagggtacctcagcacccccagaggcctcacccacagctgccccagagtcctctacatccttcccgcctgcccccacctcaggcatgtcccatcccccacctgccgccagagaggacaagagcccatcagaggaatccgcccccacgacgtccccagagtctgtgtcaggctctgttccctcttcaggtagcagcgggcgagaggaagacgcggcctccacgctagtgacgggctctgagtatgagacgatgctgacggagatcatgtccatgggctatgagcgagagcgggtcgtggccgccctgagagccagctacaacaacccccaccgagccgtggagtatctgctcacgggaattcctgggagccccgagccggaacacggttctgtccaggagagccaggtatcggagcagccggccacggaagcagcaggagagaaccccctggagttcctgcgggaccagccccagttccagaacatgcggcaggtgattcagcagaaccctgcgctgctgcccgccctgctccagcagctgggccaggagaaccctcagcttttacagcaaatcagccggcaccaggagcagttcatccagatgctgaacgagccccctggggagctggcggacatctcagatgtggagggggaggtgggcgccataggagaggaggccccgcagatgaactacatccaggtgacgccgcaggagaaagaagctatagagaggttgaaggccctgggcttcccagagagcctggtcatccaggcctatttcgcgtgtgaaaaaaatgagaacttggctgccaacttcctcctgagtcagaactttgatgacgagtgatgccaggaagccaggccaccgaagcccccaccctacccttattccatgaaagttttataaaagaaaaaatatatatatattcatgtttatttaagaaatggaaaaaaaaatcaaaaatcttaaaaaaacaagcaaacagtccagcttcctgtcctcctaaagtggcccctgttcccatctcccgggccagacagctgtccccccgtcctcctccccagcccagcctgctcagagaagctggcaggactgggaggcgacagatgggcccctcttggcctctgtcccagctctctgcagccagacggaaaggcggctgcttgcctctccatcctccgaaaaacccctgaggacccccccccatcctcttctaggatgaggggaagctggagccccaactttgatcctccattggagtggcccaaatctttccatctagggcaagtcctgaaaggcccaaggccccctccccagtctggccttggcctccagcctggagaagggctaacatcagctcattgtcaaggccacccccaccccagaacagaaccgtgtctctgataaaggttttgaagtgaataaagtttt

SEQ ID NO: 152431 - DNA, 1350 bp, Artificial Sequence
  derived and/or modified sequence
gcgcggcgcggcgcgcctgggcgctaagatggcggcggcgtgagttgcatgttgtgtgaggatcccggggccgccgcgtcgctcgggccccgccatggccgtcaccatcacgctcaaaacgctgcagcagcagaccttcaagatccgcatggagcctgacgagacggtgaaggtgctaaaggagaagatagaagctgagaagggtcgtgatgccttccccgtggctggacagaaactcatctatgccggcaagatcttgagtgacgatgtccctatcagggactatcgcatcgatgagaagaactttgtggtcgtcatggtgaccaagaccaaagccggccagggtacctcagcacccccagaggcctcacccacagctgccccagagtcctctacatccttcccgcctgcccccacctcaggcatgtcccatcccccacctgccgccagagaggacaagagcccatcagaggaatccgcccccacgacgtccccagagtctgtgtcaggtgacgggctctgagtatgagacgatgctgacggagatcatgtccatgggctatgagcgagagcgggtcgtggccgccctgagagccagctacaacaacccccaccgagccgtggagtatctgctcacgggaattcctgggagccccgagccggaacacggttctgtccaggagagccaggtatcggagcagccggccacggaagcagcaggagagaaccccctggagttcctgcgggaccagccccagttccagaacatgcggcaggtgattcagcagaaccctgcgctgctgcccgccctgctccagcagctgggccaggagaaccctcagcttttacagcaaatcagccggcaccaggagcagttcatccagatgctgaacgagccccctggggagctggcggacatctcagatgtggagggggaggtgggcgccataggagaggaggccccgcagatgaactacatccaggtgacgccgcaggagaaagaagctatagagaggttgaaggccctgggcttcccagagagcctggtcatccaggcctatttcgcgtgtgaaaaaaatgagaacttggctgccaacttcctcctgagtcagaactttgatgacgagtgatgccaggaagccaggccaccgaagcccccaccctacccttattccatgaaagttttataaaagaaaaaatatatatatattcatgtttatttaagaaatggaaaaaaaaatcaaaaatcttaaaaaaacaagcaaacagtccagcttcctgtcctcctaaagtggcccctgttcccatctcccgggccagacagctgtccccccgtcctcctccccagcc

SEQ ID NO: 152432 - DNA, 1746 bp, Artificial Sequence
  derived and/or modified sequence
ggcggcgtgagttgcatgttgtgtgaggatcccggggccgccgcgtcgctcgggccccgccatggccgtcaccatcacgctcaaaacgctgcagcagcagaccttcaagatccgcatggagcctgacgagacggtgaaggtgctaaaggagaagatagaagctgagaagggtcgtgatgccttccccgtggctggacagaaactcatctatgccggcaagatcttgagtgacgatgtccctatcagggactatcgcatcgatgagaagaactttgtggtcgtcatggtgaccaagaccaaagccggccagggtacctcagcacccccagaggcctcacccacagctgccccagagtcctctacatccttcccgcctgcccccacctcaggcatgtcccatcccccacctgccgccagagaggacaagagcccatcagaggaatccgcccccacgacgtccccagagtctgtgtcaggctctgttccctcttcaggtagcagcgggcgagaggaagacgcggcctccacgctagtgacgggctctgagtatgagacgatgctgacggagatcatgtccatgggctatgagcgagagcgggtcgtggccgccctgagagccagctacaacaacccccaccgagccgtggagtatctgctcacgggaattcctgggagccccgagccggaacacggttctgtccaggagagccaggtatcggagcagccggccacggaagcagcaggagagaaccccctggagttcctgcgggaccagccccagttccagaacatgcggcaggtgattcagcagaaccctgcgctgctgcccgccctgctccagcagctgggccaggagaaccctcagcttttacagcaaatcagccggcaccaggagcagttcatccagatgctgaacgagccccctggggagctggcggacatctcagatgtggagggggaggtgggcgccataggagaggaggccccgcagatgaactacatccaggtgacgccgcaggagaaagaagctatagagaggttgaaggccctgggcttcccagagagcctggtcatccaggcctatttcgcgtgtgaaaaaaatgagaacttggctgccaacttcctcctgagtcagaactttgatgacgagtgatgccaggaagccaggccaccgaagcccccaccctacccttattccatgaaagttttataaaagaaaaaatatatatatattcatgtttatttaagaaatggaaaaaaaaatcaaaaatcttaaaaaaacaagcaaacagtccagcttcctgtcctcctaaagtggcccctgttcccatctcccgggccagacagctgtccccccgtcctcctccccagcccagcctgctcagagaagctggcaggactgggaggcgacagatgggcccctcttggcctctgtcccagctctctgcagccagacggaaaggcggctgcttgcctctccatcctccgaaaaacccctgaggacccccccccatcctcttctaggatgaggggaagctggagccccaactttgatcctccattggagtggcccaaatctttccatctagggcaagtcctgaaaggcccaaggccccctccccagtctggccttggcctccagcctggagaagggctaacatcagctcattgtcaaggccacccccaccccagaacagaaccgtgtctctgataaaggttttgaagtgaataaagttttaaaaacta

SEQ ID NO: 152433 - protein, 412 aa, Artificial Sequence
  derived and/or modified sequence
MGQDQTKQQIEKGLQLYQSNQTEKALQVWTKVLEKSSDLMGRFRVLGCLVTAHSEMGRYKEMLKFAVVQIDTARELEDADFLLESYLNLARSNEKLCEFHKTISYCKTCLGLPGTRAGAQLGGQVSLSMGNAFLGLSVFQKALESFEKALRYAHNNDDAMLECRVCCSLGSFYAQVKDYEKALFFPCKAAELVNNYGKGWSLKYRAMSQYHMAVAYRLLGRLGSAMECCEESMKIALQHGDRPLQALCLLCFADIHRSRGDLETAFPRYDSAMSIMTEIGNRLGQVQALLGVAKCWVARKALDKALDAIERAQDLAEEVGNKLSQLKLHCLSESIYRSKGLQRELRAHVVRFHECVEETELYCGLCGESIGEKNSRLQALPCSHIFHLRCLQNNGTRSCPNCRRSSMKPGFV

SEQ ID NO: 152434 - DNA, 1239 bp, Artificial Sequence
  derived and/or modified sequence
atgggccaggaccaaacaaagcagcagatagagaagggcttgcagctttaccaatccaatcaaacggagaaggcgcttcaagtgtggaccaaagttctggagaagtcctctgatttaatgggccgcttccgagtcctgggctgccttgtgactgcacacagcgaaatggggcggtacaaggaaatgctgaagttcgcagttgttcagattgacactgccagggaattggaggacgcagatttcctgctagagtcttaccttaacctggcaaggtccaatgaaaagttatgtgaattccataagaccatctcatactgcaagacttgtctaggtttgccaggcacaagggcaggggcacagcttggcgggcaagtttccctgtctatgggaaacgcatttctaggcttgagcgtgttccagaaggcccttgaatccttcgagaaagccctgcgatatgcccataataatgacgacgctatgttggagtgtcgagtttgctgcagcctgggatcattctatgcacaggtgaaggactatgagaaggctctattttttccctgcaaagcagcagaactggtcaacaattacgggaagggctggagcctgaagtaccgggctatgagtcaataccacatggcagtggcctataggcttctgggacggcttgggtccgccatggagtgttgcgaagaatccatgaagatagcacttcagcacggtgacaggccgctgcaggccctctgcctgttgtgtttcgccgacattcaccgttctcggggagatctcgaaactgcatttccacgatatgactctgccatgtctattatgacggagattggaaatagactgggccaggtgcaggccctcctgggagtcgctaaatgctgggtggctcggaaggctctggataaggcccttgacgccattgaacgggcccaagacctggcagaggaagtggggaacaagttatcccagcttaagctacactgcctaagcgagagcatctatcgttctaaagggctgcagagagagcttagagcccacgtggtgcgatttcacgagtgtgtagaggagactgaactctattgtggtctctgcggagaaagtattggagagaagaactctaggttgcaggccctgccatgcagccatattttccatctacggtgcctgcagaataatgggacacgctcttgtcctaattgtcgaagatccagcatgaagccaggatttgtgtag

SEQ ID NO: 152435 - DNA, 1239 bp, Artificial Sequence
  derived and/or modified sequence
atgggccaggaccagaccaagcagcagatcgagaagggcctgcagctgtaccagagcaaccagacagagaaggccctgcaggtgtggaccaaggtgctggagaagagcagtgacctgatgggccgcttccgggtgctgggctgcctggtgacagcccacagcgagatgggccgctacaaggagatgctgaagtttgctgtggtgcagattgacacagcccgggagctggaggatgctgacttcctgctggagagctacctgaacctggcccggagcaatgagaagctgtgtgagttccacaagaccatctcctactgcaagacctgcctgggcctgcccggcaccagggctggggcccagctgggcggccaggtgtccctgtccatgggaaatgccttcctgggcctgtctgtgttccagaaggccctggagagctttgagaaggccctgcgctatgcccacaacaatgatgatgccatgctggagtgccgggtgtgctgcagcctgggcagcttctacgcccaggtgaaggactatgagaaggccctcttcttcccctgcaaggctgctgagctggtgaacaactacggcaagggctggagcctgaagtaccgggccatgagccagtaccacatggctgtggcctaccgcctgctgggccgcctgggcagcgccatggagtgctgtgaggagagcatgaagatcgccctgcagcacggggaccggcccctgcaggccctgtgcctgctgtgctttgctgacatccacaggagcagaggagacctggagacagccttccccaggtatgattctgccatgagcatcatgacagaaattggcaaccggctgggccaggtgcaggccctgctgggcgtggccaagtgctgggtggccaggaaggccctggacaaggccctggatgccatcgagcgggcccaggacctggccgaggaggtgggcaacaagctgagccagctgaagctgcactgcctgtctgagagcatctaccgcagcaagggcctgcagcgggagctgcgggcccacgtggtgcgcttccatgaatgtgtggaggagacagagctgtactgcggcctgtgtggggagagcatcggggagaagaacagccggctgcaggccctgccctgcagccacatcttccacctgcgctgcctgcagaacaacggcaccaggagctgccccaactgcagaagaagctccatgaagccaggctttgtgtag

SEQ ID NO: 152436 - DNA, 1239 bp, Artificial Sequence
  derived and/or modified sequence
atgggccaggaccagaccaagcagcagatcgagaagggcctgcagctgtaccaatcaaatcagactgaaaaggctctccaggtgtggaccaaagtgctcgaaaagagtagcgatctcatgggacggtttcgcgtgctaggttgtctggtgactgcccacagcgagatgggccgatacaaagagatgctcaagtttgccgtggtgcagatcgacacggcccgcgagctggaagacgccgactttctcttagaaagctatctgaacctcgctcggtctaacgaaaagttgtgcgaatttcacaaaaccatttcatattgtaagacatgcctcggcctgcccgggacgagagccggggcccaactcgggggacaggtttctctgtcaatgggtaatgccttcttgggcttgtccgtgttccagaaagcgctggagtctttcgaaaaggcgctcaggtacgcccacaacaatgatgacgccatgttggaatgtcgcgtttgctgtagcctaggctccttctacgcccaggtgaaggattacgagaaagctcttttttttccatgtaaggcagcagaactcgttaacaattacggcaaggggtggagtctgaagtatagggctatgtctcagtaccatatggctgtggcgtatagactactgggaaggttgggtagtgctatggagtgttgcgaagagagcatgaaaatcgcattgcaacatggagaccggcccctgcaggctctctgcctgctatgcttcgctgatatccaccgttctagaggagaccttgaaactgccttccctagatatgattctgccatgagcatcatgacagagatcggcaatcggctggggcaggtgcaggccctgcttggcgtggccaagtgctgggttgcccgtaaggccctcgataaagcgctggacgctatagagagggctcaggacctggccgaagaggttgggaacaaattgtcccagctgaagcttcattgcttaagtgagagcatctataggtctaaggggcttcagagagaattgcgagcacatgtggtaagattccatgagtgcgttgaagagaccgaactgtactgtggcttgtgcggggagtcaataggagagaaaaacagccgactgcaagctcttccttgcagccacatttttcacctgagatgtctgcagaataatggcacaaggagttgccctaactgccgccggtcatcaatgaagcctggtttcgtctag

SEQ ID NO: 152437 - DNA, 1239 bp, Artificial Sequence
  derived and/or modified sequence
atgggtcaagatcaaaccaaacagcagatcgaaaaggggctgcagctgtatcagtcgaaccagactgaaaaggctctccaggtctggacaaaagttctcgaaaagtcctccgatctgatggggagattcagggtgctggggtgcctggtgaccgctcattctgaaatgggcagatataaagaaatgctgaagtttgcagttgttcagattgacacagcacgtgaactggaggatgctgactttctgctggaaagttacctcaacttagccaggtctaatgaaaaattgtgtgagttccacaagacaatttcttactgcaaaacatgcctcggcctgcctgggacacgagcaggggcacagctcggcggacaagtttctctttcaatgggtaatgccttcctgggcttaagtgtcttccagaaggccctggagtcattcgaaaaggctctccgttacgctcacaataacgatgacgccatgctagaatgtcgtgtgtgttgtagcctgggtagcttctacgcgcaggtaaaggactatgagaaggctctcttcttcccatgcaaggccgctgaactggtcaataattatggtaagggctggtcgctcaagtatcgcgcaatgagccaataccatatggccgtggcctaccggttactcggcaggttgggaagcgctatggaatgttgcgaggaatctatgaagatcgccctgcagcatggggatcggcctcttcaggctctttgcctcctgtgttttgctgacatacaccggtctcgcggagacctggaaacggcctttcccaggtacgacagcgcgatgtccataatgactgaaattgggaatagattgggccaagtgcaggcacttctcggcgtggcgaaatgttgggttgctcgcaaggcactcgataaggccctcgatgccattgagcgagcccaggatctggccgaggaagtcggtaataagctctctcaactcaagcttcactgccttagtgaaagtatatatcggtccaaaggacttcagagggaactgcgagcccatgtggttcggttccacgaatgtgttgaggaaaccgagctttattgtggcctatgcggggagagtatcggcgagaagaatagccgtctgcaagccctgccatgctcgcatatattccaccttcggtgtcttcagaataacggcacccggtcatgtcctaattgtcggcgatctagcatgaagccaggattcgtatag

SEQ ID NO: 152438 - DNA, 1671 bp, Artificial Sequence
  derived and/or modified sequence
cccaactggcagcgacagctgcagacgggctgaaccagctttgttcccagggtggcgcctgctctccatccaggccccattccggctcccacccgacgctgcttttgttcccacgtttcggggggcagctggcactgtgattcctgccccatgagtgcctagaggcacggagccaccagggatcaccccacgtgggacacagggcttggggaggatggggcaggaccagaccaagcagcagatcgagaaggggctccagctgtaccagtccaaccagacagagaaggcattgcaggtgtggacaaaggtgctggagaagagctcggacctcatggggcgcttccgcgtgctgggctgcctggtcacagcccactcggagatgggccgctacaaggagatgctgaagttcgctgtggtccagatcgacacggcccgggagctggaggatgccgacttcctcctggagagctacctgaacctggcacgcagcaacgagaagctgtgcgagtttcacaagaccatctcctactgcaagacctgccttgggctgcctggtaccagggcaggtgcccagctcggaggccaggtcagcctgagcatgggcaatgccttcctgggcctcagcgtcttccagaaggccctggagagcttcgagaaggccctgcgctatgcccacaacaatgatgacgccatgctcgagtgccgcgtgtgctgcagcctgggcagcttctatgcccaggtcaaggactacgagaaagccctgttcttcccctgcaaggcggcagagcttgtcaacaactatggcaaaggctggagcctgaagtaccgggccatgagccagtaccacatggccgtggcctatcgcctgctgggccgcctgggcagtgccatggagtgttgtgaggagtctatgaagatcgcgctgcagcacggggaccggccactgcaggcgctctgcctgctctgcttcgctgacatccaccggagccgtggggacctggagacagccttccccaggtacgactccgccatgagcatcatgaccgagatcggaaaccgcctggggcaggtgcaggcgctgctgggtgtggccaagtgctgggtggccaggaaggcgctggacaaggctctggatgccatcgagagagcccaggatctggccgaggaggtggggaacaagctgagccagctcaagctgcactgtctgagcgagagcatttaccgcagcaaagggctgcagcgggaactgcgggcgcacgttgtgaggttccacgagtgcgtggaggagacggagctctactgcggcctgtgcggcgagtccataggcgagaagaacagccggctgcaggccctaccttgctcccacatcttccacctcaggtgcctgcagaacaacgggacccggagctgtcccaactgccgccgctcatccatgaagcctggctttgtatgactcctggcagcaggcgtgggcttcctcctcgccactcctgctctttctccactgcacgccagaggcccatttactcctggggcagctgccaggtcgtcctcaccatagccaaggccttggggcctgcccagggctgctcccctgggcccagctcccctccctgcctctttgtactttgctctttatagaaaaataaactgtttgtacctggtcccagg

SEQ ID NO: 152439 - DNA, 1239 bp, Artificial Sequence
  derived and/or modified sequence
atgggccaggaccagaccaagcagcagatcgagaagggcctgcagctgtaccagagcaaccagaccgagaaggccctgcaggtgtggaccaaggtgctggagaagagcagcgacctgatgggcagattcagagtgctgggctgcctggtgaccgcccacagcgagatgggcagatacaaggagatgctgaagttcgccgtggtgcagatcgacaccgccagagagctggaggacgccgacttcctgctggagagctacctgaacctggccagaagcaacgagaagctgtgcgagttccacaagaccatcagctactgcaagacctgcctgggcctgcccggcaccagagccggcgcccagctgggcggccaggtgagcctgagcatgggcaacgccttcctgggcctgagcgtgttccagaaggccctggagagcttcgagaaggccctgagatacgcccacaacaacgacgacgccatgctggagtgcagagtgtgctgcagcctgggcagcttctacgcccaggtgaaggactacgagaaggccctgttcttcccctgcaaggccgccgagctggtgaacaactacggcaagggctggagcctgaagtacagagccatgagccagtaccacatggccgtggcctacagactgctgggcagactgggcagcgccatggagtgctgcgaggagagcatgaagatcgccctgcagcacggcgacagacccctgcaggccctgtgcctgctgtgcttcgccgacatccacagaagcagaggcgacctggagaccgccttccccagatacgacagcgccatgagcatcatgaccgagatcggcaacagactgggccaggtgcaggccctgctgggcgtggccaagtgctgggtggccagaaaggccctggacaaggccctggacgccatcgagagagcccaggacctggccgaggaggtgggcaacaagctgagccagctgaagctgcactgcctgagcgagagcatctacagaagcaagggcctgcagagagagctgagagcccacgtggtgagattccacgagtgcgtggaggagaccgagctgtactgcggcctgtgcggcgagagcatcggcgagaagaacagcagactgcaggccctgccctgcagccacatcttccacctgagatgcctgcagaacaacggcaccagaagctgccccaactgcagaagaagcagcatgaagcccggcttcgtgtag

SEQ ID NO: 152440 - protein, 538 aa, Artificial Sequence
  derived and/or modified sequence
MNLELLESFGQNYPEEADGTLDCISMALTCTFNRWGTLLAVGCNDGRIVIWDFLTRGIAKIISAHIHPVCSLCWSRDGHKLVSASTDNIVSQWDVLSGDCDQRFRFPSPILKVQYHPRDQNKVLVCPMKSAPVMLTLSDSKHVVLPVDDDSDLNVVASFDRRGEYIYTGNAKGKILVLKTDSQDLVASFRVTTGTSNTTAIKSIEFARKGSCFLINTADRIIRVYDGREILTCGRDGEPEPMQKLQDLVNRTPWKKCCFSGDGEYIVAGSARQHALYIWEKSIGNLVKILHGTRGELLLDVAWHPVRPIIASISSGVVSIWAQNQVENWSAFAPDFKELDENVEYEERESEFDIEDEDKSEPEQTGADAAEDEEVDVTSVDPIAAFCSSDEELEDSKALLYLPIAPEVEDPEENPYGPPPDAVQTSLMDEGASSEKKRQSSADGSQPPKKKPKTTNIELQGVPNDEVHPLLGVKGDGKSKKKQAGRPKGSKGKEKDSPFKPKLYKGDRGLPLEGSAKGKVQAELSQPLTAGGAISELL

SEQ ID NO: 152441 - DNA, 3683 bp, Artificial Sequence
  derived and/or modified sequence
aaggccgaaagtcttcggagcttgcgccagtctcttcgcggcgtccaccacttagacgcaagttgctgaagccggccggggagaaggtgttgttgccggagctgagaccgggcggccacagtccgcagggatgaacctcgagttgctggagtcctttgggcagaactatccagaggaagctgatggaactttggattgtatcagcatggctttgacttgcacctttaacaggtggggcacactgcttgcagttggctgtaatgatggccgaattgtcatctgggatttcttgacaagaggcattgctaaaataattagtgcacacatccatccagtgtgttctttatgctggagccgagatggtcataaactcgtgagtgcttccactgataacatagtgtcacagtgggatgttctttcaggcgactgtgaccagaggtttcgattcccttcacccatcttaaaagtccaatatcatccacgagatcagaacaaggttctcgtgtgtcccatgaaatctgctcctgtcatgttgaccctttcagattccaaacatgttgttctgccggtggacgatgactccgatttgaacgttgtggcatcttttgataggcgaggggaatatatttatacgggaaacgcaaaaggcaagattttggtcctaaaaacagattctcaggatcttgttgcttccttcagagtgacaactggaacaagcaataccacagccattaagtcaattgagtttgcccggaaggggagttgctttttaattaacacggcagatcgaataatcagagtttatgatggcagagaaatcttaacatgtggaagagatggagagcctgaacctatgcagaaattgcaggatttggtgaataggaccccatggaagaaatgttgtttctctggggatggggaatacatcgtggcaggttctgcccggcagcatgccctgtacatctgggagaagagcattggcaacctggtgaagattctccatgggacgagaggagaactcctcttggatgtagcttggcatcctgttcgacccatcatagcatccatttccagtggagtggtatctatctgggcacagaatcaagtagaaaactggagtgcatttgcaccagacttcaaagaattggatgaaaatgtagaatacgaagaaagggaatcagagtttgatattgaagatgaagataagagtgagcctgagcagacaggggctgatgctgcagaagatgaggaagtggatgtcaccagcgtggaccctattgctgccttctgtagcagtgatgaagagctggaagattcaaaggctctattgtatttacccattgcccctgaggtagaagacccagaagaaaatccttacggccccccaccggatgcagtccaaacctccttgatggatgaaggggctagttcagagaagaagaggcagtcctcagcagatgggtcccagccacctaagaagaaacccaaaacaaccaatatagaacttcaaggagtaccaaatgatgaagtccatccactactgggtgtgaagggggatggcaaatccaagaagaagcaagcaggccggcctaaaggatcaaaaggtaaagagaaagattctccatttaaaccgaaactctacaaaggggacagaggtttacctctggaaggatcagcgaagggtaaagtgcaggcggaactcagccagcccttgacagcaggaggagcaatctcagaactgttatgaagaccttcgaagttcttcattctttctcactttgccatcatgtggcctctggacactgtggtcagtcatttgaaaattgactttaatttaaaacaaaggcctgtgcctcccacccaggaggtgggagggtgaattttatgtttaaatgaagaagtgaattatggaagaagagtatacgaccttcccttccctttcaagcataagtccaaatagactctcaggaatgaagatttgtgaagacatcagataggaattttgactcatttaaactttgatgcttagttatgttgctggagaaaagatacttatgttttgctcatctaacttcattgtacccagcgtcattttgacatgtcatttcctatctcccatttgccttcggtcctcaatgcatgtctttgagtgacttcttatctgaaattttgctactggtatcctaggaaagcttttgttggatactctcattttaaacttctcctctccccagatacctcctatatttccatattgtgtgcaaaggatgggcagaaaagaaagtgcttgaaagatttcaaattttcagaaagggaacaacgaaggccctctcttcctctcataccacgttttgctcaagaagctgggctgtaacaattcagggttttcccttgttttcctctcattgcatgtttccctccaatattggttcattgtcatcaatcatggtttttgaagatagctagttttatccatctccagcaaagaatcatcaatagtttatattgctttacctgtgctggcttccagagatggaaacaaacccaggtgtctctcaacaagctacttttttactggggtgggggaatctatgcaaggagtaaagtaaaaccatccagaatcaaagcagcaaccacatagttcaaatcaaagatcaaggtgaattttttgtatcactgcctgtggaaatctatcctcatcagtcattgcatttttccctgcctatacctgtgctcctttttcttactgtgttttcagtcacttcctttctgtgaaaggttgcttagctttttttttgacatttgttgttctttataaaaataacagattggatagatgtgtacatttggtgtttgaaattctctgaaaatcccattaggaaaccaggtgtgaaaagggctcagtagcttctctgagtggcgtttttagctgactggaagtgcttaatctggatcgtcttttttttttttttttttttttcaatattttaaaaggagaatttaaatactgtgcttactgtgaaatatatcagttggtgagccgggcgtggtgggtcacgcctgtaatcccagcactttgggaggccaaggcgggttgatcacccgaggtcaggagttcaagaccagcctggccaacgtggtgaaagcctgtatctattaaaagacaaaaattagctgggcgtggtagtacatgcctgtaatcccagctacactggaggctgagtcaggagaatcacttgaacgtgggaggcagaggttgcagtgagtggagatcgcaccactgccctccagcctaggtgacagaatgagactctatctcaaaaaaaaaaaaaaaatgatatcagttggtggatgctcctataggtagccaaacacattgattacctgttagattttaggatagaaatcaaagtagagcacgtcagcaagagcctctttgtctcactccatcatttaaaaccagtatattcagtagttgaagaaagagctctccctgagtcagttgcaaaacgtctatatttttagatgccactacttttttcttaaatattcattttgagactgtcatgagttagaccagtggttgagattagtagatggctcactagacatgtttttgttttgcagacattatatccattccagtcctctgcactgtacactgcagcagtgtgcaaactatg

SEQ ID NO: 152442 - DNA, 1617 bp, Artificial Sequence
  derived and/or modified sequence
atgaacctggaattgttggagtcatttggccaaaattatcctgaggaagctgatggcaccctggactgcatctcaatggccctgacatgcaccttcaacaggtggggcacccttctagctgtgggatgtaatgacgggcgcatcgtgatctgggactttcttactaggggaatcgcaaaaatcattagcgcccatattcatccggtttgtagcctctgttggagtagggatggccataaactggtttcagcctctaccgacaacatcgtatcccagtgggacgtgctctcaggcgattgcgaccagcgattccgctttccatcgccaattcttaaggtgcaatatcacccgagggatcagaataaggtccttgtctgcccgatgaaaagtgcccccgtgatgttgacactgagtgactctaaacatgtggtgctcccggtcgatgatgatagcgatcttaacgttgtggcctcctttgatagaagaggggagtatatatacacaggaaatgctaaaggtaagatcctggtccttaagacagattcccaagatttagtggcttccttcagggtgacgactggaaccagtaacaccacagccatcaaatcgatcgagtttgcccggaaaggctcatgtttcctgataaatactgccgaccgcatcattcgggtgtacgatgggcgtgagatcttgacgtgcgggcgggatggtgagccagagcctatgcaaaaactgcaggacctggttaacaggacaccttggaaaaagtgctgtttctcaggcgacggggaatacatagttgcagggtcagcacggcagcatgccctttacatctgggaaaagtcaattggtaacctcgtgaaaatcctccatggtactcggggagagttactgctcgatgtggcatggcatcccgtaaggccaatcattgctagtatttccagcggagtcgtctcaatttgggcacaaaatcaagttgaaaactggtccgcatttgcaccagatttcaaagagctggacgaaaatgtggagtacgaggagcgtgagtccgagtttgacatcgaggacgaagataaaagtgagccagagcaaaccggcgcagacgccgccgaggacgaggaggtggacgtcactagcgtcgaccctattgcagcattttgttcaagtgatgaagaattggaggattccaaggcgctcctgtacctgcctattgcccccgaggtggaggatcctgaggagaatccctatggaccacctccggatgccgtccaaacctccttgatggatgaaggtgcttcatccgaaaaaaaacgccagtccagcgctgatgggtcccagccacctaaaaagaagcccaaaacaacaaatattgaactacagggcgtgcctaatgatgaagtgcatccactgttgggcgtgaagggcgacggcaaatcaaagaagaaacaggctggcaggcctaagggctcaaaagggaaggaaaaggattctccattcaaacccaagctgtataagggggatcggggactgccccttgagggatccgcgaaggggaaggtgcaggcggagctcagtcagcctttgactgcaggtggcgccatctctgagcttctgtag

SEQ ID NO: 152443 - DNA, 1617 bp, Artificial Sequence
  derived and/or modified sequence
atgaacctggagctgctggagagctttggccagaactacccagaggaggctgatggcaccctggactgcatctccatggccctgacctgcaccttcaaccgctggggcaccctgctggccgtgggctgcaatgatggccgcatcgtcatctgggacttcctgacccggggcatcgccaagatcatcagcgcccacatccaccctgtgtgcagcctgtgctggagcagagatggccacaagctggtgtctgccagcacagacaacatcgtgtcccagtgggatgtgctgagcggggactgtgaccagcgcttccgcttccccagccccatcctgaaggtgcagtaccacccccgggaccagaacaaggtgctggtgtgccccatgaagagcgcccctgtgatgctgaccctgagtgacagcaagcacgtggtgctgcctgtggatgatgacagcgacctgaatgtggtggccagctttgacagaagaggagagtacatctacacaggaaatgccaagggcaagatcctggtgctgaagacagacagccaggacctggtggccagcttccgggtgaccaccggcaccagcaacaccacagccatcaagagcattgaatttgccaggaagggcagctgcttcctgatcaacacagctgaccgcatcatccgggtgtatgatggccgggagatcctgacctgtggcagagatggagagcctgagcccatgcagaagctgcaggacctggtgaacagaacaccctggaagaagtgctgcttctctggagatggagagtacatcgtggccggcagcgcccggcagcacgccctgtacatctgggagaagagcatcggcaacctggtgaagatcctgcacggcaccagaggagagctgctgctggatgtggcctggcaccctgtgcggcccatcatcgccagcatcagcagtggagtggtgtccatctgggcccagaaccaggtggagaactggagcgcctttgccccagacttcaaggagctggatgaaaatgtggagtatgaggagcgggagagcgagtttgatattgaagatgaggacaagtctgagcctgagcagacaggagcagatgctgctgaagatgaggaggtggatgtgacctctgtggaccccatcgccgccttctgcagcagtgatgaggagctggaggacagcaaggccctgctgtacctgcccatcgcccctgaggtggaggaccctgaggagaacccctacggccccccaccagatgctgtgcagaccagcctgatggatgaaggagccagcagcgagaagaagaggcagagcagcgcagatggcagccagccccccaagaagaagcccaagaccaccaacatcgagctgcagggcgtgcccaatgatgaggtgcaccccctgctgggcgtgaagggagatggcaagagcaagaagaagcaggccggccggcccaagggcagcaagggcaaggagaaggacagccccttcaagcccaagctgtacaagggggaccggggcctgcccctggagggcagcgccaagggcaaggtgcaggccgagctgagccagcccctgacagctgggggcgccatcagcgagctgctgtag

SEQ ID NO: 152444 - DNA, 1617 bp, Artificial Sequence
  derived and/or modified sequence
atgaacctggagctgctggagagcttcggccagaactaccccgaggaggcagacggtaccctggactgcatttccatggccctgacctgtaccttcaaccgctggggcactctactcgccgttggatgcaacgacgggcggattgttatatgggacttcttgactcgggggatcgcaaagattatttccgcgcatatccatccggtttgtagcttgtgctggtcccgcgatggtcataaacttgtctccgccagtacagataacatcgtctcacagtgggacgtcctgagtggcgattgcgaccagaggtttcgattcccctccccgatcttgaaggtgcagtaccatccaagagaccagaataaggtgttggtctgtccaatgaaatccgctccagtgatgttgactttgagcgattcaaagcacgtggttttgcctgtggacgatgatagtgacctcaacgttgtggcgagcttcgatagacgaggggagtatatctatacgggcaatgccaaaggcaaaattctggtgctcaagacagactctcaggacctggttgccagtttcagagttactacagggacgtcaaataccacagccatcaagagcatcgaattcgctcggaagggcagctgctttctgataaataccgccgacaggatcataagggtgtacgacgggagggagattctgacatgtggaagagacggggaaccagagcctatgcagaagctccaggatttagtcaacaggacgccgtggaaaaaatgctgtttctcgggtgacggggagtacatcgtggccggctccgcgcggcagcacgcactttacatctgggaaaagagtattggcaacctcgtgaaaattctgcacgggacacggggggagctgctcctggacgttgcatggcaccctgtgaggccaatcattgccagcatcagcagcggggtggtgtccatctgggctcagaatcaagttgagaattggtcggcctttgctcctgacttcaaagagctggacgaaaacgtggaatatgaggaaagagagtccgaatttgacatcgaagatgaagacaagagtgagcccgaacagacaggcgccgacgccgctgaggacgaagaagtcgacgttacttctgtggaccccatagctgccttttgcagctcggacgaggaactggaggactctaaagccctgctgtacctgcctatcgctcccgaagtggaggatcccgaagaaaatccttacggtcctccacccgacgctgttcagacatcactaatggacgagggggcgtcttcggaaaagaagcggcaatcttcagcagatgggtcccagccccctaagaagaaaccaaaaacaacaaatatagaactgcagggtgtgcctaatgatgaggtacatcctctactcggcgtgaagggtgatggaaaatctaagaaaaaacaggccggcagacccaagggatccaaagggaaagaaaaggacagtcctttcaaaccaaagctctacaagggtgacaggggcttacccctcgaaggctctgcaaagggcaaggtgcaggcagaattgtcgcagccattaaccgcggggggtgccatctccgaacttttgtag

SEQ ID NO: 152445 - DNA, 1617 bp, Artificial Sequence
  derived and/or modified sequence
atgaatctggagctcttggaaagcttcggccagaactaccctgaagaagccgacggcactctggactgcattagcatggcccttacctgtacgtttaatagatggggcacgctactggctgtgggctgtaatgatggcagaatcgtgatttgggacttcctcaccagaggaatcgctaagatcatttcagcccacatccatccagtttgctccctctgctggtctcgagacggtcacaaacttgtgagtgcctccaccgacaatattgtttcacagtgggacgtgctgtccggagattgcgatcagcgctttcggttccccagcccgattttgaaggtgcagtaccatccaagggaccagaataaagtgctggtttgtccaatgaagagcgccccagtgatgctgacactgtctgacagtaagcacgtggtacttccagttgatgacgactccgatttgaatgtggtagcttcctttgaccgtcggggagagtatatctatactggcaacgcgaaagggaagatcctggtcctcaagaccgactcccaggacttggttgcatcatttagggtcaccactggaacatcgaacaccactgccattaaatccatcgagttcgccaggaagggctcttgttttttgataaatactgcagatcgcatcatccgagtgtacgatggtcgcgagattctgacatgtggacgagacggagaaccggaacctatgcaaaaactgcaggacctggttaaccgaacaccctggaaaaaatgttgcttctcgggcgatggggaatatatcgtggcgggaagcgccaggcagcacgcactgtatatctgggagaagtctatcgggaacttggtgaagatcctgcacggaacaagaggagagctgttgcttgatgttgcatggcacccggtgcgcccaattatcgcatcaatctcatctggtgtcgtctctatatgggcccagaatcaggtggagaattggtccgccttcgcacccgatttcaaagagttggacgagaacgtcgaatatgaggagcgtgaatccgaattcgacattgaggacgaggacaaatcagaaccagagcagactggtgcagatgcggcagaagacgaggaggtggacgtaacctctgtggatcctattgcagcgttttgttcctcagacgaagagctggaggattcaaaagcacttctctatctgccaatcgcaccagaagtggaagacccagaggaaaacccatatgggccaccacccgacgcagtgcagactagcttgatggacgaaggagcttcatccgaaaaaaaacggcagtccagcgccgacggctctcagccacccaaaaagaagccaaagacaaccaacatagaactccagggtgtccctaatgatgaagtgcatccattactgggtgtgaaaggtgacggcaagagtaagaaaaagcaagccggtagacccaagggatccaagggaaaggagaaagactctcctttcaagcctaagttgtataagggagatcgcggactccccctggaaggctctgctaaaggtaaggtgcaagcagagctgtctcaacctctcactgccggtggggctatatctgagttgctttag

SEQ ID NO: 152446 - DNA, 4404 bp, Artificial Sequence
  derived and/or modified sequence
gcggggccttctaaggccgaaagtcttcggagcttgcgccagtctcttcgcggcgtccaccacttagacgcaagttgctgaagccggccggggagaaggtgttgttgccggagctgagaccgggcggccacagtccgcagggatgaacctcgagttgctggagtcctttgggcagaactatccagaggaagctgatggaactttggattgtatcagcatggctttgacttgcacctttaacaggtggggcacactgcttgcagttggctgtaatgatggccgaattgtcatctgggatttcttgacaagaggcattgctaaaataattagtgcacacatccatccagtgtgttctttatgctggagccgagatggtcataaactcgtgagtgcttccactgataacatagtgtcacagtgggatgttctttcaggcgactgtgaccagaggtttcgattcccttcacccatcttaaaagtccaatatcatccacgagatcagaacaaggttctcgtgtgtcccatgaaatctgctcctgtcatgttgaccctttcagattccaaacatgttgttctgccggtggacgatgactccgatttgaacgttgtggcatcttttgataggcgaggggaatatatttatacgggaaacgcaaaaggcaagattttggtcctaaaaacagattctcaggatcttgttgcttccttcagagtgacaactggaacaagcaataccacagccattaagtcaattgagtttgcccggaaggggagttgctttttaattaacacggcagatcgaataatcagagtttatgatggcagagaaatcttaacatgtggaagagatggagagcctgaacctatgcagaaattgcaggatttggtgaataggaccccatggaagaaatgttgtttctctggggatggggaatacatcgtggcaggttctgcccggcagcatgccctgtacatctgggagaagagcattggcaacctggtgaagattctccatgggacgagaggagaactcctcttggatgtagcttggcatcctgttcgacccatcatagcatccatttccagtggagtggtatctatctgggcacagaatcaagtagaaaactggagtgcatttgcaccagacttcaaagaattggatgaaaatgtagaatacgaagaaagggaatcagagtttgatattgaagatgaagataagagtgagcctgagcagacaggggctgatgctgcagaagatgaggaagtggatgtcaccagcgtggaccctattgctgccttctgtagcagtgatgaagagctggaagattcaaaggctctattgtatttacccattgcccctgaggtagaagacccagaagaaaatccttacggccccccaccggatgcagtccaaacctccttgatggatgaaggggctagttcagagaagaagaggcagtcctcagcagatgggtcccagccacctaagaagaaacccaaaacaaccaatatagaacttcaaggagtaccaaatgatgaagtccatccactactgggtgtgaagggggatggcaaatccaagaagaagcaagcaggccggcctaaaggatcaaaaggtaaagagaaagattctccatttaaaccgaaactctacaaaggggacagaggtttacctctggaaggatcagcgaagggtaaagtgcaggcggaactcagccagcccttgacagcaggaggagcaatctcagaactgttatgaagaccttcgaagttcttcattctttctcactttgccatcatgtggcctctggacactgtggtcagtcatttgaaaattgactttaatttaaaacaaaggcctgtgcctcccacccaggaggtgggagggtgaattttatgtttaaatgaagaagtgaattatggaagaagagtatacgaccttcccttccctttcaagcataagtccaaatagactctcaggaatgaagatttgtgaagacatcagataggaattttgactcatttaaactttgatgcttagttatgttgctggagaaaagatacttatgttttgctcatctaacttcattgtacccagcgtcattttgacatgtcatttcctatctcccatttgccttcggtcctcaatgcatgtctttgagtgacttcttatctgaaattttgctactggtatcctaggaaagcttttgttggatactctcattttaaacttctcctctccccagatacctcctatatttccatattgtgtgcaaaggatgggcagaaaagaaagtgcttgaaagatttcaaattttcagaaagggaacaacgaaggccctctcttcctctcataccacgttttgctcaagaagctgggctgtaacaattcagggttttcccttgttttcctctcattgcatgtttccctccaatattggttcattgtcatcaatcatggtttttgaagatagctagttttatccatctccagcaaagaatcatcaatagtttatattgctttacctgtgctggcttccagagatggaaacaaacccaggtgtctctcaacaagctacttttttactggggtgggggaatctatgcaaggagtaaagtaaaaccatccagaatcaaagcagcaaccacatagttcaaatcaaagatcaaggtgaattttttgtatcactgcctgtggaaatctatcctcatcagtcattgcatttttccctgcctatacctgtgctcctttttcttactgtgttttcagtcacttcctttctgtgaaaggttgcttagctttttttttgacatttgttgttctttataaaaataacagattggatagatgtgtacatttggtgtttgaaattctctgaaaatcccattaggaaaccaggtgtgaaaagggctcagtagcttctctgagtggcgtttttagctgactggaagtgcttaatctggatcgtcttttttttttttttttttttttcaatattttaaaaggagaatttaaatactgtgcttactgtgaaatatatcagttggtgagccgggcgtggtgggtcacgcctgtaatcccagcactttgggaggccaaggcgggttgatcacccgaggtcaggagttcaagaccagcctggccaacgtggtgaaagcctgtatctattaaaagacaaaaattagctgggcgtggtagtacatgcctgtaatcccagctacactggaggctgagtcaggagaatcacttgaacgtgggaggcagaggttgcagtgagtggagatcgcaccactgccctccagcctaggtgacagaatgagactctatctcaaaaaaaaaaaaaaaatgatatcagttggtggatgctcctataggtagccaaacacattgattacctgttagattttaggatagaaatcaaagtagagcacgtcagcaagagcctctttgtctcactccatcatttaaaaccagtatattcagtagttgaagaaagagctctccctgagtcagttgcaaaacgtctatatttttagatgccactacttttttcttaaatattcattttgagactgtcatgagttagaccagtggttgagattagtagatggctcactagacatgtttttgttttgcagacattatatccattccagtcctctgcactgtacactgcagcagtgtgcaaactatgggacttagagggtttctgccatctttccacgtgtgaagtagcttggtttcctctgcctgtgcatttggatgtttgtgctatgtccacctcctaaactggctactgagaaaatcatcttcagccctgtcagattgtctctggcagtagctcctaataattatttatgtttttggaatttttttttcaacttttaaaaaaccttctatccatttcaatttgaattatttgatttgtacaatatatgtatattctcttcttcctttttgtcatccctgccctgccacccccaaaattttgtttttaaaaatattctgggctgggcatggtggctcacacctgtaatcccagcacttggggaggccgaggctggtggatcatctgaggtcaggtgtttgagaccagcctggtcaacatggtgaaaccccgtctctactaaaaatacaaaaattagctgggcgtggtggcgggcacctgtaatcctagctactcgggaggctgaggcaggagaattgcttgaatccaggaggcagaggttgcagtgagctgagattgcgccactgcactccagcctgggtgacagagcaagactccatctcaaaaaaaaaaaaaaaaaaaaatctgtagttttgtacaagatgagacttagccttgggtacttcttgctgaagctttaatgctttgtaaataaaatcggatgtttattaaagaa

SEQ ID NO: 152447 - DNA, 1617 bp, Artificial Sequence
  derived and/or modified sequence
atgaacctggagctgctggagagcttcggccagaactaccccgaggaggccgacggcaccctggactgcatcagcatggccctgacctgcaccttcaacagatggggcaccctgctggccgtgggctgcaacgacggcagaatcgtgatctgggacttcctgaccagaggcatcgccaagatcatcagcgcccacatccaccccgtgtgcagcctgtgctggagcagagacggccacaagctggtgagcgccagcaccgacaacatcgtgagccagtgggacgtgctgagcggcgactgcgaccagagattcagattccccagccccatcctgaaggtgcagtaccaccccagagaccagaacaaggtgctggtgtgccccatgaagagcgcccccgtgatgctgaccctgagcgacagcaagcacgtggtgctgcccgtggacgacgacagcgacctgaacgtggtggccagcttcgacagaagaggcgagtacatctacaccggcaacgccaagggcaagatcctggtgctgaagaccgacagccaggacctggtggccagcttcagagtgaccaccggcaccagcaacaccaccgccatcaagagcatcgagttcgccagaaagggcagctgcttcctgatcaacaccgccgacagaatcatcagagtgtacgacggcagagagatcctgacctgcggcagagacggcgagcccgagcccatgcagaagctgcaggacctggtgaacagaaccccctggaagaagtgctgcttcagcggcgacggcgagtacatcgtggccggcagcgccagacagcacgccctgtacatctgggagaagagcatcggcaacctggtgaagatcctgcacggcaccagaggcgagctgctgctggacgtggcctggcaccccgtgagacccatcatcgccagcatcagcagcggcgtggtgagcatctgggcccagaaccaggtggagaactggagcgccttcgcccccgacttcaaggagctggacgagaacgtggagtacgaggagagagagagcgagttcgacatcgaggacgaggacaagagcgagcccgagcagaccggcgccgacgccgccgaggacgaggaggtggacgtgaccagcgtggaccccatcgccgccttctgcagcagcgacgaggagctggaggacagcaaggccctgctgtacctgcccatcgcccccgaggtggaggaccccgaggagaacccctacggccccccccccgacgccgtgcagaccagcctgatggacgagggcgccagcagcgagaagaagagacagagcagcgccgacggcagccagccccccaagaagaagcccaagaccaccaacatcgagctgcagggcgtgcccaacgacgaggtgcaccccctgctgggcgtgaagggcgacggcaagagcaagaagaagcaggccggcagacccaagggcagcaagggcaaggagaaggacagccccttcaagcccaagctgtacaagggcgacagaggcctgcccctggagggcagcgccaagggcaaggtgcaggccgagctgagccagcccctgaccgccggcggcgccatcagcgagctgctgtag

SEQ ID NO: 152448 - protein, 117 aa, Artificial Sequence
  derived and/or modified sequence
MPRLFFFHLLGVCLLLNQFSRAVADSWMEEVIKLCGRELVRAQIAICGMSTWSKRSLSQEDAPQTPRPVAGDFIQTVSLGISPDGGKALRTGSCFTREFLGALSKLCHPSSTKIQKP

SEQ ID NO: 152449 - protein, 117 aa, Artificial Sequence
  derived and/or modified sequence
MPRLFLFHLLEFCLLLNQFSRAVAAKWKDDVIKLCGRELVRAQIAICGMSTWSKRSLSQEDAPQTPRPVAGDFIQTVSLGISPDGGKALRTGSCFTREFLGALSKLYHPSSTKIQKL

SEQ ID NO: 152450 - DNA, 354 bp, Artificial Sequence
  derived and/or modified sequence
atgcccagactgttcttcttccacctgctgggcgtgtgcctgctgctgaaccagttcagcagagccgtggccgacagctggatggaggaggtgatcaagctgtgcggcagagagctggtgagagcccagatcgccatctgcggcatgagcacctggagcaagagaagcctgagccaggaggacgccccccagacccccagacccgtggccggcgacttcatccagaccgtgagcctgggcatcagccccgacggcggcaaggccctgagaaccggcagctgcttcaccagagagttcctgggcgccctgagcaagctgtgccaccccagcagcaccaagatccagaagccctag

SEQ ID NO: 152451 - DNA, 354 bp, Artificial Sequence
  derived and/or modified sequence
atgcctcggctttttttcttccatctcttgggggtctgtctgctgcttaaccaattttcgcgagcagtcgcagacagctggatggaagaggtcattaaactgtgcggccgggaactggttcgcgcgcagattgccatctgcggtatgagtacctggtccaagagaagtctatcccaagaagacgcaccccagaccccccgccctgttgcaggagactttattcaaaccgttagcttaggcatatctccagacggaggtaaagccctacgcactggatcctgctttacacgggaattcctcggcgccttgtccaaactctgtcatccatcaagtacaaagattcaaaagccatag

SEQ ID NO: 152452 - DNA, 354 bp, Artificial Sequence
  derived and/or modified sequence
atgcccaggctcttcttcttccacctgctgggcgtgtgcctgctgctgaaccagttcagcagagctgtggccgacagctggatggaggaggtgatcaagctgtgtggccgggagctggtgcgggcccagatcgccatctgtggcatgagcacctggagcaagaggagcctgagccaggaggatgccccccagacccccaggcctgtggccggggacttcatccagacagtgtccctgggcatcagcccagatggcggcaaggccctgaggacaggcagctgcttcacccgggagttcctgggcgccctgagcaagctgtgccaccccagcagcaccaagatccagaagccctag

SEQ ID NO: 152453 - DNA, 354 bp, Artificial Sequence
  derived and/or modified sequence
atgccccggctgttcttcttccacctgctgggcgtgtgcctgctgctcaaccaattcagtagggcagtggccgacagctggatggaagaggtgataaagctgtgcggccgcgaactggtgcgcgcccaaattgctatctgtggcatgagcacttggagcaagagatccctgtcccaggaagatgctcctcaaactccaaggccagttgccggagactttatccagacagtatctctaggaatcagccctgatggaggtaaagccttaaggaccggctcatgttttacccgggagttcttaggcgctctctccaagttatgccatcctagctcaacgaaaattcaaaagccctag

SEQ ID NO: 152454 - DNA, 354 bp, Artificial Sequence
  derived and/or modified sequence
atgcctcgcctgttcttttttcacctacttggcgtctgcctgttgctgaatcagttctcgcgcgctgttgcagatagctggatggaagaagtgattaagctgtgtggcagggaactggttagagcgcagatcgccatctgcggcatgagcacctggtcaaaaaggtcactctcacaggaggacgctccccaaacccctaggcctgtggccggtgattttatccagacagtgtccctgggcatctccccagatggaggcaaagcactccgtactggtagctgctttacaagggaattccttggcgcactttccaagctctgccatcccagttcaactaagatccagaagccttag

SEQ ID NO: 152455 - DNA, 354 bp, Artificial Sequence
  derived and/or modified sequence
atgccccgcctgttcctcttccatttgctggaattctgcctgctactcaatcagttttctcgtgctgtagctgccaagtggaaggatgatgtgatcaagctttgcggacgcgaactcgtaagagcccaaatcgccatctgtggaatgagtacctggagtaagcggagccttagccaggaagatgctcctcaaactccccgccccgtggctggagattttatacagacagttagcttaggtatcagccccgacgggggtaaagctttgcgtacaggcagttgttttactcgcgagttcctgggtgccctctcaaaactgtatcacccaagtagcacaaagatccaaaaactgtag

SEQ ID NO: 152456 - DNA, 354 bp, Artificial Sequence
  derived and/or modified sequence
atgcccaggctcttcctgttccacctgctggagttctgcctgctgctgaaccagttcagcagagctgtggccgccaagtggaaggatgatgtgatcaagctgtgtggccgggagctggtgcgggcccagatcgccatctgtggcatgagcacctggagcaagaggagcctgagccaggaggatgccccccagacccccaggcctgtggccggggacttcatccagacagtgtccctgggcatcagcccagatggcggcaaggccctgaggacaggcagctgcttcacccgggagttcctgggcgccctgagcaagctgtaccaccccagcagcaccaagatccagaagctgtag

SEQ ID NO: 152457 - DNA, 354 bp, Artificial Sequence
  derived and/or modified sequence
atgccccggctgttcctgttccacctgctggagttctgcctgctgctgaatcagtttagcagggctgtcgctgctaagtggaaggacgatgttattaagctgtgtggaagagagctggttagagcgcagatcgctatctgcggaatgagcacatggagcaagcgctctttatcccaagaagacgccccgcagacacccagaccggttgctggcgactttatccaaacagtgagcctcggaatttcgcctgacggcggcaaggccctgcgaacaggatcttgttttaccagggaatttctgggagccctgtccaaattgtaccatccatcgtctaccaaaattcaaaaactttag

SEQ ID NO: 152458 - DNA, 354 bp, Artificial Sequence
  derived and/or modified sequence
atgcctcgactgttcctctttcacctactcgaattttgcctgttactcaaccaattctctcgggcagtggccgcaaagtggaaggatgatgtgatcaagttatgcggacgcgagctcgtcagagcacagattgctatctgtgggatgtccacctggtccaaacgctctctgtcccaggaggacgcccctcagacacctaggcctgtcgcgggtgacttcattcagactgtgagcctgggtatctctcctgatggtggcaaggcattaaggacgggctcttgcttcacccgcgagtttctcggcgcactcagtaagctgtatcaccccagctccacaaagattcagaagttatag

SEQ ID NO: 152459 - DNA, 354 bp, Artificial Sequence
  derived and/or modified sequence
atgcccagactgttcctgttccacctgctggagttctgcctgctgctgaaccagttcagcagagccgtggccgccaagtggaaggacgacgtgatcaagctgtgcggcagagagctggtgagagcccagatcgccatctgcggcatgagcacctggagcaagagaagcctgagccaggaggacgccccccagacccccagacccgtggccggcgacttcatccagaccgtgagcctgggcatcagccccgacggcggcaaggccctgagaaccggcagctgcttcaccagagagttcctgggcgccctgagcaagctgtaccaccccagcagcaccaagatccagaagctgtag

SEQ ID NO: 152460 - protein, 518 aa, Artificial Sequence
  derived and/or modified sequence
MDRAPQRQHRASRELLAAKKTHTSQIEVIPCKICGDKSSGIHYGVITCEGCKGFFRRSQRCNAAYSCTRQQNCPIDRTSRNRCQHCRLQKCLALGMSRDAVKFGRMSKKQRDSLHAEVQKQLQQRQQQQQEPVVKTPPAGAQGADTLTYTLGLPDGQLPLGSSPDLPEASACPPGLLKASGSGPSYSNNLAKAGLNGASCHLEYSPERGKAEGRESFYSTGSQLTPDRCGLRFEEHRHPGLGELGQGPDSYGSPSFRSTPEAPYASLTEIEHLVQSVCKSYRETCQLRLEDLLRQRSNIFSREEVTGYQRKSMWEMWERCAHHLTEAIQYVVEFAKRLSGFMELCQNDQIVLLKAGAMEVVLVRMCRAYNADNRTVFFEGKYGGMELFRALGCSELISSIFDFSHSLSALHFSEDEIALYTALVLINAHRPGLQEKRKVEQLQYNLELAFHHHLCKTHRQSILAKLPPKGKLRSLCSQHVERLQIFQHLHPIVVQAAFPPLYKELFSTETESPVGLSK

SEQ ID NO: 152461 - DNA, 3084 bp, Artificial Sequence
  derived and/or modified sequence
gccaggtgctcccgccttccaccctccgccctcctccctcccctgggccctgctccctgccctcctgggcagccagggcagccaggacggcaccaagggagctgccccatggacagggccccacagagacagcaccgagcctcacgggagctgctggctgcaaagaagacccacacctcacaaattgaagtgatcccttgcaaaatctgtggggacaagtcgtctgggatccactacggggttatcacctgtgaggggtgcaagggcttcttccgccggagccagcgctgtaacgcggcctactcctgcacccgtcagcagaactgccccatcgaccgcaccagccgaaaccgatgccagcactgccgcctgcagaaatgcctggcgctgggcatgtcccgagatgctgtcaagttcggccgcatgtccaagaagcagagggacagcctgcatgcagaagtgcagaaacagctgcagcagcggcaacagcagcaacaggaaccagtggtcaagacccctccagcaggggcccaaggagcagataccctcacctacaccttggggctcccagacgggcagctgcccctgggctcctcgcctgacctgcctgaggcttctgcctgtccccctggcctcctgaaagcctcaggctctgggccctcatattccaacaacttggccaaggcagggctcaatggggcctcatgccaccttgaatacagccctgagcggggcaaggctgagggcagagagagcttctatagcacaggcagccagctgacccctgaccgatgtggacttcgttttgaggaacacaggcatcctgggcttggggaactgggacagggcccagacagctacggcagccccagtttccgcagcacaccggaggcaccctatgcctccctgacagagatagagcacctggtgcagagcgtctgcaagtcctacagggagacatgccagctgcggctggaggacctgctgcggcagcgctccaacatcttctcccgggaggaagtgactggctaccagaggaagtccatgtgggagatgtgggaacggtgtgcccaccacctcaccgaggccattcagtacgtggtggagttcgccaagaggctctcaggctttatggagctctgccagaatgaccagattgtgcttctcaaagcaggagcaatggaagtggtgctggttaggatgtgccgggcctacaatgctgacaaccgcacggtcttttttgaaggcaaatacggtggcatggagctgttccgagccttgggctgcagcgagctcatcagctccatctttgacttctcccactccctaagtgccttgcacttttccgaggatgagattgccctctacacagcccttgttctcatcaatgcccatcggccagggctccaagagaaaaggaaagtagaacagctgcagtacaatctggagctggcctttcatcatcatctctgcaagactcatcgccaaagcatcctggcaaagctgccacccaaggggaagcttcggagcctgtgtagccagcatgtggaaaggctgcagatcttccagcacctccaccccatcgtggtccaagccgctttccctccactctacaaggagctcttcagcactgaaaccgagtcacctgtggggctgtccaagtgacctggaagagggactccttgcctctccctatggcctgctggcccacctccctggaccccgttccaccctcacccttttcctttcccatgaaccctggagggtggtccccaccagctctttggaagtgagcagatgctgcggctggctttctgtcagcaggccggcctggcagtgggacaatcgccagagggtggggctggcagaacaccatctccagcctcagctttgacctgtctcatttcccatattccttcacacccagcttctggaaggcatggggtggctgggatttaaggacttctgggggaccaagacatcctcaagaaaacaggggcatccagggctccctggatgaatagaatgcaattcattcagaagctcagaagctaagaataagcctttgaaatacctcattgcatttccctttgggcttcggcttggggagatggatcaagctcagagactggcagtgagagcccagaaggacctgtataaaatgaatctggagctttacattttctgcctctgccttcctcccagctcagcaaggaagtatttgggcaccctaccctttacctggggtctaaccaaaaatggatgggatgaggatgagaggctggagataattgttttatgggatttgggtgtgggactagggtacaatgaaggccaagagcatctcagacatagagttaaaactcaaacctcttatgtgcactttaaagatagactttaggggctggcacaaatctgatcagagacacatatccatacacaggtgaaacacatacagactcaacagcaatcatgcagttccagagacacatgaacctgacacaatctctcttatccttgaggccacagcttggaggagcctagaggcctcaggggaaagtcccaatcctgagggaccctcccaaacatttccatggtgctccagtccactgatcttgggtctggggtgatccaaataccaccccagctccagctgtcttctaccactagaagacccaagagaagcagaagtcgctcgcactggtcagtcggaaggcaagatcagatcctggaggactttcctggcctgcccgccagccctgctcttgttgtggagaaggaagcagatgtgatcacatcaccccgtcattgggcaccgctgactccagcatggaggacaccagggagcagggcctgggcctgtttccccagctgtgatcttgcccagaacctctcttggcttcataaacagctgtgaaccctcccctgagggattaacagcaatgatgggcagtcgtggagttgggggggttgggggtgggattgtgtcctctaaggggacgggttcatctgagtaaacataaaccccaacttgtgccattctttataaaatgattttaaaggcaaaaaaaaaaaaaaaaaaaa

SEQ ID NO: 152462 - DNA, 1557 bp, Artificial Sequence
  derived and/or modified sequence
atggatagggcccctcagcgacagcaccgcgcctccagggagcttctggcagccaaaaaaacccacacgtcccagatcgaggtaatcccttgcaaaatttgcggagataagagcagtggcatccactatggcgtgatcacatgcgagggatgtaagggcttttttcggagaagtcagagatgtaacgcagcatactcttgtacaaggcagcagaactgtcctattgatcgcacttcccggaaccggtgtcagcattgtcgcctacagaaatgccttgcgctgggaatgtctcgggatgccgtgaagtttggaagaatgagtaaaaaacagcgagatagcctccatgccgaggttcagaaacaactgcaacagagacagcagcaacaacaagagcccgtggtgaaaacgcctcctgctggcgcccaaggtgcggacactctgacctacactttaggcttgccggatggacagctaccactgggctcttcgccagacctgccagaggcaagcgcatgcccccccgggcttctaaaagccagtggatcaggcccctcctacagcaataatttggctaaggctggcctaaacggcgccagttgccacttagaatactcccctgagagagggaaggccgagggtagggagtctttctattccactggctcccagcttacaccagatcggtgcggcctccggttcgaggagcacagacatcccggacttggggagttgggtcaaggacccgattcctacgggagcccgagcttcaggtccacccccgaagctccttacgcaagtttgacggaaatcgagcacctggtacaatctgtatgtaagagctatcgtgagacctgtcaactgaggctcgaggaccttcttcgtcagagaagtaatatcttttcaagagaggaggtgacgggctaccagcggaaaagcatgtgggaaatgtgggaacgctgcgctcatcacctcactgaagctatccaatacgtggtggagttcgccaagcggttgtctggcttcatggagctgtgccagaacgatcagattgtcctccttaaggctggtgcaatggaggtggtgcttgtcagaatgtgtagagcctacaacgcagacaaccggacagtgtttttcgaaggaaaatatggcggaatggaattgttccgagcattgggctgctccgagctgatttcaagcatattcgatttctcccatagtctgagcgctctgcacttcagtgaggacgaaatagcattgtacactgccttagttctcatcaacgcccacagacctggcctgcaggaaaagcgcaaggtcgaacagctgcagtacaacctggaattagccttccaccatcacctgtgtaagacgcacagacagagtatattagccaagctgcctcccaagggcaagctcaggtcactgtgctctcaacacgtagagagactgcagatcttccagcatctgcatccaatcgtagtgcaggcggccttccctccattatataaggaactgttctccacggagactgagtcacccgtcggactttccaaatag

SEQ ID NO: 152463 - DNA, 1557 bp, Artificial Sequence
  derived and/or modified sequence
atggaccgggccccccagaggcagcaccgggccagccgggagctgctggccgccaagaagacccacaccagccagatcgaggtgatcccctgcaagatctgtggggacaagagcagcggcatccactatggagtcatcacctgtgagggctgcaagggcttcttccgccgcagccagcgctgcaatgctgcctacagctgcacccggcagcagaactgccccatcgacaggaccagcaggaaccgctgccagcactgccgcctgcagaagtgcctggccctgggcatgagcagagatgctgtgaagtttggaaggatgagcaagaagcagagggacagcctgcacgccgaggtgcagaagcagctgcagcagaggcagcagcagcagcaggagcctgtggtgaagaccccacctgctggggcccagggcgctgacaccctgacctacaccctgggcctgcctgatggccagctgcccctgggcagcagcccagacctgcctgaggccagcgcctgccccccaggcctgctgaaggccagcggcagcggccccagctacagcaacaacctggccaaggccggcctgaatggagccagctgccacctggagtacagccctgagcggggcaaggccgagggccgggagagcttctacagcacaggcagccagctgaccccagacagatgtggcctgcgctttgaggagcaccgccaccctggcctgggggagctgggccagggccctgacagctatggcagccccagcttccgcagcaccccagaggccccctatgccagcctgacagaaattgagcacctggtgcagagcgtgtgcaagagctaccgggagacctgccagctgcggctggaggacctgctgcggcagaggagcaacatcttcagccgggaggaggtgacaggctaccagaggaagtccatgtgggagatgtgggagcgctgtgcccaccacctgacagaggccatccagtatgtggtggagtttgccaagaggctgagcggcttcatggagctgtgccagaatgaccagatcgtgctgctgaaggccggggccatggaggtggtgctggtgaggatgtgccgggcctacaatgctgacaacagaacagtgttctttgagggcaagtatggaggcatggagctgttccgggccctgggctgcagcgagctgatcagcagcatctttgacttcagccacagcctgagcgccctgcacttctctgaagatgaaattgccctgtacacagccctggtgctgatcaatgcccacaggcctggcctgcaggagaagaggaaggtggagcagctgcagtacaacctggagctggccttccaccaccacctgtgcaagacccaccggcagagcatcctggccaagctgccccccaagggcaagctgcggagcctgtgcagccagcacgtggagcggctgcagatcttccagcacctgcaccccatcgtggtgcaggccgccttcccccccctgtacaaggagctgttcagcacagaaacagagagccctgtgggcctgagcaagtag

SEQ ID NO: 152464 - DNA, 1557 bp, Artificial Sequence
  derived and/or modified sequence
atggaccgggccccccagcggcagcaccgggccagccgggagctgttggctgcgaagaagacgcacactagtcagatagaggtcattccttgcaagatttgcggggacaaatcatcaggaattcactacggcgtgatcacttgcgagggctgtaaaggcttctttcggcgaagtcagcgatgcaatgcagcttactcctgtaccagacagcagaactgtcccattgatcggacctcccgcaataggtgtcagcactgtcgacttcagaagtgcttagctctcggcatgtcacgggatgctgtgaaatttggccggatgagtaaaaagcagagggatagcctccatgccgaggttcagaagcagctgcaacaaagacagcagcaacagcaggagccagtcgtcaagacacctccggcgggcgcccagggagcagacacattgacgtacacccttggcctccccgatgggcagctcccgttaggttctagccctgatctccctgaggcctcagcctgcccgcccggtcttcttaaggcctcaggctcgggaccctcatatagcaataaccttgccaaggcaggacttaatggtgcatcatgccatttggagtattctcctgaaagaggcaaagccgagggacgggagagtttctactcgaccggcagccaactgacacctgaccggtgtgggcttcgctttgaggaacaccgtcaccccggcctgggcgagctcggccaggggccagatagctacggcagtcccagcttccgctcaactccagaggccccctatgccagcctgacggagatcgagcaccttgtacagtctgtctgtaaaagttatcgagagacctgccaattaagattggaggatcttctccgacagaggagcaatatcttctcccgagaggaggtgaccggctaccagcgcaagtccatgtgggaaatgtgggaaagatgtgctcaccacctgacagaagcgatacagtatgtggttgagttcgcgaagcgactgtcaggcttcatggagctatgccaaaacgaccagatagtgctcttaaaggcaggcgctatggaagtcgttctcgtgaggatgtgtcgcgcttataatgcagacaatagaaccgtcttttttgagggcaagtacgggggtatggagctcttcagggctctgggatgctccgaactcatcagttccatctttgacttttcacatagcctgtccgccttacattttagcgaggatgagatcgcactgtatactgctctcgtgttgataaatgctcacaggcctgggctacaagaaaagcgtaaggtcgagcagctacagtataacctcgaactggcctttcatcaccacctgtgtaagacccataggcagagtatactagcaaagctcccaccgaaagggaaactgcgttctttgtgctctcaacatgtggaaaggctccagatatttcagcacttgcaccccatcgtcgtccaagcagcatttccacctctgtataaggaactgttctctacagagaccgaaagccctgtgggactgtccaagtag

SEQ ID NO: 152465 - DNA, 1557 bp, Artificial Sequence
  derived and/or modified sequence
atggatcgcgcaccgcagaggcagcaccgcgcttcccgcgaactccttgctgcaaagaaaacacatacgagtcagattgaggtcatcccctgcaagatctgcggcgataagtcttccgggatacactatggtgttatcacatgcgagggctgcaagggcttcttccgcagaagtcaaagatgcaacgcggcttactcttgcaccaggcagcagaattgccctatagatcgaacaagcagaaacagatgccaacattgtcgcctacagaagtgcctcgcgctaggtatgagcagagatgctgtgaagttcggaagaatgagtaaaaagcagagagactccctgcacgcggaagtacagaaacagctgcagcagcggcagcagcagcagcaagagcctgtggtgaagacaccaccagctggtgcacaaggcgcagatacgctcacgtacactctgggattgcccgatggccagctgccattgggtagtagtccggatctgcctgaggccagcgcttgccctcctggcctcctgaaggcatcgggctccggcccaagctacagcaataacctggctaaggctggcttaaacggagccagttgtcacctggagtacagcccagaaagaggaaaggctgaaggtcgggagagtttttattctactggtagccagctcaccccagacagatgcggtctgaggttcgaagaacaccgccaccctggcctaggcgagttgggtcagggacctgatagttacggctcccccagctttagatccactcctgaggccccatacgctagccttaccgagatagagcacctggttcagagcgtgtgtaagtcctatcgagagacatgccagctgcggctggaggatctgttacgccagaggtctaatatcttttcacgggaagaagttactggttatcagcggaaatccatgtgggagatgtgggagaggtgcgcccaccacctgaccgaagctattcagtacgtcgtggaatttgcaaagcgattgtccggattcatggaactgtgccagaacgaccagattgtgctgctcaaggccggtgccatggaggtagttcttgtccggatgtgtagggcttataacgccgataacagaacagtcttctttgagggaaaatatggagggatggagctgttccgggctctgggctgcagcgagctgatctcaagcatcttcgatttcagccattccctgtctgccctgcacttctctgaagacgagattgccctgtacactgcgcttgtgctgattaacgcccatagacctgggctgcaggagaagagaaaggtggagcagcttcaatataatctggagttggcttttcaccatcatctatgcaagactcaccgccagtcgatcctcgctaagctccctcccaaggggaagctgcgtagcttgtgctctcaacacgttgagcgtctgcagatcttccaacacctccacccaatcgttgttcaggccgcttttcccccactctataaagagctgttttcaaccgaaaccgagtccccggtgggactgtccaagtag

SEQ ID NO: 152466 - DNA, 2180 bp, Artificial Sequence
  derived and/or modified sequence
gccaggtgctcccgccttccaccctccgccctcctccctcccctgggccctgctccctgccctcctgggcagccagggcagccaggacggcaccaagggagctgccccatggacagggccccacagagacagcaccgagcctcacgggagctgctggctgcaaagaagacccacacctcacaaattgaagtgatcccttgcaaaatctgtggggacaagtcgtctgggatccactacggggttatcacctgtgaggggtgcaagggcttcttccgccggagccagcgctgtaacgcggcctactcctgcacccgtcagcagaactgccccatcgaccgcaccagccgaaaccgatgccagcactgccgcctgcagaaatgcctggcgctgggcatgtcccgagatgctgtcaagttcggccgcatgtccaagaagcagagggacagcctgcatgcagaagtgcagaaacagctgcagcagcggcaacagcagcaacaggaaccagtggtcaagacccctccagcaggggcccaaggagcagataccctcacctacaccttggggctcccagacgggcagctgcccctgggctcctcgcctgacctgcctgaggcttctgcctgtccccctggcctcctgaaagcctcaggctctgggccctcatattccaacaacttggccaaggcagggctcaatggggcctcatgccaccttgaatacagccctgagcggggcaaggctgagggcagagagagcttctatagcacaggcagccagctgacccctgaccgatgtggacttcgttttgaggaacacaggcatcctgggcttggggaactgggacagggcccagacagctacggcagccccagtttccgcagcacaccggaggcaccctatgcctccctgacagagatagagcacctggtgcagagcgtctgcaagtcctacagggagacatgccagctgcggctggaggacctgctgcggcagcgctccaacatcttctcccgggaggaagtgactggctaccagaggaagtccatgtgggagatgtgggaacggtgtgcccaccacctcaccgaggccattcagtacgtggtggagttcgccaagaggctctcaggctttatggagctctgccagaatgaccagattgtgcttctcaaagcaggagcaatggaagtggtgctggttaggatgtgccgggcctacaatgctgacaaccgcacggtcttttttgaaggcaaatacggtggcatggagctgttccgagccttgggctgcagcgagctcatcagctccatctttgacttctcccactccctaagtgccttgcacttttccgaggatgagattgccctctacacagcccttgttctcatcaatgcccatcggccagggctccaagagaaaaggaaagtagaacagctgcagtacaatctggagctggcctttcatcatcatctctgcaagactcatcgccaaagcatcctggcaaagctgccacccaaggggaagcttcggagcctgtgtagccagcatgtggaaaggctgcagatcttccagcacctccaccccatcgtggtccaagccgctttccctccactctacaaggagctcttcagcactgaaaccgagtcacctgtggggctgtccaagtgacctggaagagggactccttgcctctccctatggcctgctggcccacctccctggaccccgttccaccctcacccttttcctttcccatgaaccctggagggtggtccccaccagctctttggaagtgagcagatgctgcggctggctttctgtcagcaggccggcctggcagtgggacaatcgccagagggtggggctggcagaacaccatctccagcctcagctttgacctgtctcatttcccatattccttcacacccagcttctggaaggcatggggtggctgggatttaaggacttctgggggaccaagacatcctcaagaaaacaggggcatccagggctccctggatgaatagaatgcaattcattcagaagctcagaagctaagaataagcctttgaaatacctcattgcatttccctttgggcttcggcttggggagatggatcaagctcagagactggcagtgagagcccagaaggacctgtataaaatgaatctggagctttaca

SEQ ID NO: 152467 - DNA, 1557 bp, Artificial Sequence
  derived and/or modified sequence
atggacagagccccccagagacagcacagagccagcagagagctgctggccgccaagaagacccacaccagccagatcgaggtgatcccctgcaagatctgcggcgacaagagcagcggcatccactacggcgtgatcacctgcgagggctgcaagggcttcttcagaagaagccagagatgcaacgccgcctacagctgcaccagacagcagaactgccccatcgacagaaccagcagaaacagatgccagcactgcagactgcagaagtgcctggccctgggcatgagcagagacgccgtgaagttcggcagaatgagcaagaagcagagagacagcctgcacgccgaggtgcagaagcagctgcagcagagacagcagcagcagcaggagcccgtggtgaagaccccccccgccggcgcccagggcgccgacaccctgacctacaccctgggcctgcccgacggccagctgcccctgggcagcagccccgacctgcccgaggccagcgcctgcccccccggcctgctgaaggccagcggcagcggccccagctacagcaacaacctggccaaggccggcctgaacggcgccagctgccacctggagtacagccccgagagaggcaaggccgagggcagagagagcttctacagcaccggcagccagctgacccccgacagatgcggcctgagattcgaggagcacagacaccccggcctgggcgagctgggccagggccccgacagctacggcagccccagcttcagaagcacccccgaggccccctacgccagcctgaccgagatcgagcacctggtgcagagcgtgtgcaagagctacagagagacctgccagctgagactggaggacctgctgagacagagaagcaacatcttcagcagagaggaggtgaccggctaccagagaaagagcatgtgggagatgtgggagagatgcgcccaccacctgaccgaggccatccagtacgtggtggagttcgccaagagactgagcggcttcatggagctgtgccagaacgaccagatcgtgctgctgaaggccggcgccatggaggtggtgctggtgagaatgtgcagagcctacaacgccgacaacagaaccgtgttcttcgagggcaagtacggcggcatggagctgttcagagccctgggctgcagcgagctgatcagcagcatcttcgacttcagccacagcctgagcgccctgcacttcagcgaggacgagatcgccctgtacaccgccctggtgctgatcaacgcccacagacccggcctgcaggagaagagaaaggtggagcagctgcagtacaacctggagctggccttccaccaccacctgtgcaagacccacagacagagcatcctggccaagctgccccccaagggcaagctgagaagcctgtgcagccagcacgtggagagactgcagatcttccagcacctgcaccccatcgtggtgcaggccgccttcccccccctgtacaaggagctgttcagcaccgagaccgagagccccgtgggcctgagcaagtag

SEQ ID NO: 152468 - protein, 359 aa, Artificial Sequence
  derived and/or modified sequence
MPAHLLQDDISSSYTTTTTITAPPSRVLQNGGDKLETMPLYLEDDIRPDIKDDIYDPTYKDKEGPSPKVEYVWRNIILMSLLHLGALYGITLIPTCKFYTWLWGVFYYFVSALGITAGAHRLWSHRSYKARLPLRLFLIIANTMAFQNDVYEWARDHRAHHKFSETHADPHNSRRGFFFSHVGWLLVRKHPAVKEKGSTLDLSDLEAEKLVMFQRRYYKPGLLMMCFILPTLVPWYFWGETFQNSVFVATFLRYAVVLNATWLVNSAAHLFGYRPYDKNISPRENILVSLGAVGEGFHNYHHSFPYDYSASEYRWHINFTTFFIDCMAALGLAYDRKKVSKAAILARIKRTGDGNYKSG

SEQ ID NO: 152469 - protein, 242 aa, Artificial Sequence
  derived and/or modified sequence
MPAHLLQDDISSSYTTTTTITAPPSRVLQNGGDKLETMPLYLEDDIRPDIKDDIYDPTYKDKEGPSPKVEYVWRNIILMSLLHLGALYGITLIPTCKFYTWLWGVFYYFVSALGITAGAHRLWSHRSYKARLPLRLFLIIANTMAFQNDVYEWARDHRAHHKFSETHADPHNSRRGFFFSHVGWLLVRKHPAVKEKGSTLDLSDLEAEKLVMFQRRYYKPGLLMMCFILPTLVPWYFWGETF

SEQ ID NO: 152470 - DNA, 1080 bp, Artificial Sequence
  derived and/or modified sequence
atgcccgcccacctgctgcaggacgacatcagcagcagctacaccaccaccaccaccatcaccgccccccccagcagagtgctgcagaacggcggcgacaagctggagaccatgcccctgtacctggaggacgacatcagacccgacatcaaggacgacatctacgaccccacctacaaggacaaggagggccccagccccaaggtggagtacgtgtggagaaacatcatcctgatgagcctgctgcacctgggcgccctgtacggcatcaccctgatccccacctgcaagttctacacctggctgtggggcgtgttctactacttcgtgagcgccctgggcatcaccgccggcgcccacagactgtggagccacagaagctacaaggccagactgcccctgagactgttcctgatcatcgccaacaccatggccttccagaacgacgtgtacgagtgggccagagaccacagagcccaccacaagttcagcgagacccacgccgacccccacaacagcagaagaggcttcttcttcagccacgtgggctggctgctggtgagaaagcaccccgccgtgaaggagaagggcagcaccctggacctgagcgacctggaggccgagaagctggtgatgttccagagaagatactacaagcccggcctgctgatgatgtgcttcatcctgcccaccctggtgccctggtacttctggggcgagaccttccagaacagcgtgttcgtggccaccttcctgagatacgccgtggtgctgaacgccacctggctggtgaacagcgccgcccacctgttcggctacagaccctacgacaagaacatcagccccagagagaacatcctggtgagcctgggcgccgtgggcgagggcttccacaactaccaccacagcttcccctacgactacagcgccagcgagtacagatggcacatcaacttcaccaccttcttcatcgactgcatggccgccctgggcctggcctacgacagaaagaaggtgagcaaggccgccatcctggccagaatcaagagaaccggcgacggcaactacaagagcggctag

SEQ ID NO: 152471 - DNA, 729 bp, Artificial Sequence
  derived and/or modified sequence
atgcccgcccacctgctgcaggacgacatcagcagcagctacaccaccaccaccaccatcaccgccccccccagcagagtgctgcagaacggcggcgacaagctggagaccatgcccctgtacctggaggacgacatcagacccgacatcaaggacgacatctacgaccccacctacaaggacaaggagggccccagccccaaggtggagtacgtgtggagaaacatcatcctgatgagcctgctgcacctgggcgccctgtacggcatcaccctgatccccacctgcaagttctacacctggctgtggggcgtgttctactacttcgtgagcgccctgggcatcaccgccggcgcccacagactgtggagccacagaagctacaaggccagactgcccctgagactgttcctgatcatcgccaacaccatggccttccagaacgacgtgtacgagtgggccagagaccacagagcccaccacaagttcagcgagacccacgccgacccccacaacagcagaagaggcttcttcttcagccacgtgggctggctgctggtgagaaagcaccccgccgtgaaggagaagggcagcaccctggacctgagcgacctggaggccgagaagctggtgatgttccagagaagatactacaagcccggcctgctgatgatgtgcttcatcctgcccaccctggtgccctggtacttctggggcgagaccttctag

SEQ ID NO: 152472 - DNA, 1080 bp, Artificial Sequence
  derived and/or modified sequence
atgcctgctcacctcctccaagacgacattagttcttcctacactaccacaaccactattacagccccaccttctcgggtgctgcagaacgggggcgataaacttgagactatgcctctctatttggaagacgacattaggccggatatcaaagacgatatttacgatccaacgtacaaagataaggaggggcctagtccaaaggtcgagtatgtgtggcgcaacataatactaatgtctctcttgcaccttggtgccctctacgggattactctgattcctacctgcaagttctatacctggttgtggggagtgttttattacttcgtgtccgcgctcggcattaccgccggagcacaccggctttggtctcaccgctcatacaaagccagactgccattgcggctgtttctgattatcgctaataccatggccttccaaaacgatgtgtacgagtgggccagagaccatagagcccatcataagttctctgaaacccacgcggacccacataacagcaggcgagggttctttttttcgcacgttggctggctcttggtcagaaagcaccccgcagtcaaagaaaaaggttccacgctcgacctgtcggatctggaggctgaaaagctggtgatgtttcaacggagatactataagccaggcttacttatgatgtgcttcatcctgcccacactggtcccttggtacttctggggggaaacatttcagaatagtgttttcgtggccacctttcttcggtatgcagtggtgcttaatgccacttggctggtgaattccgccgctcacctgttcggatacaggccatacgacaaaaatatctcacctagggagaatatcctcgtgtcactaggcgccgtcggagagggtttccacaattatcaccattctttcccatatgactactctgcctccgagtaccgatggcacattaatttcacaactttttttatagactgtatggcggcactcggcctggcttacgatagaaagaaggtatctaaggcagctatacttgcaaggattaagcggactggagacgggaattacaagagcggttag

SEQ ID NO: 152473 - DNA, 729 bp, Artificial Sequence
  derived and/or modified sequence
atgccagcccatttgctgcaggacgatatctcttcctcctatacaactacaactacaataacagctcccccgagcagggttctgcagaacggtggagataaattagagacaatgcctctctaccttgaggatgatattcgaccagacattaaagatgacatctatgatcctacctataaagataaggaagggcccagtcctaaggttgagtatgtttggcggaacatcatcctgatgtccctcctccatctcggggccctgtacgggattacacttattcccacgtgtaaattctacacctggctttggggagttttctattacttcgtctctgccctcggcatcacagccggagctcaccgtctctggtcccaccggtcctataaggctagactgcccctccgcttattccttattatcgccaataccatggccttccagaatgatgtgtatgaatgggccagagaccatcgggctcaccacaaattctctgaaacgcacgctgaccctcataactcaaggagaggcttcttcttttcccatgtgggttggctcctcgtacgcaaacaccccgccgtgaaagagaaagggtccacactggacctatctgatttagaggcagaaaaactggtgatgttccagcgtcggtactataagcctggactactcatgatgtgctttatcctcccgacactggtgccgtggtatttctggggggaaaccttttag

SEQ ID NO: 152474 - DNA, 1080 bp, Artificial Sequence
  derived and/or modified sequence
atgcctgcccacctgctgcaggatgacatcagcagcagctacaccaccaccaccaccatcacagccccacccagccgggtgctgcagaatggaggagacaagctggagaccatgcccctgtacctggaggatgacatccggccagacatcaaggatgacatctatgaccccacctacaaggacaaggagggccccagccccaaggtggagtatgtgtggaggaacatcatcctgatgagcctgctgcacctgggcgccctgtatggcatcaccctcatccccacctgcaagttctacacctggctgtggggcgtcttctactactttgtgtctgccctgggcatcacagctggggcccaccggctgtggagccacaggagctacaaggcccggctgcccctgcggctcttcctgatcatcgccaacaccatggccttccagaatgatgtgtatgagtgggcccgggaccaccgggcccaccacaagttcagcgagacccacgccgacccccacaacagccggcggggcttcttcttcagccacgtgggctggctgctggtgaggaagcaccctgctgtgaaggagaagggcagcaccctggacctgagtgacctggaggccgagaagctggtgatgttccagaggcgctactacaagccaggcctgctgatgatgtgcttcatcctgcccaccctggtgccctggtacttctggggcgagaccttccagaacagcgtgtttgtggccaccttcctgcgctatgctgtggtgctgaatgccacctggctggtgaacagcgctgcccacctgtttggctaccggccctatgacaagaacatcagcccccgggagaacatcctggtgtccctgggcgctgtgggggagggcttccacaactaccaccacagcttcccctatgactacagcgccagcgagtaccgctggcacatcaacttcaccaccttcttcatcgactgcatggccgccctgggcctggcctatgacaggaagaaggtgtccaaggccgccatcctggcccgcatcaagaggactggagatggcaactacaagagcggctag

SEQ ID NO: 152475 - DNA, 729 bp, Artificial Sequence
  derived and/or modified sequence
atgcctgcccacctgctgcaggatgacatcagcagcagctacaccaccaccaccaccatcacagccccacccagccgggtgctgcagaatggaggagacaagctggagaccatgcccctgtacctggaggatgacatccggccagacatcaaggatgacatctatgaccccacctacaaggacaaggagggccccagccccaaggtggagtatgtgtggaggaacatcatcctgatgagcctgctgcacctgggcgccctgtatggcatcaccctcatccccacctgcaagttctacacctggctgtggggcgtcttctactactttgtgtctgccctgggcatcacagctggggcccaccggctgtggagccacaggagctacaaggcccggctgcccctgcggctcttcctgatcatcgccaacaccatggccttccagaatgatgtgtatgagtgggcccgggaccaccgggcccaccacaagttcagcgagacccacgccgacccccacaacagccggcggggcttcttcttcagccacgtgggctggctgctggtgaggaagcaccctgctgtgaaggagaagggcagcaccctggacctgagtgacctggaggccgagaagctggtgatgttccagaggcgctactacaagccaggcctgctgatgatgtgcttcatcctgcccaccctggtgccctggtacttctggggcgagaccttctag

SEQ ID NO: 152476 - DNA, 1080 bp, Artificial Sequence
  derived and/or modified sequence
atgcccgcccacctgctgcaggacgacatcagcagcagctacaccaccacaaccaccattacggctcctcccagccgggtcctccagaacggcggagacaagctggagacaatgcccttgtacctggaggatgacattagaccggacatcaaggatgatatctatgatccaacctataaggataaagaaggcccatcccctaaagttgagtacgtctggagaaatattattttaatgagcctcctccacctgggcgcgctgtacggtataacactgattccaacatgtaaattttatacttggttgtggggtgtcttctactatttcgtaagcgccctcggtatcactgccggagcccatagactgtggtcccaccgttcgtataaggctcgtctgcctttgcgtcttttcctaattattgcgaacacaatggcgtttcagaacgatgtttacgaatgggccagggatcaccgcgcccatcataaatttagcgagacccacgccgacccacacaactcaaggcgtgggttctttttctcccacgtcggttggttgcttgtacgcaagcaccccgccgtgaaggaaaagggcagcacattagatttatctgatctggaagccgaaaaactcgtgatgtttcagagacgatattacaagcctggcctattgatgatgtgtttcattctccccactttggtaccctggtacttctggggcgagacctttcagaactccgtatttgttgccaccttcctgcgttatgctgttgtcctgaacgccacctggttagtcaacagcgctgcacacctcttcggttataggccctatgacaaaaatatttctccgcgggaaaacatccttgtgagcctgggggccgtgggagagggattccataactatcaccactccttcccttacgactatagcgctagcgagtaccgatggcacatcaattttacgactttttttatagactgcatggcagcgctcggactggcttatgatcgaaagaaggtgtcgaaagccgcgatcttagctaggattaaacggacaggtgacgggaattacaaatccggctag

SEQ ID NO: 152477 - DNA, 729 bp, Artificial Sequence
  derived and/or modified sequence
atgcccgcccacctgctgcaggacgacatcagcagcagctacaccacaacaacaactatcacagcccctccttcccgagtacttcagaatgggggcgacaaactcgagaccatgccgctgtacctcgaggatgatatccgaccagacatcaaggatgacatctacgaccctacctataaagacaaagaagggccatccccgaaggtggagtacgtttggcggaacattatattaatgagtctgttacacctgggggccctttatggcatcacactgattccaacttgcaagttttacacatggctgtggggcgttttctattatttcgtttcggcgttaggcatcacagccggggcgcaccgactgtggagccacagatcatataaagcaagactgcctctccgactgtttcttattatcgccaacactatggcttttcaaaatgatgtatacgagtgggccagagaccatcgggcacaccataagttcagcgagacacacgcagacccgcataacagcaggcgcggctttttcttcagccacgtgggatggctcttggtaagaaaacatcctgctgttaaagagaagggctctaccctggacctctcggacttagaggcagagaagctagtaatgttccaaaggcggtactacaagcccggcttgcttatgatgtgttttatcctccctaccctggtcccctggtacttttggggggaaacgttctag

SEQ ID NO: 152478 - DNA, 1080 bp, Artificial Sequence
  derived and/or modified sequence
atgcccgctcatctgctgcaagacgatatctcctcgtcctacacaacaacgaccaccatcacggcgcctcccagccgcgtgctacagaacggcggtgacaaattagaaacaatgccactctatctcgaagacgacattcgccctgatattaaagatgacatttatgatcccacctataaagacaaggagggaccttccccaaaggtggaatatgtctggcgaaacataatactgatgtcccttttacatctgggagccttgtacggaattacgctcatacctacttgtaaattctacacatggctctggggcgtcttttactatttcgtgagtgctctgggaataactgctggtgcccaccggctgtggtcccaccgttcctataaggctagactgccccttcggctcttcctcattatagcaaatactatggcattccagaacgacgtatacgagtgggccagagatcacagagcccaccacaagttttccgagacacacgccgacccacataactctcgcagaggttttttcttctcccacgtgggctggctcttagtgcgaaaacacccggctgtgaaagaaaaaggatcaactttagatctctctgacctggaggctgaaaagcttgtgatgttccagaggaggtattacaagccaggcttactcatgatgtgtttcattctccccaccctggtcccttggtacttttggggagagacctttcagaactccgtgttcgtcgcaacattcctgaggtacgccgttgtgttaaatgctacttggcttgtgaactccgccgctcacctgttcggatatagaccttatgataaaaacatttcccctagagaaaatatcctcgtatctctcggggctgtgggagagggtttccacaactatcaccactcctttccatatgactattcggccagtgaatacaggtggcacatcaacttcaccacgtttttcatagattgcatggccgctctcgggctcgcttatgatcgtaaaaaggtgtctaaagctgcaattctggccaggataaagcgcactggcgatgggaactacaaatccggatag

SEQ ID NO: 152479 - DNA, 729 bp, Artificial Sequence
  derived and/or modified sequence
atgccagcacacctgctccaagatgacatttctagctcctatacgaccacaactaccattactgctcctccgtccagggtactgcagaatgggggtgacaagcttgaaactatgcccttgtacctagaggatgatattcggcctgatattaaagacgatatctacgatccaacttacaaggacaaggagggaccaagtcccaaagtagaatatgtctggagaaatatcattctgatgtccctcctacatctcggtgctctctacggaataaccctcatacctacatgcaagttctacacatggctgtggggtgtcttctattactttgtgtctgctctggggatcaccgccggtgctcaccgactctggagccatcggtcctacaaggctcgcttgccactgcgtctgtttcttatcattgctaatacaatggctttccagaatgacgtgtatgaatgggccagggatcaccgcgctcaccataagttctcagaaactcacgccgacccgcataactcccggaggggattcttcttttcccatgtcggttggctgttggtgcgaaagcatccagcggttaaggagaaaggatcaaccttggacctctccgacctggaggctgagaaattggtgatgtttcagagacgctactacaaaccagggttgctaatgatgtgtttcatccttcccactctcgtgccttggtatttctggggggaaacattttag

SEQ ID NO: 152480 - DNA, 5362 bp, Artificial Sequence
  derived and/or modified sequence
gtggtgtcggtgtcggcagcatccccggcgccctgctgcggtcgccgcgagcctcggcctctgtctcctccccctcccgcccttacctccacgcgggaccgcccgcgccagtcaactcctcgcactttgcccctgcttggcagcggataaaagggggctgaggaaataccggacacggtcacccgttgccagctctagcctttaaattcccggctcggggacctccacgcaccgcggctagcgccgacaaccagctagcgtgcaaggcgccgcggctcagcgcgtaccggcgggcttcgaaaccgcagtcctccggcgaccccgaactccgctccggagcctcagccccctggaaagtgatcccggcatccgagagccaagatgccggcccacttgctgcaggacgatatctctagctcctataccaccaccaccaccattacagcgcctccctccagggtcctgcagaatggaggagataagttggagacgatgcccctctacttggaagacgacattcgccctgatataaaagatgatatatatgaccccacctacaaggataaggaaggcccaagccccaaggttgaatatgtctggagaaacatcatccttatgtctctgctacacttgggagccctgtatgggatcactttgattcctacctgcaagttctacacctggctttggggggtattctactattttgtcagtgccctgggcataacagcaggagctcatcgtctgtggagccaccgctcttacaaagctcggctgcccctacggctctttctgatcattgccaacacaatggcattccagaatgatgtctatgaatgggctcgtgaccaccgtgcccaccacaagttttcagaaacacatgctgatcctcataattcccgacgtggctttttcttctctcacgtgggttggctgcttgtgcgcaaacacccagctgtcaaagagaaggggagtacgctagacttgtctgacctagaagctgagaaactggtgatgttccagaggaggtactacaaacctggcttgctgatgatgtgcttcatcctgcccacgcttgtgccctggtatttctggggtgaaacttttcaaaacagtgtgttcgttgccactttcttgcgatatgctgtggtgcttaatgccacctggctggtgaacagtgctgcccacctcttcggatatcgtccttatgacaagaacattagcccccgggagaatatcctggtttcacttggagctgtgggtgagggcttccacaactaccaccactcctttccctatgactactctgccagtgagtaccgctggcacatcaacttcaccacattcttcattgattgcatggccgccctcggtctggcctatgaccggaagaaagtctccaaggccgccatcttggccaggattaaaagaaccggagatggaaactacaagagtggctgagtttggggtccctcaggttcctttttcaaaaaccagccaggcagaggttttaatgtctgtttattaactactgaataatgctaccaggatgctaaagatgatgatgttaacccattccagtacagtattcttttaaaattcaaaagtattgaaagccaacaactctgcctttatgatgctaagctgatattatttcttctcttatcctctctctcttctaggcccattgtcctccttttcactttattgctatcgccctcctttcccttattgcctcccaggcaagcagctggtcagtctttgctcagtgtccagcttccaaagcctagacaacctttctgtagcctaaaacgaatggtctttgctccagataactctctttccttgagctgttgtgagctttgaagtaggtggcttgagctagagataaaacagaatcttctgggtagtcccctgttgattatcttcagcccaggcttttgctagatggaatggaaaagcaacttcatttgacacaaagcttctaaagcaggtaaattgtcgggggagagagttagcatgtatgaatgtaaggatgagggaagcgaagcaagaggaacctctcgccatgatcagacatacagctgcctacctaatgaggacttcaagccccaccacatagcatgcttcctttctctcctggctcggggtaaaaagtggctgcggtgtttggcaatgctaattcaatgccgcaacatatagttgaggccgaggataaagaaaagacattttaagtttgtagtaaaagtggtctctgctggggaagggttttcttttctttttttctttaataacaaggagatttcttagttcatatatcaagaagtcttgaagttgggtgtttccagaattggtaaaaacagcagctcatagaattttgagtattccatgagctgctcattacagttctttcctctttctgctctgccatcttcaggatattggttcttcccctcatagtaataagatggctgtggcatttccaaacatccaaaaaaagggaaggatttaaggaggtgaagtcgggtcaaaaataaaatatatatacatatatacattgcttagaacgttaaactattagagtatttcccttccaaagagggatgtttggaaaaaactctgaaggagaggaggaattagttgggatgccaatttcctctccactgctggacatgagatggagaggctgagggacaggatctataggcagcttctaagagcgaacttcacataggaagggatctgagaacacgttgccaggggcttgagaaggttactgagtgagttattgggagtcttaataaaataaactagatattaggtccattcattaattagttccagtttctccttgaaatgagtaaaaactagaaggcttctctccacagtgttgtgccccttcactcatttttttttgaggagaagggggtctctgttaacatctagcctaaagtatacaactgcctggggggcagggttaggaatctcttcactaccctgattcttgattcctggctctaccctgtctgtcccttttctttgaccagatctttctcttccctgaacgttttcttctttccctggacaggcagcctcctttgtgtgtattcagaggcagtgatgacttgctgtccaggcagctccctcctgcacacagaatgctcagggtcactgaaccactgcttctcttttgaaagtagagctagctgccactttcacgtggcctccgcagtgtctccacctacacccctgtgctcccctgccacactgatggctcaagacaaggctggcaaaccctcccagaaacatctctggcccagaaagcctctctctccctccctctctcatgaggcacagccaagccaagcgctcatgttgagccagtgggccagccacagagcaaaagagggtttattttcagtcccctctctctgggtcagaaccagagggcatgctgaatgccccctgcttacttggtgagggtgccccgcctgagtcagtgctctcagctggcagtgcaatgcttgtagaagtaggaggaaacagttctcactgggaagaagcaagggcaagaacccaagtgcctcacctcgaaaggaggccctgttccctggagtcagggtgaactgcaaagctttggctgagacctgggatttgagataccacaaaccctgctgaacacagtgtctgttcagcaaactaaccagcattccctacagcctagggcagacaatagtatagaagtctggaaaaaaacaaaaacagaatttgagaaccttggaccactcctgtccctgtagctcagtcatcaaagcagaagtctggctttgctctattaagattggaaatgtacactaccaaacactcagtccactgttgagccccagtgctggaagggaggaaggcctttcttctgtgttaattgcgtagaggctacaggggttagcctggactaaaggcatccttgtcttttgagctattcacctcagtagaaaaggatctaagggaagatcactgtagtttagttctgttgacctgtgcacctaccccttggaaatgtctgctggtatttctaattccacaggtcatcagatgcctgcttgataatatataaacaataaaaacaactttcacttcttcctattgtaatcgtgtgccatggatctgatctgtaccatgaccctacataaggctggatggcacctcaggctgagggccccaatgtatgtgtggctgtgggtgtgggtgggagtgtgtctgctgagtaaggaacacgattttcaagattctaaagctcaattcaagtgacacattaatgataaactcagatctgatcaagagtccggatttctaacagtccttgctttggggggtgtgctgacaacttagctcaggtgccttacatcttttctaatcacagtgttgcatatgagcctgccctcactccctctgcagaatccctttgcacctgagaccctactgaagtggctggtagaaaaaggggcctgagtggaggattatcagtatcacgatttgcaggattcccttctgggcttcattctggaaacttttgttagggctgcttttcttaagtgcccacatttgatggagggtggaaataatttgaatgtatttgatttataagttttttttttttttttgggttaaaagatggttgtagcatttaaaatggaaaattttctccttggtttgctagtatcttgggtgtattctctgtaagtgtagctcaaataggtcatcatgaaaggttaaaaaagcgaggtggccatgttatgctggtggttaaggccagggcctctccaaccactgtgccactgacttgctgtgtgaccctgggcaagtcacttaactataaggtgcctcagttttccttctgttaaaatggggataataatactgacctacctcaaagggcagttttgaggcatgactaatgctttttagaaagcattttgggatccttcagcacaggaattctcaagacctgagtattttttataataggaatgtccaccatgaacttgatacgtccgtgtgtcccagatgctgtcattagtctatatggttctccaagaaactgaatgaatccattggagaagcggtggataactagccagacaaaatttgagaatacataaacaacgcattgccacggaaacatacagaggatgccttttctgtgattgggtgggattttttccctttttatgtgggatatagtagttacttgtgacaagaataattttggaataatttctattaatatcaactctgaagctaattgtactaatctgagattgtgtttgttcataataaaagtgaagtgaatctgattgcactg

SEQ ID NO: 152481 - DNA, 894 bp, Artificial Sequence
  derived and/or modified sequence
tggtgtggtgtcggtgtcggcagcatccccggcgccctgctgcggtcgccgcgagcctcggcctctgtctcctccccctcccgcccttacctccacgcgggaccgcccgcgccagtcaactcctcgcactttgcccctggaaagtgatcccggcatccgagagccaagatgccggcccacttgctgcaggacgatatctctagctcctataccaccaccaccaccattacagcgcctccctccagggtcctgcagaatggaggagataagttggagacgatgcccctctacttggaagacgacattcgccctgatataaaagatgatatatatgaccccacctacaaggataaggaaggcccaagccccaaggttgaatatgtctggagaaacatcatccttatgtctctgctacacttgggagccctgtatgggatcactttgattcctacctgcaagttctacacctggctttggggggtattctactattttgtcagtgccctgggcataacagcaggagctcatcgtctgtggagccaccgctcttacaaagctcggctgcccctacggctctttctgatcattgccaacacaatggcattccagaatgatgtctatgaatgggctcgtgaccaccgtgcccaccacaagttttcagaaacacatgctgatcctcataattcccgacgtggctttttcttctctcacgtgggttggctgcttgtgcgcaaacacccagctgtcaaagagaaggggagtacgctagacttgtctgacctagaagctgagaaactggtgatgttccagaggaggtactacaaacctggcttgctgatgatgtgcttcatcctgcccacgcttgtgccctggtatttctggggtgaaactttt

SEQ ID NO: 152482 - protein, 137 aa, Artificial Sequence
  derived and/or modified sequence
MKVSVAALSCLMLVTALGSQARVTKDAETEFMMSKLPLENPVLLDMLWRRKIGPQMTLSHAAGFHATSADCCISYTPRSIPCSLLESYFETNSECSKPGVIFLTKKGRRFCANPSDKQVQVCVRMLKLDTRIKTRKN

SEQ ID NO: 152483 - DNA, 414 bp, Artificial Sequence
  derived and/or modified sequence
atgaaagtgagcgtggctgccctcagttgtctgatgcttgtgaccgctctaggttcacaggcccgggttactaaagacgcagagactgagtttatgatgtccaagcttccgttggagaatcccgtgcttcttgatatgctgtggcgccggaagatcgggcctcagatgacgctctcccacgccgccgggtttcatgccactagcgcagactgctgcatttcctacaccccccgctctatcccctgcagtctcttagagtcatactttgaaactaattctgaatgttcaaagccaggagtgatatttttgaccaaaaaaggcaggaggttttgcgctaacccttctgacaaacaggtccaggtctgtgtgaggatgctgaagctcgatactcggatcaagacccgcaaaaactag

SEQ ID NO: 152484 - DNA, 414 bp, Artificial Sequence
  derived and/or modified sequence
atgaaggtgtctgtggccgccctgagctgcctgatgctggtgacagccctgggcagccaggcccgggtgaccaaggatgctgagacagagttcatgatgagcaagctgcccctggagaaccctgtgctgctggacatgctgtggaggaggaagattggcccccagatgaccctgagccatgctgctggcttccacgccaccagcgctgactgctgcatctcctacacccccaggagcatcccctgcagcctgctggagagctactttgagaccaacagcgagtgcagcaagccaggagtcatcttcctgaccaagaagggccgccgcttctgtgccaaccccagcgacaagcaggtgcaggtgtgtgtgaggatgctgaagctggacacccgcatcaagaccaggaagaactag

SEQ ID NO: 152485 - DNA, 414 bp, Artificial Sequence
  derived and/or modified sequence
atgaaggtgagcgtggccgccctgagctgcctgatgctggtgaccgctctaggcagccaggctcgggtgactaaagacgccgaaaccgagttcatgatgagcaagctccctctggagaatcccgtgctgttggatatgctttggaggcgcaagatcggaccacagatgacgctgtcgcacgccgcaggttttcatgcaaccagtgctgattgttgtatcagttatacaccacgatctattccgtgcagcctactcgaatcctatttcgaaaccaactctgagtgcagtaagcccggcgttatcttcttgacaaagaagggtcggcgcttctgcgctaacccaagcgataaacaagtccaggtgtgtgtccgtatgctgaaactggacactaggataaaaacccgaaagaactag

SEQ ID NO: 152486 - DNA, 414 bp, Artificial Sequence
  derived and/or modified sequence
atgaaagtgagtgtggccgcactctcttgtcttatgctggttaccgctttgggatcgcaggctcgcgtaactaaggacgccgagactgagtttatgatgtcaaagcttccactcgaaaaccctgttctcctagacatgttgtggcggaggaaaataggcccacagatgaccctgagtcatgcggcaggctttcacgccacttctgcggattgctgcatcagctatacacctcgatcaattccatgcagccttctcgagtcatactttgagacaaatagcgaatgctctaaaccaggcgtgatctttttaacgaagaaggggcgtcggttttgtgcaaatccttctgataaacaggtacaggtatgtgttcgaatgctgaaactcgatacaagaattaaaaccagaaaaaactag

SEQ ID NO: 152487 - DNA, 625 bp, Artificial Sequence
  derived and/or modified sequence
ctggcatcccgagaagccaggaagcagtgagcccaggagtcctcggccagccctgcctgcccaccaggaggatgaaggtctccgtggctgccctctcctgcctcatgcttgttactgcccttggatcccaggcccgggtcacaaaagatgcagagacagagttcatgatgtcaaagcttccattggaaaatccagtacttctggacatgctctggaggagaaagattggtcctcagatgaccctttctcatgctgcaggattccatgctactagtgctgactgctgcatctcctacaccccacgaagcatcccgtgttcactcctggagagttactttgaaacgaacagcgagtgctccaagccgggtgtcatcttcctcaccaagaaggggcgacgtttctgtgccaaccccagtgataagcaagttcaggtttgcgtgagaatgctgaagctggacacacggatcaagaccaggaagaattgaacttgtcaaggtgaagggacacaagttgccagccaccaactttcttgcctcaactaccttcctgaattattttttaaagaagcatttattcttgtgttctggatttagagcaattcatctaataaacagtttctcacttt

SEQ ID NO: 152488 - DNA, 414 bp, Artificial Sequence
  derived and/or modified sequence
atgaaggtgagcgtggccgccctgagctgcctgatgctggtgaccgccctgggcagccaggccagagtgaccaaggacgccgagaccgagttcatgatgagcaagctgcccctggagaaccccgtgctgctggacatgctgtggagaagaaagatcggcccccagatgaccctgagccacgccgccggcttccacgccaccagcgccgactgctgcatcagctacacccccagaagcatcccctgcagcctgctggagagctacttcgagaccaacagcgagtgcagcaagcccggcgtgatcttcctgaccaagaagggcagaagattctgcgccaaccccagcgacaagcaggtgcaggtgtgcgtgagaatgctgaagctggacaccagaatcaagaccagaaagaactag

SEQ ID NO: 152489 - protein, 794 aa, Artificial Sequence
  derived and/or modified sequence
MRVRIGLTLLLCAVLLSLASASSDEEGSQDESLDSKTTLTSDESVKDHTTAGRVVAGQIFLDSEESELESSIQEEEDSLKSQEGESVTEDISFLESPNPENKDYEEPKKVRKPALTAIEGTAHGEPCHFPFLFLDKEYDECTSDGREDGRLWCATTYDYKADEKWGFCETEEEAAKRRQMQEAEMMYQTGMKILNGSNKKSQKREAYRYLQKAASMNHTKALERVSYALLFGDYLPQNIQAAREMFEKLTEEGSPKGQTALGFLYASGLGVNSSQAKALVYYTFGALGGNLIAHMVLGYRYWAGIGVLQSCESALTHYRLVANHVASDISLTGGSVVQRIRLPDEVENPGMNSGMLEEDLIQYYQFLAEKGDVQAQVGLGQLHLHGGRGVEQNHQRAFDYFNLAANAGNSHAMAFLGKMYSEGSDIVPQSNETALHYFKKAADMGNPVGQSGLGMAYLYGRGVQVNYDLALKYFQKAAEQGWVDGQLQLGSMYYNGIGVKRDYKQALKYFNLASQGGHILAFYNLAQMHASGTGVMRSCHTAVELFKNVCERGRWSERLMTAYNSYKDGDYNAAVIQYLLLAEQGYEVAQSNAAFILDQREASIVGENETYPRALLHWNRAASQGYTVARIKLGDYHFYGFGTDVDYETAFIHYRLASEQQHSAQAMFNLGYMHEKGLGIKQDIHLAKRFYDMAAEASPDAQVPVFLALCKLGVVYFLQYIRETNIRDMFTQLDMDQLLGPEWDLYLMTIIALLLGTVIAYRQRQHQDMPAPRPPGPRPAPPQQEGPPEQQPPQ

SEQ ID NO: 152490 - DNA, 2385 bp, Artificial Sequence
  derived and/or modified sequence
atgagggtgcgcatagggctcactctcttactgtgtgcagtactgctctctctggcatccgcctcctcagacgaggaaggttctcaggacgagagtctcgattcaaaaacaaccctgacctcggatgagagcgtcaaggaccacactacagcaggacgagtggtggctgggcagatcttcctcgacagcgaggagagcgaactcgaaagcagcattcaagaggaggaggacagcctcaaatcacaggagggcgaaagtgtgaccgaagacatcagtttcctagagtcccccaaccctgaaaataaagactatgaagagcccaagaaagtgcgtaagcccgctctgacagcgattgagggaacggcccatggtgagccttgccatttccctttcctgtttctagacaaggagtatgatgaatgtacttctgatggcagggaggacggcagactttggtgtgctactacttacgactataaggcggacgagaagtgggggttctgcgaaaccgaggaggaggccgcaaaaaggcgccaaatgcaagaagccgagatgatgtaccagacggggatgaagatactcaacggaagcaacaaaaaaagccaaaaaagggaagcatatcggtacctccagaaagccgcaagtatgaatcacactaaggccttggaacgggtaagttatgcattgctgttcggcgactatctacctcagaacatccaggcggctagggagatgttcgagaaactcacagaggagggcagtcccaagggtcagaccgccttgggttttttgtacgcctctggcttgggggtgaattctagccaggccaaagccctggtatattacacgtttggcgcacttggaggaaacctgattgcgcatatggtactgggataccggtactgggccggtattggcgttctgcagagttgtgagtctgcgctgactcattacagactggtcgccaaccatgttgcatcagacatctcactgacagggggctctgtggtgcaacggatccgcctgcccgacgaagtggagaaccccgggatgaactctggcatgctggaggaggatctgatacagtattatcaattcttagctgaaaaaggcgacgtgcaggcacaggtggggctggggcaactacatcttcacgggggtagaggcgtggaacagaatcaccaacgggctttcgactatttcaatctggccgcaaatgccggtaatagccatgccatggcctttctgggcaaaatgtacagcgagggatccgatattgtcccccagtccaatgagacagcactccactactttaaaaaggcagctgacatgggcaatccggtcggtcagagcggtctcggcatggcctatctgtatgggcgaggcgtacaggtgaattacgacctggccctgaagtacttccaaaaagccgccgaacaaggctgggtggatggtcaactgcagctgggtagcatgtattataacggaataggagtaaaacgcgattataagcaggccctgaagtatttcaaccttgccagccagggaggtcacattctagcattttacaacctggctcaaatgcacgctagtggcactggagtcatgcgctcttgccacaccgcagttgagttgttcaaaaatgtgtgtgagcgtggacgctggtcagagagactcatgaccgcctataattcctataaagatggcgattataacgccgccgttatccagtatctgctgctggctgagcagggatacgaagtagcccagtctaatgctgcctttattctcgaccagagggaggcgtctattgttggcgagaatgaaacttatcctagagcacttttgcattggaatagggcagcatcccaaggttacacagtggcacggattaaactcggggactaccatttctatggattcggcaccgatgttgattacgaaacagcttttattcattaccggctagcttctgaacagcagcacagtgcacaggctatgtttaatttaggttatatgcatgagaaaggcttgggcatcaaacaggatatacacctggcgaagcggttctacgatatggctgcagaggcttctcctgacgcccaggttcctgtcttcctggccctctgcaagttgggagtcgtatacttcctccagtatatcagggaaactaacattcgggacatgtttacccaattggatatggatcaactgcttggcccagaatgggatctttatctcatgacaataattgctctgctgctgggcacagtgatcgcctaccgccagcggcagcatcaagacatgccagcgccacgacccccagggccccgtccagccccacctcagcaagaaggcccgcccgagcagcagcccccccagtag

SEQ ID NO: 152491 - DNA, 2385 bp, Artificial Sequence
  derived and/or modified sequence
atgagggtgagaattggcctgaccctgctgctgtgtgctgtgctgctgagcctggccagcgccagcagtgatgaggagggcagccaggatgagagcctggacagcaagaccaccctgaccagtgatgagagcgtgaaggaccacaccacagctggccgggtggtggccggccagatcttcctggacagcgaggagagcgagctggagagcagcatccaggaggaggaggacagcctgaagagccaggagggggagagcgtgacagaggacatctccttcctggagagccccaaccctgagaacaaggactatgaggagcccaagaaggtgaggaagccagccctgacagccatcgagggcacagcccatggagagccctgccacttccccttcctgttcctggacaaggagtatgatgagtgcaccagtgatggaagagaagatggccgcctgtggtgtgccaccacctatgactacaaggcagatgagaagtggggcttctgtgaaacagaggaggaggccgccaagaggcggcagatgcaggaggccgagatgatgtaccagacaggcatgaagatcctgaatggcagcaacaagaagagccagaagcgggaggcctaccgctacctgcagaaggccgcctccatgaaccacaccaaggccctggagcgggtgtcctatgccctgctgtttggagactacctgccccagaacatccaggccgcccgggagatgtttgagaagctgacagaggagggcagccccaagggccagacagccctgggcttcctgtatgccagcggcctgggcgtgaacagcagccaggccaaggccctggtgtactacaccttcggggccctgggcggcaacctgattgcccacatggtgctgggctaccgctactgggccggcattggagtgctgcagagctgtgagagcgccctgacccactaccgcctggtggccaaccacgtggccagtgacatcagcctgaccggcggctctgtggtgcagaggatccggctgcctgatgaggtggagaaccctggcatgaacagcggcatgctggaggaggacctgatccagtactaccagttcctggccgagaagggagatgtgcaggcccaggtgggcctgggccagctgcacctgcatggaggccggggcgtggagcagaaccaccagagggcctttgactacttcaacctggccgccaatgccggcaacagccacgccatggccttcctgggcaagatgtacagcgagggcagtgacatcgtgccccagagcaatgaaacagccctgcactacttcaagaaggctgctgacatgggcaaccctgtgggccagagcggcctgggcatggcctacctgtatggccggggcgtgcaggtgaactatgacctggccctgaagtacttccagaaggctgctgagcagggctgggtggatggccagctgcagctgggctccatgtactacaatggaattggagtgaagagggactacaagcaggccctgaagtacttcaacctggccagccagggcggccacatcctggccttctacaacctggcccagatgcacgccagcggcactggagtgatgaggagctgccacacagctgtggagctgttcaagaatgtgtgtgagcggggccgctggagcgagcggctgatgacagcctacaacagctacaaggatggagactacaatgctgctgtgatccagtacctgctgctggccgagcagggctatgaggtggcccagagcaatgctgccttcatcctggaccagcgggaggccagcatcgtgggagaaaatgagacctacccccgggccctgctgcactggaacagagctgccagccagggctacacagtggcccgcatcaagctgggggactaccacttctacggctttggaacagatgtggactatgaaacagccttcatccactaccgcctggccagcgagcagcagcacagcgcccaggccatgttcaacctgggctacatgcatgagaagggcctgggcatcaagcaggacatccacctggccaagcgcttctatgacatggctgctgaggccagcccagatgcccaggtgcctgtgttcctggccctgtgcaagctgggcgtggtgtacttcctgcagtacatccgggagaccaacatccgggacatgttcacccagctggacatggaccagctgctgggccctgagtgggacctgtacctgatgaccatcatcgccctgctgctgggcaccgtgattgcctaccggcagaggcagcaccaggacatgcctgccccccggcccccaggccccaggcctgccccaccccagcaggagggccccccagagcagcagcccccccagtag

SEQ ID NO: 152492 - DNA, 2385 bp, Artificial Sequence
  derived and/or modified sequence
atgcgggtgcggatcggcctgaccctgctgctgtgcgccgtgctgcttagcctagcctccgcctcgtcagacgaggagggcagtcaggacgagtccctggatagcaaaaccaccctgaccagtgatgagtcagtcaaagatcatactacagccggcagagtggtggccggccagatcttcctcgattcggaggaatccgaacttgaatcctccattcaggaggaagaagatagtctgaagagtcaggaaggagagtccgtgacagaagatatttcattcctggagagccccaatccggaaaacaaagactacgaggaacccaagaaggtccggaaacccgcccttaccgctatcgaaggcacagcgcacggggagccgtgtcacttcccctttttattcctggataaagagtatgatgaatgcacatccgatggccgcgaggacgggaggctgtggtgtgcgacaacctacgactataaggccgacgagaagtggggcttttgtgagaccgaggaggaggcagccaaacgccggcagatgcaagaggctgaaatgatgtaccaaactggtatgaagatccttaacggcagcaacaagaaaagtcagaaaagggaagcttacaggtacttgcagaaggctgccagtatgaatcataccaaagcattagagcgcgtgtcttatgccctgcttttcggggactacttgcctcagaacatccaggccgcacgggaaatgtttgaaaagctcacagaggaggggtcaccaaaggggcagactgcactggggttcttatacgcttctgggctaggcgttaactcatctcaagccaaagccctggtgtactatacctttggcgcactggggggtaatctgatcgcccacatggtgctggggtaccgatattgggccgggatcggggttttgcaatcctgtgaatccgcattgacacactaccgtttggtggccaatcacgtggcctccgatatcagtttgacaggtgggagcgtcgtccagcgcatcagactgcctgatgaagtggagaatccaggaatgaactcaggcatgctggaggaggatctgattcagtactatcagtttctggcggaaaagggtgacgtccaggcacaagtaggcctcgggcagttgcaccttcatggaggccgcggagttgagcagaatcaccagcgggcgttcgactactttaatctggctgctaacgctggaaatagccatgcaatggcctttctcgggaaaatgtacagtgaaggctctgacatcgtgccccaatccaatgagaccgcgctgcattatttcaagaaggcggctgatatgggtaaccccgtcggacagtccggactcggaatggcttatctctacggccgcggagtgcaggttaattacgatctggccctgaagtactttcaaaaggctgccgaacagggttgggtggacggccaattacagcttggaagcatgtactataatggcattggcgtgaaacgcgactataagcaggcattgaagtactttaatttggcctcccaaggtgggcatatcctagcattctataacttggctcagatgcacgcctctggcaccggagtgatgcgtagttgtcacacagccgttgagctcttcaagaacgtgtgcgagaggggaagatggtctgaacggctgatgacagcttacaactcatataaagatggtgattacaatgccgcggtgattcagtatcttctgcttgccgagcaagggtatgaggttgctcagagcaacgcggcatttatacttgatcaacgagaagcaagtattgtgggcgagaacgaaacttatccaagagccttgctgcactggaacagggcggcatcccagggctatacggtggccaggattaaattgggggactatcatttttatggcttcggaacagatgtggactacgagaccgccttcatccactataggctggcctcggagcaacaacactctgcccaagccatgtttaacctggggtacatgcacgagaaagggttgggcataaagcaggacatacatctggccaagcggttctacgatatggctgccgaggcctctcccgatgcacaagtgccggtgtttctcgccctgtgtaagttaggcgtggtatacttccttcagtatatccgcgagaccaacatccgcgatatgtttacccagctagacatggaccagctgcttgggccggagtgggatctttatcttatgacaatcatcgcgctactgttaggtactgtgatcgcttatcgacagcgccaacaccaggatatgcccgccccaaggccccccggcccgcgaccagccccacctcaacaggaagggccacctgaacagcagccaccacagtag

SEQ ID NO: 152493 - DNA, 2385 bp, Artificial Sequence
  derived and/or modified sequence
atgcgagtaagaatcggcctgacactgttgctctgtgcggtgcttctgagcctggcctccgcctctagcgacgaagagggcagtcaggatgagtcactggactctaagacaactctcactagtgatgagagtgtcaaggaccataccacagccggacgtgtcgtcgccggacagatcttccttgacagcgaagaatcagagctggaatcctccattcaggaggaggaagatagtctgaagtcgcaggagggggagtccgtgactgaggacatttccttcctcgaaagtccgaaccccgagaacaaggactacgaagaacctaagaaggtgcgcaaacctgcactgacggcaattgagggtacagcccatggagaaccttgccatttcccattcctgtttctggataaagaatatgacgaatgcactagtgatggcagagaggacggcagactatggtgcgccaccacctacgactacaaggccgacgaaaaatggggattctgtgagactgaagaggaggccgcaaaaaggaggcagatgcaggaggccgagatgatgtatcagaccggaatgaagattctgaacggctccaacaagaagagccagaagagggaggcataccgctatctgcaaaaagccgcatctatgaatcacactaaagcactggaacgtgtgagctatgctctcctttttggcgactacttaccgcagaatattcaagcagctagagaaatgtttgagaagctcactgaagaagggagccccaagggtcagacggcgcttgggtttctatatgcctcgggattgggtgtaaacagctcacaagctaaggcactggtgtactacacctttggtgcacttgggggtaatctgatcgcacatatggttctaggctataggtactgggccggaatcggcgttttgcaatcctgcgagagcgctttaacacattaccgattagtcgcgaatcacgttgccagtgacatctctcttaccggcggaagcgtggtccagaggatcaggttaccggacgaggtggagaatccaggcatgaactcaggtatgctggaagaagacctgattcagtattaccaatttctcgcagaaaagggagacgtgcaggcccaggttgggcttggccagctgcacctgcacgggggtcgaggagtcgaacagaatcaccagcgagcgtttgactactttaatctggctgctaacgctgggaatagtcacgccatggcgttcttgggaaaaatgtattcggagggatctgatatcgtgccccagagcaacgaaactgctctgcactactttaagaaggcggcagatatggggaatccggtgggacagtctggtctcggtatggcgtatttgtacgggaggggtgttcaggtgaactacgatctagcactaaaatacttccagaaggctgcagagcagggttgggtggacggtcagctgcaactgggcagcatgtattacaatggaatcggagtgaagagagactacaaacaggcattaaagtatttcaacctggcgtctcagggagggcacatcctggctttctacaatctggcccaaatgcatgccagcggaacgggggtcatgcggtcctgtcatacagctgttgagctctttaaaaacgtctgtgaacgcggacgatggtctgagcggctgatgacagcctataatagctacaaagatggtgactataatgcggctgttatccagtatttactactggcggaacaagggtatgaagtcgcccagtccaacgcagcatttatcctggaccagagagaagcttccatcgtgggggagaatgagacctatcctagagcactcctgcactggaaccgcgcagccagtcaaggctacacagtcgccagaatcaaactgggggactatcatttctatgggtttgggacagacgtggactacgagacagcatttatacattacaggctggcctctgaacagcagcactcagctcaggccatgttcaatctgggctatatgcacgagaagggtcttggaatcaaacaggacattcatttagcgaagcgcttctatgacatggctgcagaggcctcgcccgacgcgcaagttcccgtgttcctggccttgtgcaaactgggcgtcgtgtactttctgcagtatattagggaaactaacatccgtgacatgtttacacagctggacatggatcaactcctaggccctgagtgggatctgtacctaatgactattattgcactgctgctggggactgtgattgcttaccggcagagacagcaccaggatatgcctgcacctaggcccccaggccctcgcccagctccccctcagcaggaggggccacctgaacagcagccaccacagtag

SEQ ID NO: 152494 - DNA, 267 bp, Artificial Sequence
  derived and/or modified sequence
taccatttctatgggtttggcaccgatgtagattatgaaactgcatttattcattaccgtctggcttctgagcagcaacacagtgcacaagctatgtttaatctgggatatatgcatgagaaaggactgggcattaaacaggatattcaccttgcgaaacgtttttatgacatggcagctagccagcccagatgcacaagttccagtcttcctagccctctgcaaattgggcgtcgtctatttcttgcagtacatacgggaaacaaa

SEQ ID NO: 152495 - DNA, 7925 bp, Artificial Sequence
  derived and/or modified sequence
gcggaggaaggagactagagcaggaagagcagcggcgaggcggcggtggtggctgagtccgtggtggcagaggcgaaggcgacagctctaggggttggcaccggccccgagaggaggatgcgggtccggatagggctgacgctgctgctgtgtgcggtgctgctgagcttggcctcggcgtcctcggatgaagaaggcagccaggatgaatccttagattccaagactactttgacatcagatgagtcagtaaaggaccatactactgcaggcagagtagttgctggtcaaatatttcttgattcagaagaatctgaattagaatcctctattcaagaagaggaagacagcctcaagagccaagagggggaaagtgtcacagaagatatcagctttctagagtctccaaatccagaaaacaaggactatgaagagccaaagaaagtacggaaaccagctttgaccgccattgaaggcacagcacatggggagccctgccacttcccttttcttttcctagataaggagtatgatgaatgtacatcagatgggagggaagatggcagactgtggtgtgctacaacctatgactacaaagcagatgaaaagtggggcttttgtgaaactgaagaagaggctgctaagagacggcagatgcaggaagcagaaatgatgtatcaaactggaatgaaaatccttaatggaagcaataagaaaagccaaaaaagagaagcatatcggtatctccaaaaggcagcaagcatgaaccataccaaagccctggagagagtgtcatatgctcttttatttggtgattacttgccacagaatatccaggcagcgagagagatgtttgagaagctgactgaggaaggctctcccaagggacagactgctcttggctttctgtatgcctctggacttggtgttaattcaagtcaggcaaaggctcttgtatattatacatttggagctcttgggggcaatctaatagcccacatggttttgggttacagatactgggctggcatcggcgtcctccagagttgtgaatctgccctgactcactatcgtcttgttgccaatcatgttgctagtgatatctcgctaacaggaggctcagtagtacagagaatacggctgcctgatgaagtggaaaatccaggaatgaacagtggaatgctagaagaagatttgattcaatattaccagttcctagctgaaaaaggtgatgtacaagcacaggttggtcttggacaactgcacctgcacggagggcgtggagtagaacagaatcatcagagagcatttgactacttcaatttagcagcaaatgctggcaattcacatgccatggcctttttgggaaagatgtattcggaaggaagtgacattgtacctcagagtaatgagacagctctccactactttaagaaagctgctgacatgggcaacccagttggacagagtgggcttggaatggcctacctctatgggagaggagttcaagttaattatgatctagcccttaagtatttccagaaagctgctgaacaaggctgggtggatgggcagctacagcttggttccatgtactataatggcattggagtcaagagagattataaacaggccttgaagtattttaatttagcttctcagggaggccatatcttggctttctataacctagctcagatgcatgccagtggcaccggcgtgatgcgatcatgtcacactgcagtggagttgtttaagaatgtatgtgaacgaggccgttggtctgaaaggcttatgactgcctataacagctataaagatggcgattacaatgctgcagtgatccagtacctcctcctggctgaacagggctatgaagtggcacaaagcaatgcagcctttattcttgatcagagagaagcaagcattgtaggtgagaatgaaacttatcccagagctttgctacattggaacagggccgcctctcaaggctatactgtggctagaattaagctcggagactaccatttctatgggtttggcaccgatgtagattatgaaactgcatttattcattaccgtctggcttctgagcagcaacacagtgcacaagctatgtttaatctgggatatatgcatgagaaaggactgggcattaaacaggatattcaccttgcgaaacgtttttatgacatggcagctgaagccagcccagatgcacaagttccagtcttcctagccctctgcaaattgggcgtcgtctatttcttgcagtacatacgggaaacaaacattcgagatatgttcacccaacttgatatggaccagcttttgggacctgagtgggacctttacctcatgaccatcattgcgctgctgttgggaacagtcatagcttacaggcaaaggcagcaccaagacatgcctgcacccaggcctccagggccacggccagctccaccccagcaggaggggccaccagagcagcagccaccacagtaataggcactgggtccagccttgatcagtgacagcgaaggaagttatctgctgggaacacttgcatttgatttaggaccttggatcagtggtcacctcccagaagaggcacggcacaaggaagcattgaattcctaaagctgcttagaatctgatgcctttattttcagggataagtaactcttacctaaactgagctgaatgtttgtttcagtgccatatggaataacaactttcagtggcttttttttttcttttctggaaacatatgtgagacactcagagtaatgtctactgtatccagctatctttcttggatccttttggtcattatttcagtgtgcataagttcttaatgtcaaccatctttaaggtattgtgcatcgacactaaaaactgatcagtgtaaaaaggaaaacccagttgcaagtttaaacgtgttcgaaagtctgaaaatagaacttgccttttaagttaaaaaaaaaaaaagctatcttgaaaatgttttggaactgcgataactgagaaactcttaccagtccacatgcaattagacatattcagcatatttgttattttaaaagggagggttgggaggtttcttattggtgattgtcacacggtataccatactcctctccttcaaagaatgaaaggccttgttaaggagttttttgtgagctttacttctttggaatggaatatacttatgcaaaaccttgtgaactgactccttgcactaacgcgagtttgccccacctactctgtaatttgcttgtttgttttgaatatacagagccttgatccagaagccagaggatggactaagtgggagaaattagaaaacaaaacgaactctggttggggtactacgatcacagacacagacatacttttcctaaagttgaagcatttgttcccaggatttattttactttgcatttctttttgcacaaagaacacatcaccttcctgaattctttaaatatgaaatatcattgccagggtatggcttacagtgactactattataatactaaaactcagagaatcaaagatggattaaactcagtggttgatgaaagccaaaacctgtttgtactgttctatactattcaggtatctttttatttctgatagttttatattataatagaaagccagccactgcttagctatcatagtcaccattttctcactgttaacattaggaaaatcaaggctactatgcttcaggattgtctggttaaatagtatgggaaaaaaactgaagagtttcacataattacacacgtgaaataattaaagcttaaactgaatttgtatttcattttattgtcagatggtggtgttcaccagcctgtatcttgtctgagactgcattcgtatctgagcaggttttctatgcctactgatgtcagtatgtttatactaaccttcatgcttttttcccagaatccctcatctgccagaaaacttgaaaagtttattgcttgtagagttgtactgctttgatttttgaagttggggtagtagttagaactagatttaactagtctataatgaacatgaaggcttttatatatgaagttgtatacctttttgtgtttagagaattatgggaaacctggtaagcaaaactttcctcccagataattgcttccaaattcgaagagttagtcaccaagagagccatatgtatgaaagcgtatctgtgaaaggtaggaaacttaccccccctaagtgtaatgttgctttaggcaactcttgtaaatagtgagacttgtttggtctcttacatgtagagatttgagtgcagttggtacagtactttggtgtctccaccactgtcccttctccccgcttcaaaataagtgtaatccacggtagcagccacacttcctttagaaggaactgttataatttatttaaaagttgaaaaaccacccaagatgactaccaactttcacttttttcttctgccatccaccctcatttttcctttagcaagatttttatatctaactttccttccctccattgagtacgtgctttgagaaaacatttcttaaaacagtgtgtgccacctaaggctggatgggaaagtgcagtcttgttgttcatataaaaacacacttcttattagtttaccacttgcctttttctattgttaatgttctgaatttccttttcttggcttgtttctacttcattttaccctgggtcacttgctgccagcagtttgtgaatggtgtctttcaaataacttagttcttatggcttcacttaaagactgtctcaaaaatactttgctctcttcttcttttttgttcatgggacatggtacctaagcaaataggagttgggtttggtttttctcctaaaataatgctcaatacttacctaatcaaatggcatccatttgaataaaatgacaataactaaagctagttaatgtcagtgacattaaactaactccaggattcaggagttttaatgttagaatttagatttaacagatagagtgtggcttcatttgtccatggtagcccatctctcctaagaccttttctagtctgtcttcctgccttcgaacttgatgacagtaaaaccctgtttagtattctcttgtgcatttggtttgttggttagccgactgtcttgaaactattcattttgcttctagttttattttacagaggtagcattggtgggtttttttttttttttctgtctctgtgtttgaagtttcagtttctgttttctaggtaaggcttatttttgattagcagtcaatggcaaagaaaaagtaaatcaaagatgacttcttttcaaaatgtattgtttagcacttaactcagatgaatttataaattattaatcttgatactaaggatttgttacttttttgcatattaggttaatttttaccttacatgtgagagtcttaccactaagccattctgtctctgtactgttgggaagttttggaaacccctgccagtgatctggtgatgatctgatgatttatttaaagagccgttgatgcctccaggaaacttaagtattttattaatatatatataggaatttttttttattttgctttgtctttctctcccttcttttatcctcatgttcattcttcaaaccagtgttttggaagtatgcatgcaggcctataaatgaaaaacacaattctttatgtgtatagcatgtgtattaatgtctaactacatacgcaaaaacttcctttacagaggttcggactaacatttcacatgcacatttcaaaacaagatgtgtcatgaaaacagcccctttacctgccaagacaagcagggctatatttcagtgacagctgatatttgttttgaaagtgaatctcataatatatatatgtattacacattattatgactagaagtatgtaagaaatgatcagaacaaaagaaaatttctattttcatgcaaatatttttcatcagtcatcactctcaaatataaattaaaatataacactcctgaatgcctgaggcacgatctggattttaaatgtgtggtattcattgaaaagaagctctccacccacttggtatttcaagaaaatttaaaacgatcccaaggaaagatgatttgtatgttaaagtgactgcacaagtaaaagtccaatgttgtgtgcatgaaaaggattccttggttatgtgcagggaatcatctcacatgctgtttttcctatttggtttgagaaacaggctgacactattctctttgattagaaaataaactcataaaactcataatgttgatataatcaagatgtaaccactataaatatgtagaagaggaagttttaaaagaccttaagctggcattgtgaaggaacaccatggtagactctttttgtaaatgtattttgtatttaatgaaatgcagtataaaggttggtgaagtgtaatataattgtgtaaacaaatcctgttaatagagagatgtacagaatcgttttgtactgtatcttgaaacttgtgaaataaagattccacctctggttatcctgtatgctgtaatataccacaaccaagcacctttccagacagactttttttaagctgaatgattcaattttttaatgttttttggaaattcagaagcttctgaaaacattcacttgtggcaatttgaatttatctttcattttaaactcctgaaattcagatttttacaagtccaatattgccctagggagaacatgaatttgctaagaaatgttatcttttaaatctctgatatctttgtcttgaagcagccttgatatgtagtaagcgtgattcactttagcctgattataatattatttatctaaagtttgtttatgcattgccttgtcccaggaattttttaagaggacttgcagagacacgtaccacacagtaacatttagactaaatatgctctgagtaaaggagaaatgaaaaaatattaaatcaagagtgaacatgtacacaaagtgcaattggaagtgggctacaaatttggcccccagcttcccagcaggcaactcaaagaggtaactgaggtaaaatgttccagctcagaagcattggatcttggataaaaagcctacatgatgcaaactgtggcaactgagatgtcagatctcaagatctcaaattgtacttgtgggagcacagtcagtgaccccagatgaccttgactgacctaaaagttgtgggggaagtcggatgtcagagccttaacaccagcaggtgaccatccaacctggggcaatgcctgcctgttcaccacttagcctctttctggcaagtcattagaatgtcctccatcttcattggctgcaacttgatgagctacagcctctttcctaacttcctttatgatgctagtttaggttggttataccagcttggaagtatgcttagattaagttacagcagatacacaaattagatgcaagtaaaaaaaatcagaatttctgtagtagaaactacgaaaaataaaaaggaaagtttttactttttgggtatttttttacgaataagaaaaagtgagcgttaatcagttcaaaaggaggtactgctgtgtaatgggctttgtacgttccttctcatgtcacttacgtcactacttcgccatcaaattgaacaagcttttaattagatcctgaaaattcactatgctagtagtttattggtagtattatattttgagtagaactctgattttccctagaggccaaattctttttatctgggttaatttcttttaaacataacaatgttaatgctgaattgtatattaaatcccatttctaaaaaccacacaattttttctcatgtaagttgagtggaatgtggttagttaactgaatttggaatgttcatataaataatttgttgctgctc

SEQ ID NO: 152496 - DNA, 2385 bp, Artificial Sequence
  derived and/or modified sequence
atgagagtgagaatcggcctgaccctgctgctgtgcgccgtgctgctgagcctggccagcgccagcagcgacgaggagggcagccaggacgagagcctggacagcaagaccaccctgaccagcgacgagagcgtgaaggaccacaccaccgccggcagagtggtggccggccagatcttcctggacagcgaggagagcgagctggagagcagcatccaggaggaggaggacagcctgaagagccaggagggcgagagcgtgaccgaggacatcagcttcctggagagccccaaccccgagaacaaggactacgaggagcccaagaaggtgagaaagcccgccctgaccgccatcgagggcaccgcccacggcgagccctgccacttccccttcctgttcctggacaaggagtacgacgagtgcaccagcgacggcagagaggacggcagactgtggtgcgccaccacctacgactacaaggccgacgagaagtggggcttctgcgagaccgaggaggaggccgccaagagaagacagatgcaggaggccgagatgatgtaccagaccggcatgaagatcctgaacggcagcaacaagaagagccagaagagagaggcctacagatacctgcagaaggccgccagcatgaaccacaccaaggccctggagagagtgagctacgccctgctgttcggcgactacctgccccagaacatccaggccgccagagagatgttcgagaagctgaccgaggagggcagccccaagggccagaccgccctgggcttcctgtacgccagcggcctgggcgtgaacagcagccaggccaaggccctggtgtactacaccttcggcgccctgggcggcaacctgatcgcccacatggtgctgggctacagatactgggccggcatcggcgtgctgcagagctgcgagagcgccctgacccactacagactggtggccaaccacgtggccagcgacatcagcctgaccggcggcagcgtggtgcagagaatcagactgcccgacgaggtggagaaccccggcatgaacagcggcatgctggaggaggacctgatccagtactaccagttcctggccgagaagggcgacgtgcaggcccaggtgggcctgggccagctgcacctgcacggcggcagaggcgtggagcagaaccaccagagagccttcgactacttcaacctggccgccaacgccggcaacagccacgccatggccttcctgggcaagatgtacagcgagggcagcgacatcgtgccccagagcaacgagaccgccctgcactacttcaagaaggccgccgacatgggcaaccccgtgggccagagcggcctgggcatggcctacctgtacggcagaggcgtgcaggtgaactacgacctggccctgaagtacttccagaaggccgccgagcagggctgggtggacggccagctgcagctgggcagcatgtactacaacggcatcggcgtgaagagagactacaagcaggccctgaagtacttcaacctggccagccagggcggccacatcctggccttctacaacctggcccagatgcacgccagcggcaccggcgtgatgagaagctgccacaccgccgtggagctgttcaagaacgtgtgcgagagaggcagatggagcgagagactgatgaccgcctacaacagctacaaggacggcgactacaacgccgccgtgatccagtacctgctgctggccgagcagggctacgaggtggcccagagcaacgccgccttcatcctggaccagagagaggccagcatcgtgggcgagaacgagacctaccccagagccctgctgcactggaacagagccgccagccagggctacaccgtggccagaatcaagctgggcgactaccacttctacggcttcggcaccgacgtggactacgagaccgccttcatccactacagactggccagcgagcagcagcacagcgcccaggccatgttcaacctgggctacatgcacgagaagggcctgggcatcaagcaggacatccacctggccaagagattctacgacatggccgccgaggccagccccgacgcccaggtgcccgtgttcctggccctgtgcaagctgggcgtggtgtacttcctgcagtacatcagagagaccaacatcagagacatgttcacccagctggacatggaccagctgctgggccccgagtgggacctgtacctgatgaccatcatcgccctgctgctgggcaccgtgatcgcctacagacagagacagcaccaggacatgcccgcccccagaccccccggccccagacccgcccccccccagcaggagggcccccccgagcagcagcccccccagtag

SEQ ID NO: 152497 - protein, 324 aa, Artificial Sequence
  derived and/or modified sequence
MSRPSSTGPSANKPCSKQPPPQPQHTPSPAAPPAAATISAAGPGSSAVPAAAAVISGPGGGGGAGPVSPQHHELTSLFECPVCFDYVLPPILQCQAGHLVCNQCRQKLSCCPTCRGALTPSIRNLAMEKVASAVLFPCKYATTGCSLTLHHTEKPEHEDICEYRPYSCPCPGASCKWQGSLEAVMSHLMHAHKSITTLQGEDIVFLATDINLPGAVDWVMMQSCFGHHFMLVLEKQEKYEGHQQFFAIVLLIGTRKQAENFAYRLELNGNRRRLTWEATPRSIHDGVAAAIMNSDCLVFDTAIAHLFADNGNLGINVTISTCCP

SEQ ID NO: 152498 - DNA, 2632 bp, Artificial Sequence
  derived and/or modified sequence
agctgagggacgcgtcagccaggcaccccggggtgtggccagaggacttcggcgacgcttccccgagagtagcccccctcctcaacccagaaaagacaaccccgcggggctgcagcgagccaggcatgctcactggcgcaggcccggcccgcagcccgagcaggaagcgccggcgctaggcggccccctgcgctgccagctggagccgggcggagccagcgccccggcgcagggtggctctgccagtccccgcgcgcctgggcggccgcacacgtgtccaggcgtcacgtccgcgcgcgcccccggggcttgcgtcagcggctgttccagaagcgggtgggccagggctctgcgcaccgctggggttcggggcccgggacgccgccgggaggagggcaccgcgcggggtccgacgcggaggcgtgctcggaacgccgggggctgcggagtgcatcagcgcggtccagccctccgcctgccgggcgccgagcgtctccgccgcccggacctgggctgggcgccgtggcgttgcctcggagctcgctgcccgcggggcgcgcaccgccttgacccgggcggccccgcggcaggcaggcgcccgcagttccatggttggttcggagcgcgatgagccgcccgtcctccaccggccccagcgctaataaaccctgcagcaagcagccgccgccgcagccccagcacactccgtccccggctgcgcccccggccgccgccaccatctcggctgcgggccccggctcgtccgcggtgcccgccgcggcggcggtgatctcgggccccggcggcggcggcggggccggcccggtgtccccgcagcaccacgagctgacctcgctcttcgagtgtccggtctgctttgactatgtcctgcctcctattctgcagtgccaggccgggcacctggtgtgtaaccaatgccgccagaagttgagctgctgcccgacgtgcaggggcgccctgacgcccagcatcaggaacctggctatggagaaggtggcctcggcagtcctgtttccctgtaagtatgccaccacgggctgttccctgaccctgcaccatacggagaaaccagaacatgaagacatatgtgaataccgtccctactcctgcccatgtcctggtgcttcctgcaagtggcaggggtccctggaagctgtgatgtcccatctcatgcacgcccacaagagcattaccacccttcagggagaagacatcgtctttctagctacagacattaacttgccaggggctgtcgactgggtgatgatgcagtcatgttttggccatcacttcatgctggtgctggagaaacaagagaagtacgaaggccaccagcagttttttgccatcgtcctgctcattggcacccgcaagcaagccgagaactttgcctacagactggagttgaatgggaaccggcggagattgacctgggaggccacgccccgttcgattcatgacggtgtggctgcggccatcatgaacagcgactgccttgttttcgacacagccatagcacatctttttgcagataatgggaaccttggaatcaatgttactatttctacatgttgtccatgatgtgactttcgtaaaccttcaaaattatttgggcatagtgctctatgtttaataaaggtttttatagatgttttattccatatgtcttcacaagtcaggacccacaattacccgtgttttgtttgaacagcagtgtcccatctggcttcgacccaacaaagttcattaacctgggatgaatggggttggcctgttggtgatttggatgctgttctgtgatctaaaacaactcttattgaattgtatttactccctaaacaacacttgacaggctgttgcacagggcttctatagatcagtgtgttaggaatgggaggccccttcctgcctgccttcccatattggtcccttgacattgacaaaagcacagtgactgtcagcagattcctttacttttgtttgtgggaggtaggaattgttttaatgcattttaaacagtgtttctgaaattggatggctggctaatagacactgaatcacccggagtgcttatcttaaaattgcagatttagggagcctgccaatttaacagtctcatcaggtgattcttttcaacagtaatgtttgagaattactgggttaaattgtgggaaagggtccagattttaaaggtgctttaaggttgccctctgccgatactgtttgtctttctactgtttcatcccctaacttcccccaaccctcaaattaaaactagaactatagatccacatgaacgcacgcctgagatttggccactcacctatgttttgggtggattgcctaggaaagcaagtcatatggccattgatagttctcatgtaattagttttgctcaccactagtacagatgacccgtttacacgtggcttccctcggaagccctcctcaacagtagctggtgtgaaagactaaatcagtagagttggaaaagctttataaccggtgtgtcatatgcttgctatttaaagctgtgtgttggttttgtttttctgccacattcactagttttttaataaatattttccaaaaatggataaaaaaaaaaaaa

SEQ ID NO: 152499 - DNA, 975 bp, Artificial Sequence
  derived and/or modified sequence
atgtcacggcccagctctacaggaccttccgccaataagccttgtagcaagcagcctcccccacagcctcagcacaccccaagccccgccgctccacctgctgccgcaacaatcagcgccgcagggcctggcagctccgcagtgccggcagccgccgcggttattagtggacccgggggaggcggtggagccggacctgtttctccccaacatcacgaactgacctctctcttcgagtgccctgtgtgctttgactatgtcctcccccctatccttcagtgtcaggcaggacatctggtctgcaatcagtgtcggcagaaattaagctgctgcccaacgtgccgtggcgccctgacaccctcaattaggaatttggcaatggaaaaggtggcatcggcagtgctttttccatgcaaatatgctaccactgggtgttccctcacccttcatcataccgagaagcctgagcacgaagatatctgtgaatatcggccttactcctgcccttgcccaggcgcatcctgtaagtggcagggctcccttgaggccgtgatgtcccatctgatgcatgctcacaagagcattacaaccctacagggagaggacatcgtcttccttgccactgatatcaatttgcccggggcagtggattgggtcatgatgcagtcttgcttcggccatcatttcatgctggtgctcgagaaacaggaaaaatatgaggggcaccagcagttctttgcaatcgtacttctgatcgggacacgcaagcaagcagagaactttgcctatagactggaactgaatgggaacagaaggcgcctgacctgggaagcaacgccccggtctatccatgatggggtggccgcagcaatcatgaactccgattgtctggtattcgatactgccatcgcgcacctgttcgctgataacggcaatctggggattaacgtgactatttctacctgctgcccgtag

SEQ ID NO: 152500 - DNA, 975 bp, Artificial Sequence
  derived and/or modified sequence
atgagccggcccagcagcacaggccccagcgccaacaagccctgcagcaagcagcccccaccccagccccagcacacccccagccctgctgcccccccagctgctgccaccatctctgctgctggccctggcagcagcgctgtgcctgctgctgctgctgtgatcagcggccctgggggcggcggcggggccggccctgtgagcccccagcaccacgagctgaccagcctgtttgaatgtcctgtgtgctttgattatgtgctgccccccatcctgcagtgccaggccggccacctggtgtgcaaccagtgccggcagaagctgagctgctgccccacctgccgcggggccctgacccccagcatccggaacctggccatggagaaggtggccagcgctgtgctcttcccctgcaagtatgccaccaccggctgcagcctgaccctgcaccacacagagaagccagagcacgaggacatctgtgagtaccggccctacagctgcccctgccctggggccagctgcaagtggcagggcagcctggaggccgtgatgagccacctgatgcacgcccacaagagcatcaccaccctgcagggagaagatattgtgttcctggccacagacatcaacctgcctggagctgtggactgggtgatgatgcagagctgcttcggccaccacttcatgctggtgctggagaagcaggagaagtatgagggccaccagcagttctttgccatcgtgctgctgattggcaccaggaagcaggctgaaaattttgcctaccgcctggagctgaatggaaacagaagaaggctgacctgggaggccacccccaggagcatccatgatggagtggccgccgccatcatgaacagcgactgcctggtgtttgacacagccatcgcccacctgtttgctgacaatggaaacctgggcatcaacgtgaccatcagcacctgctgcccctag

SEQ ID NO: 152501 - DNA, 975 bp, Artificial Sequence
  derived and/or modified sequence
atgagccggcccagcagcaccggccccagcgccaacaagccctgctcaaagcaacctcctcctcagccccagcatactccaagtcccgctgcccctcctgccgcagcaaccatcagcgcggcgggcccaggcagttcggctgtgcctgcagccgctgcagtgatctcaggacctgggggcggcggcggggcaggtcctgtctctccccaacatcacgagttgacgtcactgttcgaatgccctgtgtgttttgactacgtgttgcctcctattctccagtgccaggccggacatttggtttgcaatcagtgccggcagaagctgagctgttgccccacgtgtcggggtgccctgactcccagtatcaggaatttagcgatggaaaaagtcgcatcagctgtgctctttccatgtaagtatgccaccacaggatgcagtctgaccctgcaccataccgaaaaacccgagcatgaggatatatgcgagtaccgaccatacagttgtccctgtccgggagccagctgtaaatggcagggatccctggaggccgtaatgagccacctcatgcacgcacacaagtccatcacaactctacaaggagaggacatcgtgttcctggcaactgacattaatctgcccggggccgtggattgggtaatgatgcagtcctgtttcggacaccatttcatgctcgttctggagaagcaggagaagtatgagggccaccagcagtttttcgccatagtcctcctgatcggcaccagaaaacaagccgagaacttcgcttatagattagaactgaacggtaaccggcggaggctgacctgggaggctacgccgaggtccatccacgatggagtcgctgctgccatcatgaacagtgactgcctcgtgtttgacacagccatcgcccatctcttcgccgacaatggtaatttgggtataaatgtgacgatcagcacctgttgtccatag

SEQ ID NO: 152502 - DNA, 975 bp, Artificial Sequence
  derived and/or modified sequence
atgagtaggccctcatccacaggtccttccgctaataagccatgttccaaacagccacctccgcagccccagcacacacctagcccggcagcaccgcctgccgcagcaaccatctccgccgcagggccaggcagctctgctgtgcccgcagccgcagctgttatctccggtcctggcggtggcggtggcgcagggcctgtttccccccagcatcacgagctcacctctctgtttgaatgtccagtttgcttcgattatgtcctcccacctatcctgcagtgccaagccggacacctggtctgtaatcagtgccggcagaagctctcctgttgccccacttgtcggggagccttgacccccagcattaggaacctcgctatggagaaggtggctagtgccgtgcttttcccatgcaaatacgccacaaccggctgtagcctgaccctacaccacacagagaagcccgaacatgaagatatctgtgagtataggccctactcgtgtccttgtcctggggctagctgcaagtggcagggttcattggaagccgtaatgagtcatctcatgcacgctcacaagagtatcactaccttgcagggggaggacatcgtgttcttggcaaccgatatcaatttgcctggagccgtggactgggtcatgatgcagtcctgcttcggacatcactttatgctggtcctggagaagcaagaaaaatatgagggacatcagcaattttttgcaatcgtcctacttattgggacgaggaaacaagccgaaaacttcgcttatcggctggaacttaatggtaatcgcaggcggcttacatgggaggcaacccctagatccattcacgacggtgtcgctgctgctatcatgaactcggattgcctggtttttgacactgcgatcgctcatttgttcgctgacaacggcaatctcggaataaacgtgacaatttccacctgctgcccttag

SEQ ID NO: 152503 - DNA, 2517 bp, Artificial Sequence
  derived and/or modified sequence
ccccgcggggctgcagcgagccaggcatgctcactggcgcaggcccggcccgcagcccgagcaggaagcgccggcgctaggcggccccctgcgctgccagctggagccgggcggagccagcgccccggcgcagggtggctctgccagtccccgcgcgcctgggcggccgcacacgtgtccaggcgtcacgtccgcgcgcgcccccggggcttgcgtcagcggctgttccagaagcgggtgggccagggctctgcgcaccgctggggttcggggcccgggacgccgccgggaggagggcaccgcgcggggtccgacgcggaggcgtgctcggaacgccgggggctgcggagtgcatcagcgcggtccagccctccgcctgccgggcgccgagcgtctccgccgcccggacctgggctgggcgccgtggcgttgcctcggagctcgctgcccgcggggcgcgcaccgccttgacccgggcggccccgcggcaggcaggcgcccgcagttccatggttggttcggagcgcgatgagccgcccgtcctccaccggccccagcgctaataaaccctgcagcaagcagccgccgccgcagccccagcacactccgtccccggctgcgcccccggccgccgccaccatctcggctgcgggccccggctcgtccgcggtgcccgccgcggcggcggtgatctcgggccccggcggcggcggcggggccggcccggtgtccccgcagcaccacgagctgacctcgctcttcgagtgtccggtctgctttgactatgtcctgcctcctattctgcagtgccaggccgggcacctggtgtgtaaccaatgccgccagaagttgagctgctgcccgacgtgcaggggcgccctgacgcccagcatcaggaacctggctatggagaaggtggcctcggcagtcctgtttccctgtaagtatgccaccacgggctgttccctgaccctgcaccatacggagaaaccagaacatgaagacatatgtgaataccgtccctactcctgcccatgtcctggtgcttcctgcaagtggcaggggtccctggaagctgtgatgtcccatctcatgcacgcccacaagagcattaccacccttcagggagaagacatcgtctttctagctacagacattaacttgccaggggctgtcgactgggtgatgatgcagtcatgttttggccatcacttcatgctggtgctggagaaacaagagaagtacgaaggccaccagcagttttttgccatcgtcctgctcattggcacccgcaagcaagccgagaactttgcctacagactggagttgaatgggaaccggcggagattgacctgggaggccacgccccgttcgattcatgacggtgtggctgcggccatcatgaacagcgactgccttgttttcgacacagccatagcacatctttttgcagataatgggaaccttggaatcaatgttactatttctacatgttgtccatgatgtgactttcgtaaaccttcaaaattatttgggcatagtgctctatgtttaataaaggtttttatagatgttttattccatatgtcttcacaagtcaggacccacaattacccgtgttttgtttgaacagcagtgtcccatctggcttcgacccaacaaagttcattaacctgggatgaatggggttggcctgttggtgatttggatgctgttctgtgatctaaaacaactcttattgaattgtatttactccctaaacaacacttgacaggctgttgcacagggcttctatagatcagtgtgttaggaatgggaggccccttcctgcctgccttcccatattggtcccttgacattgacaaaagcacagtgactgtcagcagattcctttacttttgtttgtgggaggtaggaattgttttaatgcattttaaacagtgtttctgaaattggatggctggctaatagacactgaatcacccggagtgcttatcttaaaattgcagatttagggagcctgccaatttaacagtctcatcaggtgattcttttcaacagtaatgtttgagaattactgggttaaattgtgggaaagggtccagattttaaaggtgctttaaggttgccctctgccgatactgtttgtctttctactgtttcatcccctaacttcccccaaccctcaaattaaaactagaactatagatccacatgaacgcacgcctgagatttggccactcacctatgttttgggtggattgcctaggaaagcaagtcatatggccattgatagttctcatgtaattagttttgctcaccactagtacagatgacccgtttacacgtggcttccctcggaagccctcctcaacagtagctggtgtgaaagactaaatcagtagagttggaaaagctttataaccggtgtgtcatatgcttgctatttaaagctgtgtgttggttttgtttttctgccacattcactagttttttaataaatattttccaaaaatg

SEQ ID NO: 152504 - DNA, 975 bp, Artificial Sequence
  derived and/or modified sequence
atgagcagacccagcagcaccggccccagcgccaacaagccctgcagcaagcagccccccccccagccccagcacacccccagccccgccgccccccccgccgccgccaccatcagcgccgccggccccggcagcagcgccgtgcccgccgccgccgccgtgatcagcggccccggcggcggcggcggcgccggccccgtgagcccccagcaccacgagctgaccagcctgttcgagtgccccgtgtgcttcgactacgtgctgccccccatcctgcagtgccaggccggccacctggtgtgcaaccagtgcagacagaagctgagctgctgccccacctgcagaggcgccctgacccccagcatcagaaacctggccatggagaaggtggccagcgccgtgctgttcccctgcaagtacgccaccaccggctgcagcctgaccctgcaccacaccgagaagcccgagcacgaggacatctgcgagtacagaccctacagctgcccctgccccggcgccagctgcaagtggcagggcagcctggaggccgtgatgagccacctgatgcacgcccacaagagcatcaccaccctgcagggcgaggacatcgtgttcctggccaccgacatcaacctgcccggcgccgtggactgggtgatgatgcagagctgcttcggccaccacttcatgctggtgctggagaagcaggagaagtacgagggccaccagcagttcttcgccatcgtgctgctgatcggcaccagaaagcaggccgagaacttcgcctacagactggagctgaacggcaacagaagaagactgacctgggaggccacccccagaagcatccacgacggcgtggccgccgccatcatgaacagcgactgcctggtgttcgacaccgccatcgcccacctgttcgccgacaacggcaacctgggcatcaacgtgaccatcagcacctgctgcccctag

SEQ ID NO: 152505 - protein, 667 aa, Artificial Sequence
  derived and/or modified sequence
MKEKSKNAAKTRREKENGEFYELAKLLPLPSAITSQLDKASIIRLTTSYLKMRAVFPEGLGDAWGQPSRAGPLDGVAKELGSHLLQTLDGFVFVVASDGKIMYISETASVHLGLSQVELTGNSIYEYIHPSDHDEMTAVLTAHQPLHHHLLQEYEIERSFFLRMKCVLAKRNAGLTCSGYKVIHCSGYLKIRQYMLDMSLYDSCYQIVGLVAVGQSLPPSAITEIKLYSNMFMFRASLDLKLIFLDSRVTEVTGYEPQDLIEKTLYHHVHGCDVFHLRYAHHLLLVKGQVTTKYYRLLSKRGGWVWVQSYATVVHNSRSSRPHCIVSVNYVLTEIEYKELQLSLEQVSTAKSQDSWRTALSTSQETRKLVKPKNTKMKTKLRTNPYPPQQYSSFQMDKLECGQLGNWRASPPASAAAPPELQPHSESSDLLYTPSYSLPFSYHYGHFPLDSHVFSSKKPMLPAKFGQPQGSPCEVARFFLSTLPASGECQWHYANPLVPSSSSPAKNPPEPPANTARHSLVPSYEAPAAAVRRFGEDTAPPSFPSCGHYREEPALGPAKAARQAARDGARLALARAAPECCAPPTPEAPGAPAQLPFVLLNYHRVLARRGPLGGAAPAASGLACAPGGPEAATGALRLRHPSPAATSPPGAPLPHYLGASVIITNGR

SEQ ID NO: 152506 - DNA, 4177 bp, Artificial Sequence
  derived and/or modified sequence
ggggctccgcgggcctggagcacggccgggtctaatatgcccggagccgaggcgcgatgaaggagaagtccaagaatgcggccaagaccaggagggagaaggaaaatggcgagttttacgagcttgccaagctgctcccgctgccgtcggccatcacttcgcagctggacaaagcgtccatcatccgcctcaccacgagctacctgaagatgcgcgccgtcttccccgaaggtttaggagacgcgtggggacagccgagccgcgccgggcccctggacggcgtcgccaaggagctgggatcgcacttgctgcagactttggatggatttgtttttgtggtagcatctgatggcaaaatcatgtatatatccgagaccgcttctgtccatttaggcttatcccaggtggagctcacgggcaacagtatttatgaatacatccatccttctgaccacgatgagatgaccgctgtcctcacggcccaccagccgctgcaccaccacctgctccaagagtatgagatagagaggtcgttctttcttcgaatgaaatgtgtcttggcgaaaaggaacgcgggcctgacctgcagcggatacaaggtcatccactgcagtggctacttgaagatcaggcagtatatgctggacatgtccctgtacgactcctgctaccagattgtggggctggtggccgtgggccagtcgctgccacccagtgccatcaccgagatcaagctgtacagtaacatgttcatgttcagggccagccttgacctgaagctgatattcctggattccagggtgaccgaggtgacggggtacgagccgcaggacctgatcgagaagaccctataccatcacgtgcacggctgcgacgtgttccacctccgctacgcacaccacctcctgttggtgaagggccaggtcaccaccaagtactaccggctgctgtccaagcggggcggctgggtgtgggtgcagagctacgccaccgtggtgcacaacagccgctcgtcccggccccactgcatcgtgagtgtcaattatgtactcacggagattgaatacaaggaacttcagctgtccctggagcaggtgtccactgccaagtcccaggactcctggaggaccgccttgtctacctcacaagaaactaggaaattagtgaaacccaaaaataccaagatgaagacaaagctgagaacaaacccttaccccccacagcaatacagctcgttccaaatggacaaactggaatgcggccagctcggaaactggagagccagtccccctgcaagcgctgctgctcctccagaactgcagccccactcagaaagcagtgaccttctgtacacgccatcctacagcctgcccttctcctaccattacggacacttccctctggactctcacgtcttcagcagcaaaaagccaatgttgccggccaagttcgggcagccccaaggatccccttgtgaggtggcacgctttttcctgagcacactgccagccagcggtgaatgccagtggcattatgccaaccccctagtgcctagcagctcgtctccagctaaaaatcctccagagccaccggcgaacactgctaggcacagcctggtgccaagctacgaagcgcccgccgccgccgtgcgcaggttcggcgaggacaccgcgcccccgagcttcccgagctgcggccactaccgcgaggagcccgcgctgggcccggccaaagccgcccgccaggccgcccgggacggggcgcggctggcgctggcccgcgcggcacccgagtgctgcgcgcccccgacccccgaggccccgggcgcgccggcgcagctgcccttcgtgctgctcaactaccaccgcgtgctggcccggcgcggaccgctggggggcgccgcacccgccgcctccggcctggcctgcgctcccggcggccccgaggcggcgaccggcgcgctgcggctccggcacccgagccccgccgccacctccccgcccggcgcgcccctgccgcactacctgggcgcctcggtcatcatcaccaacgggaggtgacccgctggccgcccgcgccaggagcctggacccggcctcccggggctgcggcgccaccgagcccggcaaatgcgcacgacctacattaatttatgcagagacagctgtttgaattggaccccgccgccgacttgcggatttccaccgcggaggccccgcgcgccggtgccgagggccgaggagcgcccgggtccgggcaggtgaccgcccgcctctgtcctgcgagggccggtgcgacccagttgctgggggcttggtttcctcaccttgaaatcgggcttcacgcgtcttgccttgtccccaacgttccacaacagtcccgctgggggattgaagcggtttcactccgcaaatatcctccactttcaggagggaaaacccaccctaccacagtccgctcttccaagtggacggcagacctgggaggggacgcctgtgtcacgagcccttttagatgcttaggtgaaggcagaagtgatgattgtaagtcccatgaatacacaactccactgtctttaaaagtcattcaagagtctcattatttttgtttttatttaaccctttcttcaatacaaaaagccaacaaaccaagactaagggggtgaccatgcaattccattttgtgtctgtgaacataggtgtgcttcccaaatacattaacaagctcttacttccccctaacccctatgaactcttgataacaccaagagtagcaccttcagaatatattgaataggcattaaatgcaaaaatatatatgtagccagacagtttatgagaatgaccctgtcaagcttcattattacgtggcaaaatccctctggcccacacagatctgtaattcactaggctcgtgtttgctacaaatagtgctaataaagttaaattgcacgtgcaatacggaacactgtcaatggactgcaccttgtgaaggaaaaacatgcttaagggggtgtaatgaaaatgatgtagacattttaagcattttctacacagcgagaaaacttcgtaagaacatgttacgtgtgcaacaggtaaacagaaatcctttcataaagcaccagcagtgtttaaaaaatgagcttccattaatttttactttttatgggttttgcttaaagatctcaacatggaaaaatcctgtcatggctctgaactgcacaatgcattgaaccgccgtccttcaattttcttcacactatcaacactgcagcattttgctgctttatcaaaatggtttattttaggaaactttttccacctttctgaatggaaagaggttttcacaaatgttttaaactcatcgttctaaaatcaagtgcacctacaccaactgctctcaaaatgtgaactgacttttttttttttttttttgccaaccctgtgtcacttagtgaggacctgacacaatccctacagggtgtctgtcagtgggcctcatggtaagagtcacaatttgcaaatttaggaccgtgggtcatgcagcgaaggggctggatggtaggaagggatgtgcccgcctctccacgcactcagctatacctcattcacagctccttgtgagtgtgtgcacaggaaataagccgagggtattatttttttatgttcatgagtcttgtaattaaaccgtgattcttgaaaggtgtaggtttgattactaggagataccaccgacatttttcaataaagtactgcaaaatgcttttgtgtctaccttgttattaacttttggggctgtatttagtaaaaataaatcaaggctatcggagcagttcaataacaaaggttactgttgagaaaaaagaccctatcatagatttacaagtgacaacgtggacaggcgtaacagagtgtgtatgtacttgaaaatgtgtactagtgaaaacgtccttgtctaaacaaacttcgttttcataacctagaacatgaaggaagattcttacacgagctggcttcaggacggccagggctgagtgtgaagtcagcagagctgttactgtggcaacctaatattgtgacctccatcttgaagagtctgcacatttaagctggggatagcgtttcttgacttctgtgaggctccggcaggggaagaggaagcattttaatacatatgc

SEQ ID NO: 152507 - DNA, 86 bp, Artificial Sequence
  derived and/or modified sequence
caccatgagtcattaggtaaatgcaaatcaaaaccacaatgaaatacttcacacccatgaagatggctataataaaaaaacagaca

SEQ ID NO: 152508 - DNA, 2004 bp, Artificial Sequence
  derived and/or modified sequence
atgaaggaaaagagtaagaatgcagccaagacaagaagagaaaaagaaaatggcgaattctacgagcttgccaaactgctgccactgccttccgccattacaagtcaactcgacaaggcttctatcatccggctgacgacatcatatctcaaaatgcgcgctgtatttcccgaagggctgggggatgcttgggggcagccgtctagggccggccctcttgacggagttgcaaaagaactgggatcacacctgctacagactcttgacggattcgtgtttgtggttgcctctgacggcaaaattatgtatattagtgagacagcgtccgtgcacctaggcctaagtcaggtcgaactcaccgggaacagcatctacgaatatattcacccatctgaccacgacgaaatgaccgcggtgctcaccgcgcaccagccacttcatcatcacctgttgcaagaatacgaaatcgaaaggtccttctttttgcgaatgaagtgcgtgcttgccaagcgtaacgctggactgacatgcagcggctacaaagtgatccactgtagcggttatcttaagatccgccagtatatgcttgacatgtccctctacgactcatgctatcagatcgtggggctcgtggcagtcgggcagtcattgcccccctctgccattacagaaatcaagctttatagcaacatgtttatgttcagggctagcctcgacttgaagctcattttcctcgacagtcgggtaaccgaggtgactgggtacgagcctcaagatctgatagagaagacactatatcaccacgtccatggatgtgacgtcttccacctccgctatgctcaccaccttctgctggtcaagggccaggtcacaactaagtattacaggcttctgtccaaacgcgggggatgggtctgggtgcagtcatacgccacagtggtacataacagccgctcctctcgccctcattgcatcgtgtccgtgaactatgtgctcaccgaaatagaatacaaggagctgcagttgtctttggaacaagtttctacagctaagagccaggactcctggagaacagctctgagcacgagccaggagaccagaaaacttgttaaaccgaagaatacgaagatgaagaccaaattaagaaccaacccttatccccctcagcaatacagtagttttcagatggacaaacttgaatgcggccagctcggcaattggcgcgcctcaccacccgcctccgccgctgcacccccagagctccagcctcacagtgaaagtagcgatttgctgtacaccccatcttactccttacctttctcgtaccactacggccacttccctctcgactcccatgtgttttcatccaaaaagccaatgctgcccgccaaatttggacagccacaaggaagcccctgcgaggttgccaggttcttcctgtcaacgctgcccgcttccggcgaatgccagtggcactatgctaatcccttagtcccctcatcctcttccccagccaagaaccccccagaaccacctgccaacaccgcccggcactcattagtgccatcctatgaagcccccgcggccgctgtccgccgattcggcgaggacactgctccaccatcttttccatcttgcggtcactatagggaagagcccgctttggggcctgccaaagctgcaaggcaggcagctcgcgacggagctcggctagcccttgccagggcagctccagagtgttgcgcccctccaactccagaagcacccggggcgcctgcccagctcccctttgtcctgctgaattaccatcgcgtgttagctcggagagggcctctgggcggcgcagccccagcggcctctggtttggcatgtgcaccaggcggaccagaggcagctactggagctctgcggctgaggcacccttctcctgctgctacctcgccccctggagccccactgcctcactacctgggagcatctgtgatcattacgaacggtcgctag

SEQ ID NO: 152509 - DNA, 2004 bp, Artificial Sequence
  derived and/or modified sequence
atgaaggagaagagcaagaatgctgccaagacccggcgggagaaggaaaatggagagttctatgagctggccaagctgctgcccctgcccagcgccatcaccagccagctggacaaggccagcatcatccggctgaccaccagctacctgaagatgagagctgtgtttcctgagggcctgggagatgcctggggccagcccagccgggccggccccctggatggagtggccaaggagctgggcagccacctgctgcagaccctggatggctttgtgtttgtggtggccagtgatggcaagatcatgtacatcagcgagacagcctctgtgcacctgggcctgagccaggtggagctgaccggcaacagcatctatgagtacatccaccccagcgaccatgatgagatgacagctgtgctgacagcccaccagcccctgcaccaccacctgctgcaggagtatgaaattgaaagaagcttcttcctgaggatgaagtgtgtgctggccaagagaaatgccggcctgacctgcagcggctacaaggtgatccactgcagcggctacctgaagatccggcagtacatgctggacatgagcctgtatgacagctgctaccagatcgtgggcctggtggccgtgggccagagcctgccccccagcgccatcacagagatcaagctgtacagcaacatgttcatgttccgggccagcctggacctgaagctgatcttcctggacagccgggtgacagaggtgacaggctatgagccccaggacctgattgagaagaccctgtaccaccacgtgcacggctgtgatgtgttccacctgcgctatgcccaccacctgctgctggtgaagggccaggtgaccaccaagtactaccgcctgctgagcaagaggggcggctgggtgtgggtgcagagctatgccaccgtggtgcacaacagccgcagcagccggccccactgcatcgtgtctgtgaactacgtgctgacagaaattgagtacaaggagctgcagctgagcctggagcaggtgtccacagccaagagccaggacagctggaggacagccctgagcaccagccaggagaccaggaagctggtgaagcccaagaacaccaagatgaagaccaagctgcggaccaacccctacccaccccagcagtacagcagcttccagatggacaagctggagtgtggccagctgggcaactggagggccagccccccagccagcgctgctgcccctcctgagctgcagccccacagcgagagcagtgacctgctgtacacccccagctacagcctgcccttctcctaccactacggccacttccccctggacagccacgtgttcagcagcaagaagcccatgctgcctgccaagtttggccagccccagggcagcccctgtgaggtggcccgcttcttcctgagcaccctgcctgccagcggggagtgccagtggcactacgccaaccccctggtgcccagcagcagcagccctgccaagaaccccccagagcccccagccaacacagcccggcacagcctggtgcccagctatgaggccccagctgctgctgtgagaagatttggagaggacacagccccacccagcttccccagctgtggccactaccgggaggagcccgccctgggccctgccaaggccgcccggcaggccgccagagatggagcccggctggccctggcccgggccgcccctgagtgctgtgccccacccaccccagaggcccctggggccccagcccagctgccctttgtgctgctgaactaccaccgggtgctggcccggcggggccccctgggcggggccgccccagctgccagcggcctggcctgtgcccctgggggccctgaggccgccactggagccctgcggctgcggcaccccagccctgctgccaccagccccccaggggcccccctgccccactacctgggcgccagcgtcatcatcaccaatggaagatag

SEQ ID NO: 152510 - DNA, 2004 bp, Artificial Sequence
  derived and/or modified sequence
atgaaggagaagagcaagaacgccgccaagacccggcgggagaaggagaatggggagttctacgaattagctaagctgttgccactgccaagcgctatcacctcccagttagacaaggcatctattataaggttgacaacttcctacctgaagatgcgtgccgtgttccccgagggcctgggggacgcctggggacagcccagcagggccgggccactggacggggtggccaaggaacttgggtcccacttactgcagacactggatggttttgtgtttgtcgtggccagcgatggcaagatcatgtacatatccgaaacagcctcagtgcacttagggttgtcacaggtagagctgactggcaactctatctatgagtatattcacccaagcgatcatgacgaaatgaccgccgtgctgaccgcccatcagcctctacatcaccatctcttacaggagtatgagattgagaggagtttttttctccgaatgaagtgcgtgctggcaaagaggaatgcgggccttacttgttcaggttataaagttatccattgttcaggctatttaaagatccgccagtatatgctggacatgtcactgtatgacagctgttaccagatcgtggggctggtggccgtgggccaatcgctcccccccagtgcaatcacagagatcaaactatacagtaatatgtttatgtttagagctagtctggacttgaaactgatctttttggactcccgggtcaccgaagtgacaggctacgagccccaggatcttatagaaaagaccctgtaccaccacgttcacggatgtgacgttttccacctgagatacgcacaccatctcctactcgtgaaaggccaagtgaccactaagtattaccgattgttaagtaagagggggggttgggtgtgggtgcaatcgtatgccacagtcgtgcataactctagaagctcccgacctcattgcatcgtgagtgtgaactacgtattgacagaaatcgaatacaaagagcttcagctctctctggagcaagtgagtacagctaagtcccaggacagttggcggacagccctgtccacatcacaagaaacaaggaagctcgtcaagccaaagaatacgaaaatgaaaaccaagctgcgcacaaacccgtatcccccccagcagtactcttccttccagatggacaaattagaatgtggtcagctcggcaactggcgcgcctctccgcccgcatctgcagccgcccctccagagctgcagccccacagtgagtcttccgacctgctgtacaccccaagctattcacttccattctcatatcactatggccatttccccctggacagccacgtcttctcaagtaagaaaccaatgctccccgctaaatttgggcaacctcaagggtctccttgtgaagtagctaggtttttcctgagcacccttcccgcaagcggagagtgccagtggcactatgcgaacccgttggtgccttcctcaagcagcccggccaaaaaccctccagaaccgcctgcgaacacagcaagacacagcctcgtaccatcctacgaggcaccggccgcggccgtccgcagattcggagaggatacagcccctccatcttttccgtcctgtggtcactatagggaggagccggcgctcggccctgccaaggcagctagacaggccgcgagagacggagctcgcctcgctctcgccagggcggcccccgaatgctgcgctccccccacacctgaagcgcctggcgcaccagcccagctaccctttgtcctgctgaattaccatagagtattagcacgacgtggaccactggggggggcagctccagcagcatctggcctggcatgtgcccccggtgggcccgaggccgctacaggtgccttaagactgagacacccatccccagcagccactagcccacccggtgctcctttgccacattacctgggagcctccgtaatcatcacaaatggacgctag

SEQ ID NO: 152511 - DNA, 2004 bp, Artificial Sequence
  derived and/or modified sequence
atgaaagagaaaagcaagaatgctgctaaaactcgcagggagaaggagaacggtgaattttacgagctcgccaaacttttgccactgccttccgctattacgtcccagctagataaagcctcaataatccgcctaaccacctcttacctcaaaatgcgcgcagtttttcctgaaggcctcggcgacgcctggggtcagccaagtagggcagggcctctcgacggagtggcaaaggagctgggatcacatctcctccagacactggatggcttcgtgttcgtagtcgccagcgatggtaagatcatgtacatttccgaaacggcctcagtccacctgggcctcagtcaggtggaactgactgggaattccatttatgagtacattcacccatccgatcacgatgagatgactgcagtactcaccgcacaccaacccctccatcaccatttgctccaggagtacgagatcgagaggtctttctttttgaggatgaaatgcgtccttgccaaaaggaacgccggactcacatgcagtgggtacaaggttatccattgtagtggctatcttaaaattcggcaatatatgctcgatatgtctttgtatgactcttgctaccagatcgtcgggctggttgctgtcggccagagccttcctccgagcgcaattactgaaattaagttgtactctaatatgtttatgtttagggctagtttggacctgaagttgatctttctggattcgcgggtcacagaggtcacaggatacgagccccaagacctcattgagaaaacactttatcatcatgtacacggctgcgacgtattccacttgaggtatgcccatcacctcctgctggtaaaaggccaagtcacgacaaagtactacagattgctgtccaagagaggaggctgggtgtgggtccaatcatacgcaacagtggtgcataatagtagatcgtcgcgtccacactgtatcgtgtctgtgaactacgtactgaccgagatagagtacaaggaactccaattgtccctggagcaggtgagcacagccaaatcccaggactcatggcggaccgcactgtctacaagccaggagaccaggaaacttgtcaagcctaaaaacactaagatgaagacaaagctccgaaccaacccttatcctcctcagcaatattcaagttttcagatggacaagctggaatgcggccagctagggaattggcgggcaagtcctcctgcctccgcggctgcccctcctgagctacagcctcatagcgagtcctcagacttattatataccccgagctactcattacccttctcttaccactatggccattttcccttggactctcatgtttttagctctaagaaacccatgttgcctgcaaagtttggccagccacagggatctccctgcgaggtggcgagatttttcctgagtacacttcccgcttcaggagagtgtcagtggcattatgccaaccccctggtgccgagctccagtagcccagcgaagaaccctccagaacccccagccaacactgctcggcattcacttgtgccctcctacgaggcacccgcagccgcagtgagaaggtttggtgaggacaccgctcccccatcatttccatcatgtggacactaccgcgaggaacctgcactagggccagctaaagccgctcgccaggctgcgcgagatggcgctcggctcgctctggctagagcggctccggagtgctgtgcacccccaactccagaagcccctggagctcctgcacagctcccctttgtcctattaaattatcacagggtgctcgcccgtcgcggaccactgggaggggcagcacccgcagctagcggcctggcgtgcgcccctgggggtccggaagcagcgactggggcactaagactcaggcacccatctccagcggctaccagcccacctggtgcaccattaccacattatctcggcgctagtgtcattatcacgaacgggcgatag

SEQ ID NO: 152512 - DNA, 4442 bp, Artificial Sequence
  derived and/or modified sequence
ccgcacgtggacagcggaggtgctgcgcctagccacacatcgcgggctccggcgctgcgtctccaggcacagggagccgccaggaagggcaggagagcgcgcccgggccagggcccggccccagccgcctgcgactcgctcccctccgctgggctcccgctccatggctccgcggccaccgccgcccctgtcgccctccggtccggaggggccttgccgcagccggttcgagcactcgacgaaggagtaagcagcgcctccgcctccgcgccggccgcccccaccccccaggaaggccgaggcaggagaggcaggagggaggaaacaggagcgagcaggaacggggctccggttgctgcaggacggtccagcccggaggaggctgcgctccgggcagcggcgggcggcgccgccgggttgctcggagctcaggcccggcggctgcggggaggcgtctcggaaccccgggaggccccccgcacctgcccgcggcccactccgcggactcacctggctcccggctcccccttccccatccccgccgccgcagcccgagcggggctccgcgggcctggagcacggccgggtctaatatgcccggagccgaggcgcgatgaaggagaagtccaagaatgcggccaagaccaggagggagaaggaaaatggcgagttttacgagcttgccaagctgctcccgctgccgtcggccatcacttcgcagctggacaaagcgtccatcatccgcctcaccacgagctacctgaagatgcgcgccgtcttccccgaaggtttaggagacgcgtggggacagccgagccgcgccgggcccctggacggcgtcgccaaggagctgggatcgcacttgctgcagactttggatggatttgtttttgtggtagcatctgatggcaaaatcatgtatatatccgagaccgcttctgtccatttaggcttatcccaggtggagctcacgggcaacagtatttatgaatacatccatccttctgaccacgatgagatgaccgctgtcctcacggcccaccagccgctgcaccaccacctgctccaagagtatgagatagagaggtcgttctttcttcgaatgaaatgtgtcttggcgaaaaggaacgcgggcctgacctgcagcggatacaaggtcatccactgcagtggctacttgaagatcaggcagtatatgctggacatgtccctgtacgactcctgctaccagattgtggggctggtggccgtgggccagtcgctgccacccagtgccatcaccgagatcaagctgtacagtaacatgttcatgttcagggccagccttgacctgaagctgatattcctggattccagggtgaccgaggtgacggggtacgagccgcaggacctgatcgagaagaccctataccatcacgtgcacggctgcgacgtgttccacctccgctacgcacaccacctcctgttggtgaagggccaggtcaccaccaagtactaccggctgctgtccaagcggggcggctgggtgtgggtgcagagctacgccaccgtggtgcacaacagccgctcgtcccggccccactgcatcgtgagtgtcaattatgtactcacggagattgaatacaaggaacttcagctgtccctggagcaggtgtccactgccaagtcccaggactcctggaggaccgccttgtctacctcacaagaaactaggaaattagtgaaacccaaaaataccaagatgaagacaaagctgagaacaaacccttaccccccacagcaatacagctcgttccaaatggacaaactggaatgcggccagctcggaaactggagagccagtccccctgcaagcgctgctgctcctccagaactgcagccccactcagaaagcagtgaccttctgtacacgccatcctacagcctgcccttctcctaccattacggacacttccctctggactctcacgtcttcagcagcaaaaagccaatgttgccggccaagttcgggcagccccaaggatccccttgtgaggtggcacgctttttcctgagcacactgccagccagcggtgaatgccagtggcattatgccaaccccctagtgcctagcagctcgtctccagctaaaaatcctccagagccaccggcgaacactgctaggcacagcctggtgccaagctacgaagcgcccgccgccgccgtgcgcaggttcggcgaggacaccgcgcccccgagcttcccgagctgcggccactaccgcgaggagcccgcgctgggcccggccaaagccgcccgccaggccgcccgggacggggcgcggctggcgctggcccgcgcggcacccgagtgctgcgcgcccccgacccccgaggccccgggcgcgccggcgcagctgcccttcgtgctgctcaactaccaccgcgtgctggcccggcgcggaccgctggggggcgccgcacccgccgcctccggcctggcctgcgctcccggcggccccgaggcggcgaccggcgcgctgcggctccggcacccgagccccgccgccacctccccgcccggcgcgcccctgccgcactacctgggcgcctcggtcatcatcaccaacgggaggtgacccgctggccgcccgcgccaggagcctggacccggcctcccggggctgcggcgccaccgagcccggcaaatgcgcacgacctacattaatttatgcagagacagctgtttgaattggaccccgccgccgacttgcggatttccaccgcggaggccccgcgcgccggtgccgagggccgaggagcgcccgggtccgggcaggtgaccgcccgcctctgtcctgcgagggccggtgcgacccagttgctgggggcttggtttcctcaccttgaaatcgggcttcacgcgtcttgccttgtccccaacgttccacaacagtcccgctgggggattgaagcggtttcactccgcaaatatcctccactttcaggagggaaaacccaccctaccacagtccgctcttccaagtggacggcagacctgggaggggacgcctgtgtcacgagcccttttagatgcttaggtgaaggcagaagtgatgattgtaagtcccatgaatacacaactccactgtctttaaaagtcattcaagagtctcattatttttgtttttatttaaccctttcttcaatacaaaaagccaacaaaccaagactaagggggtgaccatgcaattccattttgtgtctgtgaacataggtgtgcttcccaaatacattaacaagctcttacttccccctaacccctatgaactcttgataacaccaagagtagcaccttcagaatatattgaataggcattaaatgcaaaaatatatatgtagccagacagtttatgagaatgaccctgtcaagcttcattattacgtggcaaaatccctctggcccacacagatctgtaattcactaggctcgtgtttgctacaaatagtgctaataaagttaaattgcacgtgcaatacggaacactgtcaatggactgcaccttgtgaaggaaaaacatgcttaagggggtgtaatgaaaatgatgtagacattttaagcattttctacacagcgagaaaacttcgtaagaacatgttacgtgtgcaacaggtaaacagaaatcctttcataaagcaccagcagtgtttaaaaaatgagcttccattaatttttactttttatgggttttgcttaaagatctcaacatggaaaaatcctgtcatggctctgaactgcacaatgcattgaaccgccgtccttcaattttcttcacactatcaacactgcagcattttgctgctttatcaaaatggtttattttaggaaactttttccacctttctgaatggaaagaggttttcacaaatgttttaaactcatcgttctaaaatcaagtgcacctacaccaactgctctcaaaatgtgaactgacttttttttttttttttttgccaaccctgtgtcacttagtgaggacctgacacaatccctacagggtgtctgtcagtgggcctcatggtaagagtcacaatttgcaaatttaggaccgtgggtcatgcagcgaaggggctggatggtaggaagggatgtgcccgcctctccacgcactcagctatacctcattcacagctccttgtgagtgtgtgcacaggaaataagccgagggtattatttttttatgttcatgagtcttgtaattaaaccgtgattcttgaaaggtgtaggtttgattactaggagataccaccgacatttttcaataaagtactgcaaaatgcttttgtgtctaccttgttattaacttttggggctgtatttagtaaaaataaatcaaggctatcggagcagttcaataacaaaggttactgttgagaaaaaagaccctatcatagatttacaag

SEQ ID NO: 152513 - DNA, 2004 bp, Artificial Sequence
  derived and/or modified sequence
atgaaggagaagagcaagaacgccgccaagaccagaagagagaaggagaacggcgagttctacgagctggccaagctgctgcccctgcccagcgccatcaccagccagctggacaaggccagcatcatcagactgaccaccagctacctgaagatgagagccgtgttccccgagggcctgggcgacgcctggggccagcccagcagagccggccccctggacggcgtggccaaggagctgggcagccacctgctgcagaccctggacggcttcgtgttcgtggtggccagcgacggcaagatcatgtacatcagcgagaccgccagcgtgcacctgggcctgagccaggtggagctgaccggcaacagcatctacgagtacatccaccccagcgaccacgacgagatgaccgccgtgctgaccgcccaccagcccctgcaccaccacctgctgcaggagtacgagatcgagagaagcttcttcctgagaatgaagtgcgtgctggccaagagaaacgccggcctgacctgcagcggctacaaggtgatccactgcagcggctacctgaagatcagacagtacatgctggacatgagcctgtacgacagctgctaccagatcgtgggcctggtggccgtgggccagagcctgccccccagcgccatcaccgagatcaagctgtacagcaacatgttcatgttcagagccagcctggacctgaagctgatcttcctggacagcagagtgaccgaggtgaccggctacgagccccaggacctgatcgagaagaccctgtaccaccacgtgcacggctgcgacgtgttccacctgagatacgcccaccacctgctgctggtgaagggccaggtgaccaccaagtactacagactgctgagcaagagaggcggctgggtgtgggtgcagagctacgccaccgtggtgcacaacagcagaagcagcagaccccactgcatcgtgagcgtgaactacgtgctgaccgagatcgagtacaaggagctgcagctgagcctggagcaggtgagcaccgccaagagccaggacagctggagaaccgccctgagcaccagccaggagaccagaaagctggtgaagcccaagaacaccaagatgaagaccaagctgagaaccaacccctaccccccccagcagtacagcagcttccagatggacaagctggagtgcggccagctgggcaactggagagccagcccccccgccagcgccgccgccccccccgagctgcagccccacagcgagagcagcgacctgctgtacacccccagctacagcctgcccttcagctaccactacggccacttccccctggacagccacgtgttcagcagcaagaagcccatgctgcccgccaagttcggccagccccagggcagcccctgcgaggtggccagattcttcctgagcaccctgcccgccagcggcgagtgccagtggcactacgccaaccccctggtgcccagcagcagcagccccgccaagaacccccccgagccccccgccaacaccgccagacacagcctggtgcccagctacgaggcccccgccgccgccgtgagaagattcggcgaggacaccgccccccccagcttccccagctgcggccactacagagaggagcccgccctgggccccgccaaggccgccagacaggccgccagagacggcgccagactggccctggccagagccgcccccgagtgctgcgccccccccacccccgaggcccccggcgcccccgcccagctgcccttcgtgctgctgaactaccacagagtgctggccagaagaggccccctgggcggcgccgcccccgccgccagcggcctggcctgcgcccccggcggccccgaggccgccaccggcgccctgagactgagacaccccagccccgccgccaccagcccccccggcgcccccctgccccactacctgggcgccagcgtgatcatcaccaacggcagatag

SEQ ID NO: 152514 - protein, 1232 aa, Artificial Sequence
  derived and/or modified sequence
MANGVIPPPGGASPLPQVRVPLEEPPLSPDVEEEDDDLGKTLAVSRFGDLISKPPAWDPEKPSRSYSERDFEFHRHTSHHTHHPLSARLPPPHKLRRLPPTSARHTRRKRKKEKTSAPPSEGTPPIQEEGGAGVDEEEEEEEEEEGESEAEPVEPPHSGTPQKAKFSIGSDEDDSPGLPGRAAVTKPLPSVGPHTDKSPQHSSSSPSPRARASRLAGEKSRPWSPSASYDLRERLCPGSALGNPGGPEQQVPTDEAEAQMLGSADLDDMKSHRLEDNPGVRRHLVKKPSRTQGGRGSPSGLAPILRRKKKKKKLDRRPHEVFVELNELMLDRSQEPHWRETARWIKFEEDVEEETERWGKPHVASLSFRSLLELRRTIAHGAALLDLEQTTLPGIAHLVVETMIVSDQIRPEDRASVLRTLLLKHSHPNDDKDSGFFPRNPSSSSMNSVLGNHHPTPSHGPDGAVPTMADDLGEPAPLWPHDPDAKEKPLHMPGGDGHRGKSLKLLEKIPEDAEATVVLVGCVPFLEQPAAAFVRLNEAVLLESVLEVPVPVRFLFVMLGPSHTSTDYHELGRSIATLMSDKLFHEAAYQADDRQDLLSAISEFLDGSIVIPPSEVEGRDLLRSVAAFQRELLRKRREREQTKVEMTTRGGYTAPGKELSLELGGSEATPEDDPLLRTGSVFGGLVRDVRRRYPHYPSDLRDALHSQCVAAVLFIYFAALSPAITFGGLLGEKTEGLMGVSELIVSTAVLGVLFSLLGAQPLLVVGFSGPLLVFEEAFFKFCRAQDLEYLTGRVWVGLWLVVFVLALVAAEGSFLVRYISPFTQEIFAFLISLIFIYETFYKLYKVFTEHPLLPFYPPEGALEGSLDAGLEPNGSALPPTEGPPSPRNQPNTALLSLILMLGTFFIAFFLRKFRNSRFLGGKARRIIGDFGIPISILVMVLVDYSITDTYTQKLTVPTGLSVTSPDKRSWFIPPLGSARPFPPWMMVAAAVPALLVLILIFMETQITALIVSQKARRLLKGSGFHLDLLLIGSLGGLCGLFGLPWLTAATVRSVTHVNALTVMRTAIAPGDKPQIQEVREQRVTGVLIASLVGLSIVMGAVLRRIPLAVLFGIFLYMGVTSLSGIQLSQRLLLILMPAKHHPEQPYVTKVKTWRMHLFTCIQLGCIALLWVVKSTAASLAFPFLLLLTVPLRHCLLPRLFQDRELQALDSEDAEPNFDEDGQDEYNELHMPV

SEQ ID NO: 152515 - DNA, 3699 bp, Artificial Sequence
  derived and/or modified sequence
atggccaacggcgtgatccccccccccggcggcgccagccccctgccccaggtgagagtgcccctggaggagccccccctgagccccgacgtggaggaggaggacgacgacctgggcaagaccctggccgtgagcagattcggcgacctgatcagcaagccccccgcctgggaccccgagaagcccagcagaagctacagcgagagagacttcgagttccacagacacaccagccaccacacccaccaccccctgagcgccagactgccccccccccacaagctgagaagactgccccccaccagcgccagacacaccagaagaaagagaaagaaggagaagaccagcgccccccccagcgagggcaccccccccatccaggaggagggcggcgccggcgtggacgaggaggaggaggaggaggaggaggaggagggcgagagcgaggccgagcccgtggagcccccccacagcggcaccccccagaaggccaagttcagcatcggcagcgacgaggacgacagccccggcctgcccggcagagccgccgtgaccaagcccctgcccagcgtgggcccccacaccgacaagagcccccagcacagcagcagcagccccagccccagagccagagccagcagactggccggcgagaagagcagaccctggagccccagcgccagctacgacctgagagagagactgtgccccggcagcgccctgggcaaccccggcggccccgagcagcaggtgcccaccgacgaggccgaggcccagatgctgggcagcgccgacctggacgacatgaagagccacagactggaggacaaccccggcgtgagaagacacctggtgaagaagcccagcagaacccagggcggcagaggcagccccagcggcctggcccccatcctgagaagaaagaagaagaagaagaagctggacagaagaccccacgaggtgttcgtggagctgaacgagctgatgctggacagaagccaggagccccactggagagagaccgccagatggatcaagttcgaggaggacgtggaggaggagaccgagagatggggcaagccccacgtggccagcctgagcttcagaagcctgctggagctgagaagaaccatcgcccacggcgccgccctgctggacctggagcagaccaccctgcccggcatcgcccacctggtggtggagaccatgatcgtgagcgaccagatcagacccgaggacagagccagcgtgctgagaaccctgctgctgaagcacagccaccccaacgacgacaaggacagcggcttcttccccagaaaccccagcagcagcagcatgaacagcgtgctgggcaaccaccaccccacccccagccacggccccgacggcgccgtgcccaccatggccgacgacctgggcgagcccgcccccctgtggccccacgaccccgacgccaaggagaagcccctgcacatgcccggcggcgacggccacagaggcaagagcctgaagctgctggagaagatccccgaggacgccgaggccaccgtggtgctggtgggctgcgtgcccttcctggagcagcccgccgccgccttcgtgagactgaacgaggccgtgctgctggagagcgtgctggaggtgcccgtgcccgtgagattcctgttcgtgatgctgggccccagccacaccagcaccgactaccacgagctgggcagaagcatcgccaccctgatgagcgacaagctgttccacgaggccgcctaccaggccgacgacagacaggacctgctgagcgccatcagcgagttcctggacggcagcatcgtgatcccccccagcgaggtggagggcagagacctgctgagaagcgtggccgccttccagagagagctgctgagaaagagaagagagagagagcagaccaaggtggagatgaccaccagaggcggctacaccgcccccggcaaggagctgagcctggagctgggcggcagcgaggccacccccgaggacgaccccctgctgagaaccggcagcgtgttcggcggcctggtgagagacgtgagaagaagatacccccactaccccagcgacctgagagacgccctgcacagccagtgcgtggccgccgtgctgttcatctacttcgccgccctgagccccgccatcaccttcggcggcctgctgggcgagaagaccgagggcctgatgggcgtgagcgagctgatcgtgagcaccgccgtgctgggcgtgctgttcagcctgctgggcgcccagcccctgctggtggtgggcttcagcggccccctgctggtgttcgaggaggccttcttcaagttctgcagagcccaggacctggagtacctgaccggcagagtgtgggtgggcctgtggctggtggtgttcgtgctggccctggtggccgccgagggcagcttcctggtgagatacatcagccccttcacccaggagatcttcgccttcctgatcagcctgatcttcatctacgagaccttctacaagctgtacaaggtgttcaccgagcaccccctgctgcccttctacccccccgagggcgccctggagggcagcctggacgccggcctggagcccaacggcagcgccctgccccccaccgagggcccccccagccccagaaaccagcccaacaccgccctgctgagcctgatcctgatgctgggcaccttcttcatcgccttcttcctgagaaagttcagaaacagcagattcctgggcggcaaggccagaagaatcatcggcgacttcggcatccccatcagcatcctggtgatggtgctggtggactacagcatcaccgacacctacacccagaagctgaccgtgcccaccggcctgagcgtgaccagccccgacaagagaagctggttcatcccccccctgggcagcgccagacccttccccccctggatgatggtggccgccgccgtgcccgccctgctggtgctgatcctgatcttcatggagacccagatcaccgccctgatcgtgagccagaaggccagaagactgctgaagggcagcggcttccacctggacctgctgctgatcggcagcctgggcggcctgtgcggcctgttcggcctgccctggctgaccgccgccaccgtgagaagcgtgacccacgtgaacgccctgaccgtgatgagaaccgccatcgcccccggcgacaagccccagatccaggaggtgagagagcagagagtgaccggcgtgctgatcgccagcctggtgggcctgagcatcgtgatgggcgccgtgctgagaagaatccccctggccgtgctgttcggcatcttcctgtacatgggcgtgaccagcctgagcggcatccagctgagccagagactgctgctgatcctgatgcccgccaagcaccaccccgagcagccctacgtgaccaaggtgaagacctggagaatgcacctgttcacctgcatccagctgggctgcatcgccctgctgtgggtggtgaagagcaccgccgccagcctggccttccccttcctgctgctgctgaccgtgcccctgagacactgcctgctgcccagactgttccaggacagagagctgcaggccctggacagcgaggacgccgagcccaacttcgacgaggacggccaggacgagtacaacgagctgcacatgcccgtgtag

SEQ ID NO: 152516 - DNA, 3699 bp, Artificial Sequence
  derived and/or modified sequence
atggccaacggcgtgatcccaccacccgggggggcctcaccactgccacaggtgcgggtccctttagaagagccgccacttagccccgacgtggaggaggaagacgacgacctcggaaaaaccctcgctgtctcccgattcggcgacctcattagcaagccacccgcttgggaccccgagaaacctagcagatcctatagcgaaagagactttgagtttcaccgccacaccagtcatcacacccatcacccactgtcggcccgactgcccccacctcataaactgcggcgcctccctcctacctcagctaggcacacaagacggaagaggaagaaggaaaagacaagtgcacccccctccgaaggcacccctccgatccaggaggaggggggggcaggggtggacgaggaagaagaggaggaagaggaggaagagggggaaagcgaggcagagcccgtggagccacctcactccggtacgcctcagaaggctaagttctccattggctccgatgaggatgactcaccgggtctccccggccgcgccgccgtcacaaaaccactcccctcggtcgggcctcacactgataagtcaccccaacattcctccagttcgccaagtccccgggctagagcatctaggctcgcaggcgagaagagccgcccttggtccccaagcgcatcatatgatttgcgggaacggctctgcccgggctcagcacttggaaaccccggcggtccagagcagcaggtcccgacggatgaggccgaggcccagatgctgggtagtgccgatctggacgacatgaagtctcaccgtttggaggataaccccggcgtgcgcagacacttggtgaagaaaccctccaggactcagggcggccgcggctctccctccggccttgccccgatccttcgcagaaaaaagaaaaagaaaaagctagataggaggccacatgaggtgtttgtagagctgaacgaacttatgcttgaccggagccaggagccgcattggagagaaacagcacggtggattaaattcgaggaagacgttgaggaggagacggagcgatgggggaaaccccacgtggcctccttaagttttcggagcttactggaactgcgcagaactatagctcatggagcggcgttgctggaccttgagcagacaaccctgccggggattgctcatttggtagtcgagaccatgattgtgtcagaccaaatcaggccagaagaccgtgcttcagtactgagaaccctccttctgaagcactcccatccaaatgatgataaagacagtggattctttccccggaatccttcctccagctcaatgaatagtgtgcttggaaatcatcacccgactcccagccacggaccggatggcgctgtccccacaatggctgatgacctgggcgagccagctcccttatggcctcatgacccggacgcaaaagagaaacccctgcacatgcccgggggagacggacaccgggggaagtcactgaagctcttagagaagatcccagaagacgctgaggcaaccgttgttctggtcggttgtgtgcccttcctagagcagcccgcggcagcttttgtgcgcctgaatgaggcagtgttgcttgaaagcgtattggaggtgccggtgcctgtcaggttcttgttcgttatgttgggtcccagtcacacgagcacggactaccatgaactcgggagatccatcgctactctgatgtccgataaattgttccacgaggcagcttatcaagcagacgaccggcaagatctgctgtcggccatttcagagttcctggacggttcaatcgtaatccctcctagcgaagtggaggggcgcgatttactgagatcagttgcagccttccagagagagctgctccggaagagacgtgagcgcgagcagacaaaggtagaaatgacaacgcgagggggctacaccgctcctggcaaggaactctccctggagctggggggtagtgaggcgacgccagaggacgaccccctgctccgaaccgggtccgttttcggcggcctggttagggatgtacgtcgccgctatccacattatccatccgacctgcgcgatgccctgcactctcagtgcgtcgcggcagtgctctttatttacttcgctgccctttccccagctattaccttcgggggtctgcttggagagaaaacagagggcctgatgggggtctctgagctgatcgtgagtacagcggtgctgggcgtactgttctccctcctaggcgcacagccactgctggtcgtcggattttctgggcctcttctggtctttgaagaggccttttttaaattctgccgagcccaggacctcgagtacctgaccggacgcgtgtgggtgggcctttggctggtggtttttgttctggcacttgtggccgctgagggatcttttctggtgcgatacatctctccattcactcaggagattttcgctttcctaatctcactaatctttatttacgagacattttacaagctttacaaagtgttcacggagcatccactgttaccgttctatccccctgaaggcgctctcgaggggagcctcgacgccgggttggaacccaatggttccgccctaccacccaccgaaggcccgccaagcccccgcaatcaacccaatacagccctcttgtcactcatcctgatgctgggaaccttttttatcgctttcttcctgcggaagttcaggaactccagattcctgggagggaaagctaggcgcataatcggagatttcggcattccgatttccatcctggtgatggtactggtggattactccatcacggatacttacacacagaagctgaccgtcccaaccggactgtcagtgacctctcctgacaaacggtcctggttcattccgcccttggggagtgcccgcccatttccaccttggatgatggtggcagccgcagttcctgctctgctggttcttattttgatcttcatggaaacacagatcacggcattaatcgtctcccaaaaggcccgcaggttactgaagggctctggatttcacttggatctgctactcataggtagcctgggagggctgtgtggattattcggcctgccctggcttacagctgccacagtgcggagtgtcacacacgtgaacgcactcaccgtaatgagaactgcaattgcaccaggagacaagcctcagattcaagaggtgcgcgagcagagggtcaccggagtgctgatcgcgagtcttgttggactgtccattgtgatgggggcagtcctgcggaggattcccctcgccgtgttgttcgggattttcttgtacatgggagtgactagcttgagcggcattcagctgagccaacgcctgctgctgatcctaatgcctgcaaagcatcacccagagcagccgtacgtgactaaagtgaagacatggcggatgcacctttttacatgtattcaactcgggtgcatcgctttgctgtgggttgtgaaaagcaccgcggcctctcttgccttcccctttctgttactgctgacagttcccctgcgtcactgcttgctcccaaggttgtttcaagaccgcgaactccaggccctcgacagtgaagatgccgagcccaactttgacgaagacgggcaggatgagtataacgagctgcacatgccagtgtag

SEQ ID NO: 152517 - DNA, 3699 bp, Artificial Sequence
  derived and/or modified sequence
atggctaatggtgtgattcccccacctggcggcgcatcccccctgccccaggttcgggtgcctctggaagagcccccactgagcccagatgtggaagaagaggacgacgatcttgggaaaaccctcgcagtttctagattcggggacctgatttctaaaccccctgcctgggatccggagaagccatcacgctcatattccgaacgggacttcgaatttcatcggcacacctcccatcacactcaccaccccctgtcggccaggctaccccctcctcataagttgaggcggcttcctccaacctccgccagacacacccgccggaagagaaaaaaggaaaagacttcagctccccccagtgaagggaccccgcccatccaggaggaggggggcgcgggcgtggatgaggaggaagaggaggaagaggaggaggagggtgagtcagaggcggaaccagttgagcctcctcattcaggtactccccagaaagctaaattttctatcggcagcgatgaagatgattcccccggcctcccaggtagagccgcagtgacaaaaccgctgccaagcgtaggacctcacactgacaagtcgcctcaacactcttcctcaagccctagtccaagagcccgtgcatctcggctggcgggcgagaaatcccggccatggtctcctagcgcgagctatgatttacgtgagcggctctgcccggggtccgctctaggcaatcctggtgggccggaacagcaagtaccaacggacgaagcagaggcacagatgctcggatctgccgatctggatgacatgaagagccacagactcgaggacaacccgggggttagacgccatttggtgaagaaacctagccggacacagggcgggcgcgggagcccatcagggctggcgcccatacttcggagaaaaaagaaaaagaaaaaacttgacagaagacctcatgaagtgttcgtggaactcaacgagctgatgctggatagaagccaggagccccactggagggagacagcgaggtggattaaattcgaagaggatgtggaagaagaaaccgaaaggtggggcaaaccccatgtggcttctctgtcttttaggtcactgctggagctccgcagaacgatagcccatggtgcagcattgctggacctagagcagactaccttgcccggcattgcacacctggtcgtggagactatgatcgtttcagatcaaatccgcccagaggaccgggccagcgtgctgaggacccttctgttgaaacacagccatcccaacgatgataaggacagtggattctttccaaggaacccctcctccagctccatgaattcagtgcttggcaaccaccacccgaccccatctcatggtccagatggagccgtgcccaccatggcagacgacctgggcgagcctgcacccctgtggccccatgaccccgatgccaaggagaagcccctgcacatgccaggaggtgacggacaccgggggaaaagcctcaagctgctggagaaaattcctgaggatgctgaagcgactgtagtgcttgtaggctgcgttccattcctggagcagcccgccgccgcctttgtgcgtctgaacgaggccgttctgctcgaatccgtgttggaggttccagtgcctgtacggttcctatttgttatgcttggaccttctcacactagcacggattatcatgaactgggacgctccattgccaccctcatgagcgataagcttttccatgaggccgcatatcaggccgacgataggcaagaccttctcagcgccatttccgagttcctggacggatctatagtcatcccccccagcgaggtcgaaggcagagacctgctaaggagtgtggccgcatttcagcgtgagctgctcaggaagagaagagaaagagagcaaactaaggtagaaatgactacgaggggcgggtacaccgccccaggaaaggagctcagtctggagctagggggctctgaggccacgccagaagatgatccgctgcttagaactgggtctgtatttggggggttagtgcgcgacgtgcgacggcgatatcctcactacccgtctgatttgagggacgctcttcactcccagtgcgtggccgctgtgctatttatttatttcgcagccttgtcccccgccattacctttggtggcctcctcggcgagaagaccgaaggtctgatgggcgtctcagagctgatcgtcagcaccgctgtcttaggggtgcttttttcactgttgggtgcccagcctttactcgttgtaggcttttcaggtccactgctcgtcttcgaagaggctttcttcaagttctgtagggcccaagaccttgagtatctaaccggaagggtgtgggttgggctgtggctcgtggttttcgtccttgcattggtggcagctgaagggtcatttctggtgcgatatatctccccttttacacaggagatcttcgcctttctgatctcgctgatctttatatacgaaaccttttataaactgtataaggtgttcacagagcaccccttgctgcccttttaccctcctgagggggcactcgagggaagcctggacgcagggctggagcctaacgggtctgcactgccacccacagagggccccccctcccctcggaaccaaccaaataccgctctcctatctctgatcctcatgctcgggacatttttcattgccttcttcctgcgtaagttccgcaacagccggttcttgggtggcaaagcgcgccgaattatcggggatttcggtatccccatctcaatcttagtcatggtgctcgtggactacagcatcactgacacatacactcaaaaactcacagtgcctaccggacttagcgtgacctctccggacaagcgaagctggtttattcctcctctgggtagcgcacggcccttccctccatggatgatggtggccgccgcagtaccagctctgctggtgctaatactgatttttatggagacccagatcaccgctctcatagtttctcagaaggctaggaggctcctgaaaggctccgggtttcatttggacctgttgttgatcgggagcctgggaggcctgtgcgggctcttcggactgccctggctgactgctgccaccgtgaggtccgtaacccacgtgaatgctcttacggtaatgcggaccgcaattgcgccgggtgacaaacctcagatccaggaagtccgcgagcagagggtgacaggggtgttgattgcctcactggtcgggctgtcaattgtgatgggggccgtcctgcgtagaataccccttgccgttttgtttggcatcttcctttacatgggcgtaacctctctctccgggatccagctctctcagcggttgctgctgatccttatgccggcaaaacaccatcctgaacaaccgtatgtaaccaaagttaagacttggcgtatgcatttattcacgtgtatccagctgggctgtatagccctgctctgggtggtcaagtccaccgccgctagtcttgcttttccattcctgctccttctcacggtgcctctcaggcactgcctactccctcgactattccaggaccgcgagctgcaggccctcgatagtgaggacgccgagccgaactttgatgaagacggtcaggacgagtataacgagctgcacatgcctgtttag

SEQ ID NO: 152518 - DNA, 3699 bp, Artificial Sequence
  derived and/or modified sequence
atggctaacggcgtgatacctcccccaggaggcgcctctcctcttccccaggtgcgggtgcccctggaggagccaccattgagccccgatgtcgaggaagaggacgacgatctggggaaaacattggccgtctctcgctttggtgacctcatcagtaagcctcccgcttgggatcctgaaaaaccttctagatcctactccgagcgcgatttcgaattccaccggcacacatcccaccacacccaccacccgttgtctgcaagactgccccccccacacaaactacggcgcctccctcccacgagtgcacgtcacacgcggcgaaagcggaagaaagagaagacgtccgcgccaccctcggaaggaaccccccccatccaggaagagggcggggctggagtggatgaagaagaagaggaggaagaagaggaggagggcgaatcagaggccgagcccgtcgagccaccacactccggaactcctcagaaggccaagttttcgatagggtccgatgaagacgatagcccaggtctgcccggaagggccgcagtcaccaagcctcttcccagcgtgggcccacacacagataaatcaccacagcacagctcaagctcaccttcacctcgcgcacgcgctagccgccttgctggggagaagtcaagaccttggtctccgagcgcttcatatgacttgcgcgaacgcctgtgtcccgggtcagcccttgggaacccgggaggccccgaacagcaggtccctactgacgaggcagaggcccagatgctaggcagcgccgacctggatgatatgaagtctcataggctggaggacaacccgggcgtaagaaggcacctcgttaagaagccttcaaggacccagggcgggcgggggtctccctcaggcctggcccctatactccggagaaaaaagaagaagaaaaaactggatcggagaccacacgaggtgttcgtagaactgaatgagctgatgcttgacaggtctcaggagccccactggagagaaactgcccgctggatcaagttcgaggaggatgtggaagaagagacggagaggtggggaaagcctcatgtggcttcactgtcctttcgttctcttttggaactgcgtcggacaatagcccacggcgcggcactgttggacctggaacagacgactttacctgggattgcacacctggttgtagaaacaatgattgtttctgaccagatcagaccagaggatagagccagtgtgttacggacactgctgttgaaacattcccatcctaacgacgacaaggacagtggcttctttccacgaaatccatcttcctcctctatgaatagtgtcctcggtaaccaccatcccacaccctcacatggaccggatggcgcagtgccaacgatggccgatgatttaggggaacccgcgcctttgtggccacatgaccccgacgctaaagagaaacccctgcatatgccaggaggcgacgggcatcggggcaagtctctgaaactgcttgagaaaatccctgaggacgctgaggctactgtggtcttggtagggtgtgtcccattcttggaacaacctgcagccgcctttgtgcgtcttaacgaggcagttctccttgagagtgtgcttgaagtaccagttcccgtcaggtttctgttcgtcatgcttggccctagccatacatctaccgactaccacgagttgggaaggtccatcgcgaccctcatgagcgacaagttatttcatgaggccgcatatcaggccgatgacagacaagatttacttagtgcaattagcgagtttctagatggaagcatcgtgattcctccctccgaggtcgagggtagggatttgctgagatccgtcgccgcctttcagcgggaactgctgaggaagaggagagagagagagcagacgaaggtggagatgaccacccgagggggttacaccgcacctggcaaagaattatccctcgaactgggcggcagcgaggcaaccccagaggatgaccccttactgcgcacagggtcagtattcgggggattggttcgggacgtgagacgacgctacccacattaccctagcgatttgcgagacgcacttcactcacagtgcgtggcagccgtgttgtttatctattttgcagccctatcacctgctataacattcggaggcctgttaggagaaaagactgagggccttatgggggtcagtgagctgatagtcagcacggcagtcctcggcgtgctttttagtctcctcggagcgcagccccttctggtcgtcggattctccggcccccttcttgtgttcgaggaggccttcttcaaattctgtcgggctcaggacctagaataccttaccggcagagtgtgggtcggcctgtggttagtggtgtttgtcctggcactggttgctgccgagggctcttttctagtccgctacattagtccctttactcaagagattttcgcattcttgatatcccttatttttatctatgagaccttctacaaattgtataaggtgtttaccgagcacccgctgcttccattttatcctcccgagggcgccctggagggttctttagacgctgggctggaacccaatggtagcgccttaccccccactgagggccctccttcgccccgtaatcagcccaacactgccctgctctcactgatcctcatgctcggcaccttttttatcgctttctttctacgtaaattccgcaactccaggtttctgggtggaaaggcgcgtcgcataatcggcgatttcgggattcctatatctatcctcgtcatggtgctcgtcgattattcaattactgatacatacacacaaaagctaacggtcccaacgggactcagcgttacctcgccagacaaaaggtcctggttcatccctcccctgggaagcgcacgccctttccccccctggatgatggtggcagcggcggttcctgcacttctggtgctcatcttaatttttatggaaacgcagattaccgctctgatcgtatctcagaaggcgaggcgcctgctaaagggatccggtttccacttggatctgctgctgatcgggagcctgggcggactgtgtggtctattcggcctaccctggctgactgccgcaaccgtgcggagcgtcacgcacgtgaatgccctcactgtgatgagaacagctattgcccccggggacaaacctcagatccaagaggtccgagaacagagagttactggggtgctcattgcgtcccttgttgggctgtccattgttatgggcgccgtgttgcgacgcattccactcgcggtcttgttcgggattttcttatatatgggagtgacgtctctttcagggatccaattaagccagcggctcctactgattctcatgcctgcgaagcatcacccagagcagccctatgtcaccaaggtgaaaacatggcgcatgcacttgtttacctgtatccagctggggtgcatcgctctcctctgggtcgtcaaatccaccgccgctagtctggcttttccattcctccttctgctcactgttcctctgaggcattgtctgctgcctaggctgtttcaggaccgcgagttgcaggccctcgattctgaggatgcagagcccaatttcgacgaggatgggcaggacgagtataacgaactccatatgcccgtgtag

SEQ ID NO: 152519 - DNA, 3699 bp, Artificial Sequence
  derived and/or modified sequence
atggccaatggagtcatccccccacctggaggagccagccccctgccccaggtgcgggtgcccctggaggagccccccctgagcccagatgtggaggaggaggatgatgacctgggcaagaccctggccgtgtccagatttggagacctgatcagcaagcccccagcctgggaccctgagaagcccagccgcagctacagcgagcgggactttgagttccaccgccacaccagccaccacacccaccaccccctgagcgcccggctgcccccaccccacaagctgcggcggctgccccccaccagcgcccggcacaccaggaggaagaggaagaaggagaagaccagcgccccacccagcgagggcaccccacccatccaggaggagggcggggccggcgtggatgaggaggaggaggaggaggaggaggaggagggggagagcgaggccgagcctgtggagcccccccacagcggcaccccccagaaggccaagttcagcatcggcagtgatgaagatgacagccctggcctgcccggccgggctgctgtgaccaagcccctgcccagcgtgggcccccacacagacaagagcccccagcacagcagcagcagccccagcccccgggcccgggccagccggctggccggggagaagagccggccctggagccccagcgccagctatgacctgcgggagcggctgtgccccggcagcgccctgggcaaccctgggggccctgagcagcaggtgcccacagatgaggccgaggcccagatgctgggcagcgctgacctggatgacatgaagagccaccggctggaggacaaccctggggtgagaagacacctggtgaagaagcccagcaggacccagggcggccggggcagccccagcggcctggcccccatcctgcggaggaagaagaagaagaagaagctggaccggcggccccatgaggtgtttgtggagctgaatgagctgatgctggacaggagccaggagccccactggagggagacagcccgctggatcaagtttgaagaagatgtggaggaggagacagagcgctggggcaagccccacgtggccagcctgtccttccgcagcctgctggagctgcggaggaccatcgcccacggggccgccctgctggacctggagcagaccaccctgcccggcatcgcccacctggtggtggagaccatgattgtgtctgaccagatccggcctgaggaccgggcctctgtgctgcggaccctgctgctgaagcacagccaccccaatgatgacaaggacagcggcttcttccccaggaaccccagcagcagctccatgaacagcgtgctgggcaaccaccaccccacccccagccacggcccagatggagctgtgcccaccatggctgatgacctgggggagcccgcccccctgtggccccatgaccctgatgccaaggagaagcccctgcacatgcctggaggagatggccaccggggcaagagcctgaagctgctggagaagatcccagaagatgctgaggccaccgtggtgctggtgggctgtgtgcccttcctggagcagcctgctgctgcctttgtgcggctgaatgaagctgtgctgctggagagcgtgctggaggtgcctgtgcctgtgcgcttcctgtttgtgatgctgggccccagccacaccagcacagactaccacgagctgggccgcagcatcgccaccctgatgtctgacaagctgttccatgaagctgcctaccaggctgatgaccggcaggacctgctgagcgccatcagcgagttcctggatggcagcatcgtcatcccccccagcgaggtggagggccgggacctgctgcggtctgtggccgccttccagcgggagctgctgaggaagaggcgggagcgggagcagaccaaggtggagatgaccacccggggcggctacacagcccctgggaaggagctgagcctggagctgggcggcagcgaggccaccccagaagatgaccccctgctgaggacaggctctgtgtttggaggcctggtgagagatgtgagaagacgctacccccactaccccagcgacctgagagatgccctgcacagccagtgtgtggccgctgtgctcttcatctactttgctgccctgagccctgccatcaccttcggcggcctgctgggggagaagacagagggcctgatgggcgtgtctgagctgattgtgtccacagctgtgctgggcgtgctcttcagcctgctgggcgcccagcccctgctggtggtgggcttcagcggccccctgctggtgtttgaggaggccttcttcaagttctgccgggcccaggacctggagtacctgaccggccgggtgtgggtgggcctgtggctggtggtgtttgtgctggccctggtggccgctgagggcagcttcctggtgcgctacatcagccccttcacccaggagatctttgccttcctgatcagcctcatcttcatctatgagaccttctacaagctgtacaaggtgttcacagagcaccccctgctgcccttctacccacctgagggcgccctggagggcagcctggatgctggcctggagcccaatggaagtgccctgcccccaacagagggcccccccagccccaggaaccagcccaacacagccctgctgagcctcatcctgatgctgggcaccttcttcatcgccttcttcctgaggaagttcaggaacagccgcttcctgggcggcaaggcccggcgcatcattggagactttggcatccccatcagcatcctggtgatggtgctggtggactacagcatcacagacacctacacccagaagctgactgtgcccaccggcctgtctgtgaccagcccagacaagaggtcctggttcatcccccccctgggcagcgcccggcccttccccccctggatgatggtggccgctgctgtgcctgccctgctggtgctgatcctgatcttcatggagacccagatcacagccctgattgtgtcccagaaggcccggcggctgctgaagggcagcggcttccacctggacctgctgctgattggcagcctgggcggcctgtgtggcctgtttggcctgccctggctgacagctgccaccgtgcgctctgtgacccacgtgaatgccctgactgtgatgaggacagccatcgcccctggggacaagccccagatccaggaggtgcgggagcagagggtgactggagtgctgattgccagcctggtgggcctgagcatcgtgatgggcgctgtgctgcggcgcatccccctggccgtgctgtttggcatcttcctgtacatgggcgtgaccagcctgagcggcatccagctgagccagaggctgctgctgatcctgatgcctgccaagcaccaccctgagcagccctacgtgaccaaggtgaagacctggaggatgcacctgttcacctgcatccagctgggctgcatcgccctgctgtgggtggtgaagagcacagctgccagcctggccttccccttcctgctgctgctgactgtgcccctgcggcactgcctgctgcccaggctcttccaggaccgggagctgcaggccctggacagtgaagatgctgagcccaactttgatgaagatggccaggatgagtacaatgagctgcacatgcctgtgtag

SEQ ID NO: 152520 - DNA, 3699 bp, Artificial Sequence
  derived and/or modified sequence
atggccaacggcgtgatccccccccccggcggcgccagccccctgccacaggttcgcgtgccactggaagagcctccgctgagcccagacgtggaggaggaggacgatgacttgggcaaaactttagcagtgtcccggttcggagacctgatcagcaaaccacccgcctgggaccccgaaaagcccagtagaagttattcagagcgtgacttcgagtttcaccggcataccagccaccacactcatcatccacttagtgctaggctaccacctccccacaaactgagaagattaccacccacgtcggcccgtcacactagaagaaagcgaaagaaagaaaagacatctgctcctccttccgagggaacccctcccattcaagaggaaggaggggccggcgtagacgaggaagaggaagaagaggaagaggaagaaggcgaaagcgaggcagagcccgtggaaccaccccatagtggcacccctcagaaggccaagttcagcatcgggagtgacgaggatgattcccccgggctgcctggacgcgccgccgttaccaagcctttaccctcagtgggaccccacacagacaaatccccgcagcactcatcttcatcaccgagtccaagagcccgcgctagccggctggctggcgagaagtcacgtccttggtccccttcagcctcttacgatcttagggaaaggctgtgccccggatctgcgcttggaaacccaggtggccctgagcagcaggtgcctaccgatgaggccgaagctcagatgctcggaagcgccgaccttgacgatatgaagagccaccggctcgaggataatccaggagtccgccgccacttagtaaagaagccttcacgtacgcaaggcggcagagggtctcctagtggccttgccccaatactcagaagaaaaaaaaaaaagaagaagctggacagacgtcctcacgaagtgttcgtagaactgaatgagcttatgcttgataggagccaggagccccactggcgcgagacagctcgatggatcaaatttgaagaggacgtggaagaagaaacagagcggtggggcaaacctcatgttgcaagtctatcgtttcggtcattacttgaactgcgcaggacaatcgcccacggagcagccctgttggatctggaacagaccactctccctgggatagctcatcttgtggtagaaactatgatcgtgagtgaccagatccggcctgaagatagagcatctgtgctccggactttgctcctgaaacattctcaccccaatgatgacaaggattccgggtttttcccgcgtaacccttcatcatcttccatgaactctgttctcggcaaccatcaccctacccccagtcatggtccagacggcgctgtcccgaccatggctgacgacttaggtgagccagctcctctctggccccacgaccctgacgcgaaagagaagcccctgcacatgcctggcggggacggccatcggggtaagtctctgaagctcctggagaaaatacccgaagacgcagaagccactgtggtgttagtggggtgcgttccttttctggagcagcctgcagccgccttcgtccgattgaatgaggcggtgctcctcgaatccgtgctcgaggtcccagtccctgtccggttcctctttgtgatgttgggcccttcccacaccagcaccgactaccacgagcttgggcgctcgatcgctacccttatgagcgacaagctgttccacgaagcggcttatcaagctgatgataggcaggatctcctgagcgccatcagcgagttcctggacggcagcatcgtgatcccgccatcggaggttgagggtcgagacctgctgagatcagttgctgccttccaacgagaactgctccggaagcgccgcgagcgggaacaaacaaaggtggaaatgaccactagaggtgggtataccgctcccggcaaagagctgtcgctggaattgggaggaagcgaggccactcctgaagacgatccgttactgagaacaggttcagtttttggtggtctggtgcgtgatgtcaggcggaggtatccgcattatccttcagacttgcgcgacgcccttcactcccaatgcgtagccgcagtcctgtttatatactttgccgctctttctccggcaatcaccttcggcggcctcctcggggaaaagaccgaggggctgatgggcgtctctgaattgatcgtgtctaccgccgttctcggcgtactcttcagcttgctgggtgctcaacctttacttgtcgtcgggtttagtgggcccctcctggtttttgaagaagcattcttcaagttctgccgcgctcaggacttggagtatctcaccgggagggtttgggtgggactgtggctagtggtgttcgtgcttgcactcgtcgctgccgaggggtcctttctcgtccgctacattagccctttcacccaggagatttttgcattcctgatatcactgatatttatctatgagactttttacaaactgtacaaagtgttcaccgagcacccacttctcccattttatcctcctgaaggagcactcgaaggatccctggacgctggcctggaaccaaatgggagcgcactgccacccactgaagggcctccatctcctaggaaccagccgaacaccgcactcctgagtctgatactgatgctggggactttctttatcgccttttttcttcgcaaatttcgaaattctcggttcctcggtggcaaagctcggcggatcatcggcgatttcggcattcccatttccattttggttatggtgctggtggactactctatcacagatacgtatactcaaaagttaacagtgcccacggggctgagcgtaacatctcccgacaagcgatcttggttcattccgccgcttggaagcgcccgtccatttcccccgtggatgatggtggctgccgccgttcccgctctgcttgtgcttatcttgatcttcatggaaacacagattacagcgttgatagtctcccagaaagccagacgattgctcaagggatctggattccatttggaccttctgttgatcggctccctaggcggactttgtggactgttcggactgccctggctgaccgcagccaccgtgagatctgtgactcatgtaaacgccttgaccgtgatgcgcaccgccattgcccccggagataagccccagatacaggaggtgcgagagcaaagagtgacaggggttttgatagctagcctcgttggactgagtatcgtgatgggcgctgtgctacggcggatcccgctggctgtgctgttcgggatttttctgtatatgggtgttacatccctgagcgggattcagcttagccagagactcctgctcatccttatgcccgccaagcatcatcctgaacagccttacgttaccaaagtcaaaacttggcggatgcacttgtttacatgtattcagctaggctgcatagcacttctctgggtggtgaagtctaccgcggcctccctggcatttccctttttgcttcttctaacagtccctctgcgacactgtttgctgcctaggctgttccaggacagagaacttcaggcccttgattccgaggacgcagagcccaactttgatgaagacggacaagatgaatacaatgaattacatatgccagtctag

SEQ ID NO: 152521 - DNA, 3699 bp, Artificial Sequence
  derived and/or modified sequence
atggccaacggcgtgatccccccccccggcggcgccagccccctgccccaggtgagagttcccctggaggagccaccactttcaccggacgtcgaggaggaggacgacgatctcggcaagactctggccgtttccagatttggcgatctgatctcgaaacctccagcgtgggatccagagaagccttcgagatcctactcagagagagatttcgagttccataggcatacttcacaccatacccaccaccccctttccgcccgacttccccctccccacaagctgaggaggctgccgcccacttctgctcggcatactaggaggaaaaggaagaaggagaagactagcgctccgccctccgaagggactcctccaatccaggaagaaggcggcgcaggtgtggatgaggaggaggaggaggaggaggaagaagagggagaaagtgaggctgaacctgtcgagccaccgcactccggtactccacaaaaagctaaattttcaattgggtccgacgaggatgatagtcccggactcccgggtcgggcagcagtgaccaaaccactgcccagtgtcggaccccatacagataaaagcccccagcattcaagctcgtcgccctcaccaagagctcgggccagtaggctagccggagagaagtctcgcccctggtccccaagtgcgtcatacgacttaagagaacgtctctgcccagggtccgccctggggaatcccggcggcccagagcaacaggtgcctactgatgaagccgaggctcagatgttgggcagtgccgacttagacgatatgaagtcacaccggctcgaggataatcccggagtgaggcggcaccttgtgaagaagccatccaggacacaggggggtcggggcagtccttccggcctggcccctatcctccgtcgtaagaaaaaaaaaaaaaagctggaccggagacctcacgaggttttcgtggagctgaacgagttgatgttggaccgaagccaggagccacattggcgggagaccgcaagatggatcaaatttgaagaggatgtggaagaagaaacggagcggtggggtaagcctcatgtcgcatccctgtcctttcggtcactccttgagcttcgacgaacgatcgcacatggggccgccctcctggacttggaacagacaaccctccccgggattgcccatctagtggtcgagacaatgattgtgtccgaccagatcaggcccgaggatagggcgtccgtgctgaggacgctgcttctaaagcattcgcaccctaacgacgacaaggatagcggctttttccccaggaacccatccagctcttccatgaacagcgtcctgggaaaccaccaccccactccttctcacggacccgacggcgccgtccccactatggctgatgacctgggggaacctgctccactgtggccccacgatccagacgccaaagaaaagccactccacatgccaggaggagatggacaccgcggaaagtctttgaaactgctggaaaagatacccgaggacgcagaagcgactgttgtcctggtgggatgtgtgccttttctagagcagccagccgccgcttttgttcgcttgaatgaggcagtgttgctggagagtgtgttagaggtcccggtgccagtgcggtttctgtttgtgatgttaggtccatcgcataccagcacagattaccacgaactcggtaggtctattgccactctgatgtcagacaaattgttccacgaagccgcttatcaggcagatgatagacaggatctgctgtctgctataagtgagtttttagatggctcgatcgtgatcccgccctcggaggtcgaaggacgggacctgctacgctcagtcgccgctttccaaagagagctgctcagaaagaggcgggagcgcgagcagactaaagtagagatgactacccgaggtgggtatacagcaccggggaaggagctgagccttgaattgggaggaagcgaggccacacctgaggatgatccgctgctaagaacaggctccgtgtttggggggctggtgcgcgatgttagaagacgctacccccactatccaagtgacttgagagacgccctgcactcccagtgtgtcgccgcagttttatttatctattttgccgctctttctccggcaatcacatttgggggactactcggtgagaagaccgagggcctgatgggcgtatcagagctaatcgtgtcaaccgccgtcctgggagttctgtttagccttctgggggcgcaaccattgctcgtggttggctttagcggccctctgttggtgtttgaagaagccttttttaaattttgcagagcgcaggatctagaatatctcacaggccgcgtttgggtcggcttgtggctcgtggtttttgttcttgccctggtagccgcagaggggtcgtttttggttcgatatatctccccattcacacaggaaatttttgcctttctgatttccttgatatttatttatgagacattctacaaactgtacaaagtgtttacagaacaccctctgttacccttttacccccctgaaggcgctctggaggggtcactggatgcaggtctcgaaccaaatggctcggctctgccccccacggaagggcccccctcaccgagaaatcaaccaaatacggccctgctgtctcttatcctgatgcttgggaccttctttatcgcattttttctccggaaatttaggaactccaggtttttagggggcaaggccaggcgcattataggggatttcgggatcccgatttctattttggtaatggtcctcgtcgactactcaataaccgatacatacacgcagaagctgacggttcccaccggcctgtctgtgactagccccgataaacgtagctggtttatacccccactggggtctgcacggccctttccgccctggatgatggtggcggcagctgtccccgccctgctagtgttaatcctaattttcatggagacacagatcacggctctgatcgtttctcagaaagcccgccggctattaaagggctctggtttccatctggatctgttgctgatcggtagcctggggggactgtgtgggctgttcggactgccctggctgacagccgccactgtgaggtctgtaactcatgtaaacgcgctcacagtcatgaggactgcaatcgctcccggagacaaaccccaaatacaggaggtgcgcgaacagcgggtgaccggcgtgctaatcgccagtctggtcggactgtcaatcgtgatgggagccgtactacggagaatccctcttgccgtcctattcggaatatttctatacatgggggtcacttcgctgagcgggattcaactatctcagcggctcttgcttattctgatgcctgccaagcaccaccccgagcagccctatgttaccaaggtgaagacatggagaatgcacttgtttacatgcattcagttgggatgtatagcattgctgtgggttgttaagtccactgccgcctctctcgcttttccattcctcctgttactcacagtgcctctgcggcattgccttcttcccaggctgttccaggacagggagctccaagcattagatagcgaagatgcagaaccgaatttcgatgaagacggacaggacgagtacaatgagcttcatatgcccgtgtag

SEQ ID NO: 152522 - DNA, 3699 bp, Artificial Sequence
  derived and/or modified sequence
atggccaacggcgtgatccccccccccggcggcgccagccccctgccccaggtgcgagtgcccttggaggagccgccactctcccctgacgtggaagaggaggacgacgacctgggaaaaacactcgcagtaagtaggttcggcgatctaataagcaagccaccagcttgggaccccgagaagccatcaaggtcctattcagagagggactttgaatttcatcgtcacacatcccatcatactcatcatcccctttcggccaggctgccccctccacataagttacgccgcctccccccaacttccgctcgccatacccgcagaaaaaggaagaaggagaaaacaagcgccccgccatctgaaggcaccccacctatacaggaggaaggaggggccggtgtggatgaagaagaggaggaggaggaggaagaagagggtgaaagtgaagctgagcctgtggaaccccctcactccggcactcctcagaaggcaaagtttagtattggttcagacgaagacgatagccctggcctgcctggacgcgctgctgtcaccaagcctctccccagcgtgggaccacacacagacaaatctccccagcactcttctagctctccatccccacgcgcacgtgcctcaaggctggcaggggagaaaagccgaccctggtctcctagcgcgagttacgatttgagagagcggctgtgccctggcagcgcattaggaaacccagggggtccagaacagcaggttcctaccgatgaggccgaggcacagatgctggggtccgctgacttggacgacatgaaatcccaccgcctggaagacaatcccggcgtgagacgccatctggttaaaaagccgtctagaacccagggcgggcggggctctccttctgggttggctccaattctgaggaggaagaaaaaaaaaaagaagctggacagaaggccgcatgaggttttcgtcgagcttaacgagctgatgttggaccgtagtcaggagccccactggcgggagacagcccgctggattaagtttgaagaagatgtggaagaggagaccgagcgatggggtaagccccacgtcgccagtttatcatttaggagcctcctcgaactgaggcgcacaatcgcccatggggccgccctactggaccttgaacagaccacattgcctggaatcgcacacctggttgtggaaactatgatagttagcgaccagattagacctgaggaccgtgcaagtgttctacggaccctgctcttaaaacacagccaccctaatgacgataaagacagtggcttctttccaaggaatcctagctcatcttccatgaatagcgttcttgggaaccaccaccccacccccagtcatggcccagacggggccgtgcccacaatggcggatgacctgggcgagcctgccccattatggccgcacgacccggatgccaaggagaagccactgcacatgcccggaggcgatggacataggggaaaatctctgaagctgctggaaaaaatccctgaagacgccgaggccactgtcgtcttagtcgggtgtgtaccttttctggagcaaccagcagctgctttcgtgcgccttaacgaggcagtcctgctggagagcgtcctggaggttcctgttccggtgcgtttcctttttgtcatgctggggccttcccacaccagcaccgattatcacgagttggggcggagcattgcaaccttgatgtcagataagctttttcacgaagccgcttaccaggcggatgacagacaagacctgctttccgccatatcggagttcctagacggcagcatcgtcattccaccaagcgaggtggagggcagagatctcctccggtcagttgcagcattccagagagagctcctcagaaaaagaagggaaagggaacaaacaaaagtggagatgactacgagaggcggctacactgctcccggtaaagagctaagtttggagctgggagggtcagaagctaccccggaggacgatcccctcctgaggacgggcagcgtcttcggcggcctcgtgcgggacgtgagacggcggtatccacactacccttccgatctgcgagatgccctgcatagccagtgcgtcgctgctgtactattcatctattttgccgctctgtcaccagcgattacctttgggggattgctaggggagaagaccgaagggctgatgggtgttagcgagttaatcgtctctactgcagtactcggcgtactgttctccttactcggcgctcagcccctgctggtggtgggatttagcggcccattactagtctttgaagaagcattctttaagttttgcagagctcaggatctcgaatatttgacggggcgggtgtgggttgggctgtggctcgttgtcttcgtgctggcgttggtcgccgccgaagggtcatttctggtgaggtatatctcaccattcacacaggagatttttgcttttctgatctcactgatcttcatatatgagaccttctacaagctatacaaagtgtttacagagcaccccctattgccgttctatcctcctgagggcgcactcgagggatccctagatgctggcttggaacccaacggttctgcgctgccacccacagagggacccccatcacctcggaaccagccaaacacagcacttttgagtctcatactcatgcttggcaccttcttcatcgccttcttcctgcgaaaatttagaaattctagatttttgggcggaaaagctaggcgcatcatcggcgatttcggtattcctataagcattctggtcatggttctggtggactacagcattaccgatacatatacccagaaactgaccgtcccaactggtctgtccgtgacgagccctgacaagagatcttggttcatcccccctctcggaagtgctcggccgttccccccatggatgatggtggccgccgcggtcccagctcttctggtgctgattctgatttttatggagactcaaatcaccgctctaattgtttcccagaaggcccggcgccttttaaagggaagcggctttcatctagacttgctcctcatcggaagtctgggcggtttgtgtgggctgttcggactcccgtggcttacagcagccacggtgagatctgtgacccacgtgaatgcgctgaccgtgatgaggaccgccattgcccctggggataagcctcagatccaggaagtgagagagcagagagtgaccggggttctcatagccagcttggtgggcctctctatagtcatgggagctgtactcaggaggatccccctggctgtcctgttcggcattttcctgtacatgggtgtcacttcgttatcaggcattcaactctcacaacgcttactccttatcctgatgcccgccaaacatcatcccgagcagccatatgtgactaaagtcaagacttggcgcatgcacttattcacttgtatacaactgggttgcatcgccctactgtgggttgtgaagagcactgccgcaagcctcgcctttccgttcctcttattgctgacagtcccactgcggcattgcctgctccctaggctgttccaggatagagagcttcaggccttagacagcgaggatgctgagcccaactttgacgaggacgggcaggacgagtacaatgaacttcacatgcccgtatag

SEQ ID NO: 152523 - DNA, 3699 bp, Artificial Sequence
  derived and/or modified sequence
atggcaaatggcgtgattcctccgccaggaggcgcaagtcctttgccccaggtgcgagtcccactggaagagccacccctgagcccagatgtggaggaggaggacgacgacctggggaagaccctcgccgtgtccaggtttggcgatctcatctcaaaacctcccgcatgggatcccgaaaaacccagccgaagttattccgagagggattttgaatttcatcgtcatacatcacaccatacccaccacccgctgtctgcgagactgcctccccctcataagctcaggaggctgcccccaacgtccgctcgccacacacggagaaaacggaaaaaggaaaaaacatccgcaccaccttccgagggcactcccccaatacaagaggagggaggtgccggagtggacgaagaggaggaggaagaagaagaggaggagggcgaatctgaggccgaaccagtggagccaccccattccggcacgcctcagaaggccaagttctcaatcggctccgacgaagacgactccccaggcttgccaggcagagccgctgtgactaaacccctgccatcggtggggccacacaccgacaagtcaccgcagcatagttcttcttccccgtctccgagggccagagcaagtaggctcgctggggagaaaagcagaccttggagcccatccgcgagttatgacttgcgtgagagactgtgtcccggaagtgccttgggcaatccaggaggcccagagcaacaggtgcccaccgacgaagcagaggcacagatgttagggtctgccgacctcgatgacatgaagagccaccgcttggaggataatcctggggtgcgtcgtcatttagtcaaaaaaccctcacgcacccagggtggccgtggatcaccatctggcctggcacccatcctgcgtagaaaaaagaagaaaaaaaagctcgacaggcgcccacatgaagtgtttgtcgagttaaacgagctgatgcttgataggagccaggaaccacactggcgtgagaccgccaggtggattaaattcgaggaagatgtggaagaggagaccgagcgttggggcaaaccccacgttgcttccctctcatttcggagtcttttggagctgagacgtactattgcacatggggctgccctcttggatctggagcagaccacccttcctggaattgcgcatctggtggtcgaaacaatgatcgtatctgatcagattaggccagaggaccgagcctccgtgctgcgcaccttgctcctgaagcattcacacccgaacgatgacaaggacagtggattcttcccaagaaacccatctagctcttcaatgaactccgtgctggggaatcatcaccccaccccctctcacgggcctgatggtgcggtgccgactatggcagatgacctcggggaacctgcgcctctgtggccccacgaccccgatgcaaaggaaaaaccgctacacatgccgggaggcgacggacaccgcggtaagagtctcaagttgctggaaaagatccccgaggacgctgaagctactgtggtcctggtgggctgtgtaccttttcttgagcaaccagccgcagctttcgtgcgtctgaacgaggccgtgttgctggagtcggtgttggaggttccggtccctgtaaggttcttattcgtgatgttaggtccatctcataccagcacagattaccatgagcttggacgctccatcgctacactgatgagcgataaacttttccatgaggctgcttatcaggcggacgacaggcaggatttgttaagcgccatatcagaattcctagacgggtccattgtcatacccccatctgaggtggagggcagggatctcctccgctccgtcgccgcttttcagcgagaactactgagaaagagacgagagcgagagcagactaaagtcgagatgactactagaggaggctacacggcgcctggtaaagaactaagcctcgaactgggcggaagcgaggccactcccgaagatgacccgctgttgaggaccggctcggtatttggcggactggtccgggacgtaagaagaagatacccacattacccatctgacttacgggatgctctgcactcacagtgtgtcgccgctgtcctgtttatttattttgcagccctctccccagctatcaccttcggaggcctgctgggagagaagacagaggggctgatgggtgtgtccgagctcatcgtctccactgccgttcttggagtgttgtttagcctgttaggggctcagccccttttagtagtcgggttttcagggcctcttctggtgttcgaggaggcatttttcaaattttgtagggcccaggacctcgaatacttaacgggaagagtgtgggtgggcctatggttggtcgtcttcgttctggccctggtcgcggcagagggttcattccttgtgaggtatattagtcctttcacacaagagattttcgcttttctcatttcccttatcttcatctacgagacgttctacaagctgtataaagtgttcactgagcatccactcttgcccttttatcctcctgagggcgcactggaggggagcctcgacgcagggctggaacccaatggtagcgcacttccaccaaccgagggccctccgagccccaggaatcagcccaataccgcgctcttgtccctgatcctcatgcttggcaccttcttcattgcttttttcctccgaaaattccgaaactcacgttttcttgggggtaaggcaaggcggattattggcgattttgggattccaatttccatcttggtcatggtattagtggattattctatcacagatacctacactcagaaactgaccgttcctaccggtcttagcgttacgagccccgacaagcgctcctggtttatccctccgctgggaagcgctagacccttccccccatggatgatggtggcagccgctgtgccagcccttctggtcttaatactgatcttcatggagacgcagatcacagctctgatagtcagccagaaagcgagacggttgctcaaagggtccggctttcacctcgacttactcctaatcggatccctggggggattgtgcgggcttttcggactcccctggcttaccgccgcaacagtgcgctccgtaacccacgtaaatgctctcaccgtcatgcgaacggcgatagcacctggagacaaaccacagattcaggaggtgagggagcaaagagtaactggagtgctgatagcaagcttggtcggccttagcattgtgatgggggcagtgctgcggcgaatcccgctggccgtcttattcgggattttcctgtatatgggcgtaacctcactgtcaggtatccagctcagtcagagattgttgctgatcttgatgccagcaaaacaccacccggagcagccatatgtgactaaagtcaagacctggcgcatgcacctgtttacttgtattcagctgggttgtatcgccttgctgtgggtcgtgaagtctactgctgcctccttggcctttccttttctcctgctgttgaccgtgcccctccgccattgcctgctgcccaggcttttccaggaccgtgagctgcaggcacttgactcagaggatgctgagccaaattttgatgaagatggccaggacgagtacaacgagctgcacatgcctgtgtag

SEQ ID NO: 152524 - DNA, 3699 bp, Artificial Sequence
  derived and/or modified sequence
atggccaacggcgtgatccccccacctgggggagcctctcctctgccgcaagtcagagttcctttggaagagccccctctgagccccgatgtggaggaagaagatgatgacctgggcaaaaccctggctgtctcacgctttggcgatctgatatcgaagccccctgcttgggaccccgaaaaaccatctagatcctacagcgagagagactttgagttccatcgacatacatcacatcatacccatcaccctctaagcgcgagactgccaccccctcacaaactcaggagattgccccctacctccgctaggcacacgcggaggaagcgtaagaaagagaaaaccagcgcccctcctagcgaaggaacacccccaatccaggaggagggcggtgccggagtggatgaggaagaggaggaagaggaggaggaggaaggagagagcgaggccgaacccgtggaacccccacattcgggcaccccacagaaagcaaagtttagcataggttcggatgaggatgattcacctgggttgcccggtcgggctgccgtcacaaagccacttccctcagttggccctcataccgataagtccccacaacattccagctcctctccaagccccagagcccgagcttcgcgcctggccggagagaaatcaaggccatggtccccttctgccagctacgaccttagggagagactctgtcccggatcggcactgggaaatccaggaggcccagaacagcaggtgccaaccgacgaagccgaggcccagatgttggggtctgctgatctagatgacatgaaaagccatcggctagaggacaaccctggtgtgagacgccacctggtgaagaagccaagccgtacccaaggcggtagaggcagtccaagcggcctcgctccgattcttaggcgtaagaagaagaaaaagaaactggatcgacggccacacgaggtgttcgtcgagctgaatgaacttatgttagaccgatcgcaggagcctcattggcgggagacagcccgatggatcaaattcgaagaggatgtggaagaggaaacagagcgctggggcaaaccccatgtggccagtctctcattcaggtccctcttggaattacgcaggaccatagcacatggcgcagccctcttggacctggaacaaacgaccctgccaggaatcgcccatctggttgtggaaacaatgattgtctccgatcagatcaggccggaagatcgcgcttccgtcctgaggacgctgctgttgaaacactcccacccaaacgacgacaaagacagcggattctttccccgaaatccttcttcttcgtccatgaattccgtgctcggtaaccaccaccccacaccaagccacggacccgacggagccgttcctactatggccgacgacctcggcgaaccagcgcctctgtggccgcacgacccagacgccaaggaaaagcctctccatatgccaggaggagatggccacagaggtaaaagtttaaaattgttggaaaaaattcctgaagatgctgaggcaacagtggtgctggtcgggtgcgtgccgttccttgagcagcctgccgcagcttttgtgcggctcaacgaggctgttctgctcgaatctgtgctggaggtgcccgtcccggtgcgtttcctttttgtaatgttgggcccaagccatacaagcactgactatcacgaactcgggaggtccatagctactcttatgagtgacaaattattccatgaggccgcttaccaggctgacgatcgccaagacctgctgtctgcaatatcagaattcctagacggatcgattgtgatccctccatcagaagttgaggggagggacctgctgaggtcggttgccgcattccagcgggagttgttacggaaacggagggaaagagaacaaacaaaggtggaaatgaccaccagaggaggctataccgcaccaggtaaggagctatccctcgagctgggcggatcagaagctacgccggaagatgaccctctgctgcggacaggaagtgtgtttggtggtctggtgcgcgatgtcaggagaagatacccgcattaccccagcgaccttcgggacgccctgcactcccagtgtgttgccgctgtgctcttcatatacttcgcagcccttagtcccgcaataacttttgggggtctgcttggtgagaagaccgaaggcctgatgggtgtatctgagcttatcgtctcgaccgctgtgttaggggttctgttctccctgttaggagcccagcccctgctggtggtcgggtttagcggcccattactggtgttcgaggaggctttttttaaattctgtcgagcacaagatttagaatatctcaccggaagggtgtgggtgggcctgtggttggtcgtattcgtgctggctctggtggcggcagagggaagtttcttggtcagatacatcagcccatttacacaggaaatattcgcctttttgatttccctcatcttcatctatgagacgttttacaaactttacaaggtttttacggagcatccactgttacctttttatcccccagaaggggctctcgaagggagccttgatgccggactggagcctaatggcagcgcactcccgcctactgaaggtcccccatcccccaggaatcagccgaatacggccttgctgtcactgatcctgatgcttgggactttctttattgccttttttctgcgtaagtttcggaattccaggttcctggggggtaaggcccgaaggataatcggagatttcggaatccctatatctatactggtgatggtccttgtcgactattctattacggacacctatactcagaagttgacagtccctaccggactaagtgtcacttcccctgacaaacggagctggtttataccgcctctggggtcagccagacccttccccccttggatgatggtggctgctgctgtgcctgccttactcgttctgatcctgatatttatggaaacacagattacggccttaatcgtctcccagaaagcacgtaggctcctgaaggggagcgggttccacttagacctgttactgattggatctcttggagggctctgcggtcttttcggcctgccctggcttacagccgcaaccgtacgaagtgtgacgcatgtgaacgctcttacagtgatgcgaacagctattgcaccaggcgacaagccccagatccaggaggtccgcgagcagagagtcaccggggttttgatcgcatccctggtcggactttccatcgtgatgggcgcagtgctgcgcagaattcctttggccgttttattcggaattttcttgtacatgggagtaactagcctgagcggaatccagctctcgcagcgccttctgctgatactcatgcctgcaaaacaccatcccgagcaaccttatgtcaccaaagtgaagacttggcgcatgcatctgtttacctgtattcaactgggctgtattgccttgttgtgggtggtgaaatctacggcggctagtctcgcctttcccttcctgttgctactgaccgtgcctttaagacactgtctcctaccaagactcttccaggacagagagctacaagctctggacagcgaggacgcggagcccaactttgacgaggatggccaagacgaatacaatgagctccatatgcccgtctag

SEQ ID NO: 152525 - DNA, 3699 bp, Artificial Sequence
  derived and/or modified sequence
atggccaacggcgtgattcccccacccggaggagcatctccactgccccaggtgcgcgtacccctggaagagcctcctctgtccccagacgttgaagaggaggacgatgatcttgggaaaactcttgccgtctcgaggtttggtgacctcatttcaaaacctcccgcttgggacccagaaaagccttccagatcctactccgagcgtgactttgaattccataggcacacatcgcatcacacacaccaccctctctctgcgcgactccctcccccacacaagctgaggcgactccctcctacctcagcgagacataccaggcgtaagagaaagaaggaaaagaccagcgctcctcccagcgagggaactccacccattcaggaggaaggtggggcaggtgtggatgaggaagaagaggaagaagaggaagaagagggagagtccgaggccgaacccgtggaaccgccacactcagggaccccccagaaggccaaattttcaataggatcagacgaagatgactctcctggcctgcctggaagagccgctgttacaaagcctctccccagtgtgggcccacacaccgacaagagcccccagcatagctcttcatctccatccccccgagccagggcctctaggctagctggtgagaagagccgcccttggtcaccaagtgctagctacgaccttcgcgagcgcctatgtcctggcagcgccctggggaatcccggaggcccagagcagcaggtgcctacggacgaagccgaggcacagatgctggggtccgcagatttagatgacatgaaatctcaccggctggaggataaccctggagtccgtaggcatttggtgaaaaaaccaagtcgcacacaagggggacgtgggagcccgtcagggctggcaccaatcctgcggaggaagaagaagaagaaaaaattggacaggaggccacacgaagtctttgtggaactgaatgaacttatgctcgacaggtcacaggagcctcactggagggagaccgctcggtggattaagtttgaagaagacgtcgaggaagagaccgaacgctggggaaagccacacgtagcatctctgtctttcagatctttgctagagcttcggcgaaccatcgcccacggagctgcactgctggatctggagcagacgaccctccccggaatcgcacatcttgtggtcgagacgatgatcgtgtccgatcagattcgcccagaggatcgcgctagtgtcttgcgcactctcttgttgaagcactcgcatcccaacgatgataaagactctggcttcttccccagaaacccgtccagttcgtccatgaattccgtactaggaaaccaccacccgacgcctagccacggcccagatggcgcagtgccaaccatggcagacgacttaggcgaacccgctcctctttggccacacgatccggatgccaaggaaaaacccctgcacatgcccggtggggatgggcaccgcggaaaatccctgaagttactggagaaaatacccgaggatgcagaggccaccgttgtcctggttggatgcgtcccgttcctggagcagcctgctgctgcatttgttcggctgaacgaagcagttttattagagtcagtcctggaagtcccggtccctgtccgtttcctattcgtaatgctgggaccttcccatacatctactgattaccacgaactgggaaggagcatagctacccttatgtctgataaattgttccacgaggctgcctatcaggcagatgatagacaggatctgctcagcgcaatctctgaattccttgatggatctattgtaataccaccttccgaggttgagggcagggatctgcttcggagcgtggcggcttttcagcgggaactgttgaggaaacgccgagaaagggaacagactaaggtggagatgaccactcgtggcggttacaccgctcccggtaaagaactgagcctggaattggggggatctgaggccacgcctgaggacgatccacttctgcgcactggaagcgtttttggcggattggtgcgggacgtgcgtcgacgctacccccattatccctccgatctgagggatgcccttcacagccagtgcgtggccgctgtgctctttatctactttgcagccctgtcaccagccatcaccttcggaggtctgctcggtgagaagaccgagggcctgatgggggtttcagaactgattgtgtccactgctgtcctgggggtcttgtttagtctgttaggagcacaacctctgttggtggtcggctttagcggaccactgctagtcttcgaagaggctttttttaagttttgcagggcgcaggacctagaatacctcacgggacgcgtttgggtgggcctgtggcttgtggtcttcgttctggctttagttgcagcagaagggagctttttggtgcgctatatctctccgttcacacaggaaatctttgcattcctcatatctttaatttttatatacgagacattctacaagctctataaggtattcaccgagcacccactcctgcctttctacccacccgagggtgccctggagggcagcctcgatgcagggttagagcctaacggcagcgccctgccaccgacagaaggtccgccatctcctaggaatcaaccaaatacagcattgctttcgctgatccttatgctggggacattcttcattgctttctttctacgaaagtttcgcaactcacggtttcttggcggtaaagcaagacggataatcggtgattttggtatccccatttccatcctggttatggttctggtggattattcgattacagacacttatacacagaagctcacagtccccacgggactgagcgttacctcacctgacaagagaagctggttcatccccccattggggtcagccaggccgttccccccttggatgatggtggctgcggcagtgcccgctctgttggtactcattctaattttcatggagacacagattacagcgctgattgtttctcagaaagcaaggcgcctacttaaagggtccggattccacttggacctcctgctaattggctccctggggggactgtgcggcctgttcggcctcccctggctgactgccgcaactgtgcgtagcgtgacgcacgttaacgccttgaccgtgatgcgaacagcaattgccccaggcgacaaacctcagatccaggaggtcagagaacaacgcgtcaccggagtcctcatagcatccctggtgggactgagcatcgtcatgggggctgtgctcagaaggatcccgttggccgtgctatttggaatctttctctacatgggagtgacctcactatccggaatccaactctcacagaggcttctactcatcctcatgccggcaaagcaccatccagaacaaccctacgtgactaaggtcaagacatggagaatgcacttgttcacttgtattcagctcggctgcatcgcgctattatgggttgtcaagtccactgctgcaagcctggcctttccttttctcctgctgctgactgtgccgctcaggcattgccttctgccgcgactcttccaggatagggagctgcaggcactcgacagcgaggatgctgaaccgaactttgatgaagacggtcaggacgaatacaatgaacttcatatgccggtctag

SEQ ID NO: 152526 - DNA, 4069 bp, Artificial Sequence
  derived and/or modified sequence
gcagtcgcggctgcgctcgggagagagcgcgggggacatggggcgcggcggcccgcctgggcctcgcaggctccggagccccgagtgagcgagagcgtccccagccgcctacctggccatggccaacggagtgatcccgccgcccgggggcgcctcccccctaccccaggtccgggtgcccttggaggagccccctctaagtccagacgtggaggaggaggacgatgacttgggcaagaccttggctgtgagcaggtttggggacctcatcagcaagcccccggcctgggaccccgagaagcccagccgcagctacagcgagcgggactttgagtttcaccggcacacatcccaccacacccaccacccgctctcagcgcgcctgcctccaccccacaagctgcggcggctgccccccacctctgcccggcacaccaggagaaagaggaagaaggagaaaacctctgctcctccctccgaggggacccctcccatccaggaggaggggggagctggagtggatgaggaagaggaggaagaggaggaagaggaaggagaatctgaggcagaacctgtggagcccccccactcagggaccccacagaaggcaaagttctccattggaagtgacgaggatgacagtccaggcctccctgggagggctgctgtcaccaagcccctgccctcggtgggcccacacactgacaagagcccccagcactccagcagctcccccagcccccgggcccgggcctcccgactcgctggggagaaaagccggccctggagcccatcggccagttatgacctgcgggagcgactgtgcccaggcagtgccctgggcaacccaggtggtccagagcagcaggtgcccacagatgaggcggaggcccagatgctgggttctgcagacctggacgacatgaagagtcaccgactggaggacaaccctggtgtgcggcgacacttagtgaaaaagccctcccggacgcagggcgggaggggcagtcccagcggcctggcccccatccttcgcaggaagaagaagaagaaaaagctggaccggaggcctcatgaggtgttcgtggagctgaacgagctgatgctggaccgcagccaggagccccactggcgggagacggcccgctggatcaagtttgaggaggacgtggaggaggagacggagcgctgggggaagccccatgttgcctcgctctccttccgtagccttctggagctcaggaggaccatcgcccatggagctgccctcctggacctggagcaaaccaccctgccaggcattgcacacctcgtggtggagaccatgattgtgtctgaccagatccggccggaggacagggccagcgtcctacgtaccctgctactgaagcacagccatcccaacgatgacaaggacagtggcttctttccccgaaacccatcgagctccagcatgaactcggttctggggaatcatcacccaactcccagccatggccctgatggggcggtgcctaccatggctgatgacctgggggagccagccccactctggccacatgaccctgacgccaaggagaagcccctccacatgcctgggggagatggtcaccgggggaaaagcctgaagctgctggagaagatccctgaagatgctgaggccacggttgtgcttgtgggttgtgtgcctttcttggagcagcctgcagcagccttcgtgcgtctgaatgaggctgtactcctggagtctgtgcttgaggtccctgtcccggtccgcttcctcttcgtgatgctggggcccagccacaccagcactgactatcacgagcttgggcgctccattgccacccttatgtctgacaagctgtttcatgaggctgcctaccaggcagatgaccggcaagacctcctaagtgccatcagcgagttcctggatggcagcattgtgatccccccgtccgaggtggagggccgtgacctgctgcgctccgtggctgctttccagcgagagctgcttaggaagcggcgagagcgtgaacagaccaaagtcgagatgaccacacggggtggctacacggcccctgggaaagaactgtctttggagttggggggctctgaagcaacccctgaagatgaccccttgctgcggacgggctcggtatttggggggcttgtgcgggatgtgaggcgccggtacccgcactaccccagtgacctgcgagatgcgctgcactcccagtgtgtggccgctgtgctcttcatctacttcgcagccctcagccctgccatcaccttcggggggctgctgggagagaagaccgaggggctgatgggcgtgtccgagctgatcgtgtccaccgctgtgctcggcgtcctcttctctctgctgggagctcagccgctgcttgtggttggcttctctgggccgctgcttgtgtttgaggaagccttcttcaagttctgccgagcccaggacctggagtacctcactggccgggtgtgggttggtctctggctggtggtcttcgtccttgccctggtggccgccgaaggcagcttcctggtccgctacatctcgcctttcacccaggagatctttgcctttctcatctcactcattttcatctacgagaccttctacaagctctacaaggtgttcacagagcacccactgctgccgttctacccccctgagggggccctggaggggtccctggatgctggtctggagccaaatggcagtgccctgccccccaccgagggcccccccagcccgaggaaccagcccaatacggcactgctctcactcatcctcatgctcgggaccttcttcatagccttcttcctgcgcaagttcaggaacagccgcttcctggggggcaaggctcgtcgcatcatcggggactttggcatccccatctccatcctggtgatggtcctggtggattactccatcacagacacctacacgcagaagctgacagtgcctacagggctctcagtgacctctcccgataagcgctcgtggttcatcccacccctgggcagtgcccgtcctttcccgccgtggatgatggtggcagccgctgttcccgccctcctcgtcctcatcctgatcttcatggagacacagatcacggcgcttatcgtcagccagaaggcgcggaggctgctcaagggctccggtttccacctggacctgctcctcattggctccctgggggggctctgtgggctgtttgggttgccctggctcacggctgccacggtccgctccgtcacccatgtcaatgcgttgacagtgatgcgtactgccatcgcgcctggtgacaagccccagatccaggaggtgcgggagcagcgggtcactggtgtgctcatcgccagcctcgtgggcctgtccatcgtcatgggggctgtgctgcgtcggatcccattggctgtgctctttgggatcttcctgtacatgggggtcacgtccctgtctggtatccagctgtcccagcgtttgttgctcatcctcatgccggcaaaacaccatcctgagcagccctatgtgaccaaggtgaagacgtggcggatgcatctgttcacctgcatccagctgggctgcatcgcactgctctgggtggtcaagtccacggcggcctcactcgcctttcccttcctgctgctgctcacggtgcctctgaggcattgccttctgccccggctcttccaggacagggagctgcaggcgctggactcggaagatgctgaaccaaacttcgatgaggatggccaggatgagtacaatgagctgcacatgccagtgtgacccttgaagacagtgcccctcagagaccccaagaccttagggattgacacctgggcctcaggcagagcccagccctgggctggggggctcctcaggacccagagatgtgcctggaaccactcctgatgccatggctagagtggcccccctgacttctgcccggggtgttgacctcgcctcacctttcacagaccagaccggcacaggctttgagctcattataaccacactccttgtctcgtgtctgcctca

SEQ ID NO: 152527 - DNA, 4210 bp, Artificial Sequence
  derived and/or modified sequence
gcggagcgcgaggaggtggagccgcgggctgcgggctccggcgcctgcgtccgcccggccagcccggctctgcgctgcgagaggccggacggcagtcgcggctgcgctcgggagagagcgcgggggacatggggcgcggcggcccgcctgggcctcgcaggctccggagccccgagggctccccgctaggccccctcagtggcccctccttctcacctgggtctcgggtcccctagtgagcgagagcgtccccagccgcctacctggccatggccaacggagtgatcccgccgcccgggggcgcctcccccctaccccaggtccgggtgcccttggaggagccccctctaagtccagacgtggaggaggaggacgatgacttgggcaagaccttggctgtgagcaggtttggggacctcatcagcaagcccccggcctgggaccccgagaagcccagccgcagctacagcgagcgggactttgagtttcaccggcacacatcccaccacacccaccacccgctctcagcgcgcctgcctccaccccacaagctgcggcggctgccccccacctctgcccggcacaccaggagaaagaggaagaaggagaaaacctctgctcctccctccgaggggacccctcccatccaggaggaggggggagctggagtggatgaggaagaggaggaagaggaggaagaggaaggagaatctgaggcagaacctgtggagcccccccactcagggaccccacagaaggcaaagttctccattggaagtgacgaggatgacagtccaggcctccctgggagggctgctgtcaccaagcccctgccctcggtgggcccacacactgacaagagcccccagcactccagcagctcccccagcccccgggcccgggcctcccgactcgctggggagaaaagccggccctggagcccatcggccagttatgacctgcgggagcgactgtgcccaggcagtgccctgggcaacccaggtggtccagagcagcaggtgcccacagatgaggcggaggcccagatgctgggttctgcagacctggacgacatgaagagtcaccgactggaggacaaccctggtgtgcggcgacacttagtgaaaaagccctcccggacgcagggcgggaggggcagtcccagcggcctggcccccatccttcgcaggaagaagaagaagaaaaagctggaccggaggcctcatgaggtgttcgtggagctgaacgagctgatgctggaccgcagccaggagccccactggcgggagacggcccgctggatcaagtttgaggaggacgtggaggaggagacggagcgctgggggaagccccatgttgcctcgctctccttccgtagccttctggagctcaggaggaccatcgcccatggagctgccctcctggacctggagcaaaccaccctgccaggcattgcacacctcgtggtggagaccatgattgtgtctgaccagatccggccggaggacagggccagcgtcctacgtaccctgctactgaagcacagccatcccaacgatgacaaggacagtggcttctttccccgaaacccatcgagctccagcatgaactcggttctggggaatcatcacccaactcccagccatggccctgatggggcggtgcctaccatggctgatgacctgggggagccagccccactctggccacatgaccctgacgccaaggagaagcccctccacatgcctgggggagatggtcaccgggggaaaagcctgaagctgctggagaagatccctgaagatgctgaggccacggttgtgcttgtgggttgtgtgcctttcttggagcagcctgcagcagccttcgtgcgtctgaatgaggctgtactcctggagtctgtgcttgaggtccctgtcccggtccgcttcctcttcgtgatgctggggcccagccacaccagcactgactatcacgagcttgggcgctccattgccacccttatgtctgacaagctgtttcatgaggctgcctaccaggcagatgaccggcaagacctcctaagtgccatcagcgagttcctggatggcagcattgtgatccccccgtccgaggtggagggccgtgacctgctgcgctccgtggctgctttccagcgagagctgcttaggaagcggcgagagcgtgaacagaccaaagtcgagatgaccacacggggtggctacacggcccctgggaaagaactgtctttggagttggggggctctgaagcaacccctgaagatgaccccttgctgcggacgggctcggtatttggggggcttgtgcgggatgtgaggcgccggtacccgcactaccccagtgacctgcgagatgcgctgcactcccagtgtgtggccgctgtgctcttcatctacttcgcagccctcagccctgccatcaccttcggggggctgctgggagagaagaccgaggggctgatgggcgtgtccgagctgatcgtgtccaccgctgtgctcggcgtcctcttctctctgctgggagctcagccgctgcttgtggttggcttctctgggccgctgcttgtgtttgaggaagccttcttcaagttctgccgagcccaggacctggagtacctcactggccgggtgtgggttggtctctggctggtggtcttcgtccttgccctggtggccgccgaaggcagcttcctggtccgctacatctcgcctttcacccaggagatctttgcctttctcatctcactcattttcatctacgagaccttctacaagctctacaaggtgttcacagagcacccactgctgccgttctacccccctgagcctggaggggtccctggatgctggtctggagccaaatggcagctgccccccaccgagggcccccccagcccgaggaaccagcccaatacggcactgctctcactcatcctcatgctcgggaccttcttcatagccttcttcctgcgcaagttcaggaacagccgcttcctggggggcaaggctcgtcgcatcatcggggactttggcatccccatctccatcctggtgatggtcctggtggattactccatcacagacacctacacgcagaagctgacagtgcctacagggctctcagtgacctctcccgataagcgctcgtggttcatcccacccctgggcagtgcccgtcctttcccgccgtggatgatggtggcagccgctgttcccgccctcctcgtcctcatcctgatcttcatggagacacagatcacggcgcttatcgtcagccagaaggcgcggaggctgctcaagggctccggtttccacctggacctgctcctcattggctccctgggggggctctgtgggctgtttgggttgccctggctcacggctgccacggtccgctccgtcacccatgtcaatgcgttgacagtgatgcgtactgccatcgcgcctggtgacaagccccagatccaggaggtgcgggagcagcgggtcactggtgtgctcatcgccagcctcgtgggcctgtccatcgtcatgggggctgtgctgcgtcggatcccattggctgtgctctttgggatcttcctgtacatgggggtcacgtccctgtctggtatccagctgtcccagcgtttgttgctcatcctcatgccggcaaaacaccatcctgagcagccctatgtgaccaaggtgaagacgtggcggatgcatctgttcacctgcatccagctgggctgcatcgcactgctctgggtggtcaagtccacggcggcctcactcgcctttcccttcctgctgctgctcacggtgcctctgaggcattgccttctgccccggctcttccaggacagggagctgcaggcgctggactcggaagatgctgaaccaaacttcgatgaggatggccaggatgagtacaatgagctgcacatgccagtgtgacccttgaagacagtgcccctcagagaccccaagaccttagggattgacacctgggcctcaggcagagcccagccctgggctggggggctcctcaggacccagagatgtgcctggaaccactcctgatgccatggctagagtggcccccctgacttctgcccggggtgttgacctcgcctcacctttcacagaccagaccggcacaggctttgagctcattataaccacactccttgtctcgtgtctgcctc

SEQ ID NO: 152528 - DNA, 4454 bp, Artificial Sequence
  derived and/or modified sequence
ggggaggggaggctaaaagcagggttggggagcgaatctgggggattgtgggaatatcgggccgcgccccagcccccagcgatgcgtggggcgcctggagaaggggcgcacgggcaggtggggtgctgcggggcccgcgcgtgggggccgcgccggccggggcggggtgagtcacggcccgcccgctcccattgtgcggcccggcggcggcggcggcggcggcggcggcggcggaggtgcggagcggagcgcgaggaggtggagccgcgggctgcgggctccggcgcctgcgtccgcccggccagcccggctctgcgctgcgagaggccggacggcagtcgcggctgcgctcgggagagagcgcgggggacatggggcgcggcggcccgcctgggcctcgcaggctccggagccccgagggctccccgctaggccccctcagtggcccctccttctcacctgggtctcgggtcccctagtgagcgagagcgtccccagccgcctacctggccatggccaacggagtgatcccgccgcccgggggcgcctcccccctaccccaggtccgggtgcccttggaggagccccctctaagtccagacgtggaggaggaggacgatgacttgggcaagaccttggctgtgagcaggtttggggacctcatcagcaagcccccggcctgggaccccgagaagcccagccgcagctacagcgagcgggactttgagtttcaccggcacacatcccaccacacccaccacccgctctcagcgcgcctgcctccaccccacaagctgcggcggctgccccccacctctgcccggcacaccaggagaaagaggaagaaggagaaaacctctgctcctccctccgaggggacccctcccatccaggaggaggggggagctggagtggatgaggaagaggaggaagaggaggaagaggaaggagaatctgaggcagaacctgtggagcccccccactcagggaccccacagaaggcaaagttctccattggaagtgacgaggatgacagtccaggcctccctgggagggctgctgtcaccaagcccctgccctcggtgggcccacacactgacaagagcccccagcactccagcagctcccccagcccccgggcccgggcctcccgactcgctggggagaaaagccggccctggagcccatcggccagttatgacctgcgggagcgactgtgcccaggcagtgccctgggcaacccaggtggtccagagcagcaggtgcccacagatgaggcggaggcccagatgctgggttctgcagacctggacgacatgaagagtcaccgactggaggacaaccctggtgtgcggcgacacttagtgaaaaagccctcccggacgcagggcgggaggggcagtcccagcggcctggcccccatccttcgcaggaagaagaagaagaaaaagctggaccggaggcctcatgaggtgttcgtggagctgaacgagctgatgctggaccgcagccaggagccccactggcgggagacggcccgctggatcaagtttgaggaggacgtggaggaggagacggagcgctgggggaagccccatgttgcctcgctctccttccgtagccttctggagctcaggaggaccatcgcccatggagctgccctcctggacctggagcaaaccaccctgccaggcattgcacacctcgtggtggagaccatgattgtgtctgaccagatccggccggaggacagggccagcgtcctacgtaccctgctactgaagcacagccatcccaacgatgacaaggacagtggcttctttccccgaaacccatcgagctccagcatgaactcggttctggggaatcatcacccaactcccagccatggccctgatggggcggtgcctaccatggctgatgacctgggggagccagccccactctggccacatgaccctgacgccaaggagaagcccctccacatgcctgggggagatggtcaccgggggaaaagcctgaagctgctggagaagatccctgaagatgctgaggccacggttgtgcttgtgggttgtgtgcctttcttggagcagcctgcagcagccttcgtgcgtctgaatgaggctgtactcctggagtctgtgcttgaggtccctgtcccggtccgcttcctcttcgtgatgctggggcccagccacaccagcactgactatcacgagcttgggcgctccattgccacccttatgtctgacaagctgtttcatgaggctgcctaccaggcagatgaccggcaagacctcctaagtgccatcagcgagttcctggatggcagcattgtgatccccccgtccgaggtggagggccgtgacctgctgcgctccgtggctgctttccagcgagagctgcttaggaagcggcgagagcgtgaacagaccaaagtcgagatgaccacacggggtggctacacggcccctgggaaagaactgtctttggagttggggggctctgaagcaacccctgaagatgaccccttgctgcggacgggctcggtatttggggggcttgtgcgggatgtgaggcgccggtacccgcactaccccagtgacctgcgagatgcgctgcactcccagtgtgtggccgctgtgctcttcatctacttcgcagccctcagccctgccatcaccttcggggggctgctgggagagaagaccgaggggctgatgggcgtgtccgagctgatcgtgtccaccgctgtgctcggcgtcctcttctctctgctgggagctcagccgctgcttgtggttggcttctctgggccgctgcttgtgtttgaggaagccttcttcaagttctgccgagcccaggacctggagtacctcactggccgggtgtgggttggtctctggctggtggtcttcgtccttgccctggtggccgccgaaggcagcttcctggtccgctacatctcgcctttcacccaggagatctttgcctttctcatctcactcattttcatctacgagaccttctacaagctctacaaggtgttcacagagcacccactgctgccgttctacccccctgagggggccctggaggggtccctggatgctggtctggagccaaatggcagtgccctgccccccaccgagggcccccccagcccgaggaaccagcccaatacggcactgctctcactcatcctcatgctcgggaccttcttcatagccttcttcctgcgcaagttcaggaacagccgcttcctggggggcaaggctcgtcgcatcatcggggactttggcatccccatctccatcctggtgatggtcctggtggattactccatcacagacacctacacgcagaagctgacagtgcctacagggctctcagtgacctctcccgataagcgctcgtggttcatcccacccctgggcagtgcccgtcctttcccgccgtggatgatggtggcagccgctgttcccgccctcctcgtcctcatcctgatcttcatggagacacagatcacggcgcttatcgtcagccagaaggcgcggaggctgctcaagggctccggtttccacctggacctgctcctcattggctccctgggggggctctgtgggctgtttgggttgccctggctcacggctgccacggtccgctccgtcacccatgtcaatgcgttgacagtgatgcgtactgccatcgcgcctggtgacaagccccagatccaggaggtgcgggagcagcgggtcactggtgtgctcatcgccagcctcgtgggcctgtccatcgtcatgggggctgtgctgcgtcggatcccattggctgtgctctttgggatcttcctgtacatgggggtcacgtccctgtctggtatccagctgtcccagcgtttgttgctcatcctcatgccggcaaaacaccatcctgagcagccctatgtgaccaaggtgaagacgtggcggatgcatctgttcacctgcatccagctgggctgcatcgcactgctctgggtggtcaagtccacggcggcctcactcgcctttcccttcctgctgctgctcacggtgcctctgaggcattgccttctgccccggctcttccaggacagggagctgcaggcgctggactcggaagatgctgaaccaaacttcgatgaggatggccaggatgagtacaatgagctgcacatgccagtgtgacccttgaagacagtgcccctcagagaccccaagaccttagggattgacacctgggcctcaggcagagcccagccctgggctggggggctcctcaggacccagagatgtgcctggaaccactcctgatgccatggctagagtggcccccctgacttctgcccggggtgttgacctcgcctcacctttcacagaccagaccggcacaggctttgagctcattataaccacactccttgtctcgtg

SEQ ID NO: 152529 - DNA, 4134 bp, Artificial Sequence
  derived and/or modified sequence
cccagcccccagcgatgcgtggggcgcctggagaaggggcgcacgggcaggtggggtgctgcggggcccgcgcgtgggggccgcgccggccggggcgggggctccccgctaggccccctcagtggcccctccttctcacctgggtctcgggtcccctagtgagcgagagcgtccccagccgcctacctggccatggccaacggagtgatcccgccgcccgggggcgcctcccccctaccccaggtccgggtgcccttggaggagccccctctaagtccagacgtggaggaggaggacgatgacttgggcaagaccttggctgtgagcaggtttggggacctcatcagcaagcccccggcctgggaccccgagaagcccagccgcagctacagcgagcgggactttgagtttcaccggcacacatcccaccacacccaccacccgctctcagcgcgcctgcctccaccccacaagctgcggcggctgccccccacctctgcccggcacaccaggagaaagaggaagaaggagaaaacctctgctcctccctccgaggggacccctcccatccaggaggaggggggagctggagtggatgaggaagaggaggaagaggaggaagaggaaggagaatctgaggcagaacctgtggagcccccccactcagggaccccacagaaggcaaagttctccattggaagtgacgaggatgacagtccaggcctccctgggagggctgctgtcaccaagcccctgccctcggtgggcccacacactgacaagagcccccagcactccagcagctcccccagcccccgggcccgggcctcccgactcgctggggagaaaagccggccctggagcccatcggccagttatgacctgcgggagcgactgtgcccaggcagtgccctgggcaacccaggtggtccagagcagcaggtgcccacagatgaggcggaggcccagatgctgggttctgcagacctggacgacatgaagagtcaccgactggaggacaaccctggtgtgcggcgacacttagtgaaaaagccctcccggacgcagggcgggaggggcagtcccagcggcctggcccccatccttcgcaggaagaagaagaagaaaaagctggaccggaggcctcatgaggtgttcgtggagctgaacgagctgatgctggaccgcagccaggagccccactggcgggagacggcccgctggatcaagtttgaggaggacgtggaggaggagacggagcgctgggggaagccccatgttgcctcgctctccttccgtagccttctggagctcaggaggaccatcgcccatggagctgccctcctggacctggagcaaaccaccctgccaggcattgcacacctcgtggtggagaccatgattgtgtctgaccagatccggccggaggacagggccagcgtcctacgtaccctgctactgaagcacagccatcccaacgatgacaaggacagtggcttctttccccgaaacccatcgagctccagcatgaactcggttctggggaatcatcacccaactcccagccatggccctgatggggcggtgcctaccatggctgatgacctgggggagccagccccactctggccacatgaccctgacgccaaggagaagcccctccacatgcctgggggagatggtcaccgggggaaaagcctgaagctgctggagaagatccctgaagatgctgaggccacggttgtgcttgtgggttgtgtgcctttcttggagcagcctgcagcagccttcgtgcgtctgaatgaggctgtactcctggagtctgtgcttgaggtccctgtcccggtccgcttcctcttcgtgatgctggggcccagccacaccagcactgactatcacgagcttgggcgctccattgccacccttatgtctgacaagctgtttcatgaggctgcctaccaggcagatgaccggcaagacctcctaagtgccatcagcgagttcctggatggcagcattgtgatccccccgtccgaggtggagggccgtgacctgctgcgctccgtggctgctttccagcgagagctgcttaggaagcggcgagagcgtgaacagaccaaagtcgagatgaccacacggggtggctacacggcccctgggaaagaactgtctttggagttggggggctctgaagcaacccctgaagatgaccccttgctgcggacgggctcggtatttggggggcttgtgcgggatgtgaggcgccggtacccgcactaccccagtgacctgcgagatgcgctgcactcccagtgtgtggccgctgtgctcttcatctacttcgcagccctcagccctgccatcaccttcggggggctgctgggagagaagaccgaggggctgatgggcgtgtccgagctgatcgtgtccaccgctgtgctcggcgtcctcttctctctgctgggagctcagccgctgcttgtggttggcttctctgggccgctgcttgtgtttgaggaagccttcttcaagttctgccgagcccaggacctggagtacctcactggccgggtgtgggttggtctctggctggtggtcttcgtccttgccctggtggccgccgaaggcagcttcctggtccgctacatctcgcctttcacccaggagatctttgcctttctcatctcactcattttcatctacgagaccttctacaagctctacaaggtgttcacagagcacccactgctgccgttctacccccctgagggggccctggaggggtccctggatgctggtctggagccaaatggcagtgccctgccccccaccgagggcccccccagcccgaggaaccagcccaatacggcactgctctcactcatcctcatgctcgggaccttcttcatagccttcttcctgcgcaagttcaggaacagccgcttcctggggggcaaggctcgtcgcatcatcggggactttggcatccccatctccatcctggtgatggtcctggtggattactccatcacagacacctacacgcagaagctgacagtgcctacagggctctcagtgacctctcccgataagcgctcgtggttcatcccacccctgggcagtgcccgtcctttcccgccgtggatgatggtggcagccgctgttcccgccctcctcgtcctcatcctgatcttcatggagacacagatcacggcgcttatcgtcagccagaaggcgcggaggctgctcaagggctccggtttccacctggacctgctcctcattggctccctgggggggctctgtgggctgtttgggttgccctggctcacggctgccacggtccgctccgtcacccatgtcaatgcgttgacagtgatgcgtactgccatcgcgcctggtgacaagccccagatccaggaggtgcgggagcagcgggtcactggtgtgctcatcgccagcctcgtgggcctgtccatcgtcatgggggctgtgctgcgtcggatcccattggctgtgctctttgggatcttcctgtacatgggggtcacgtccctgtctggtatccagctgtcccagcgtttgttgctcatcctcatgccggcaaaacaccatcctgagcagccctatgtgaccaaggtgaagacgtggcggatgcatctgttcacctgcatccagctgggctgcatcgcactgctctgggtggtcaagtccacggcggcctcactcgcctttcccttcctgctgctgctcacggtgcctctgaggcattgccttctgccccggctcttccaggacagggagctgcaggcgctggactcggaagatgctgaaccaaacttcgatgaggatggccaggatgagtacaatgagctgcacatgccagtgtgacccttgaagacagtgcccctcagagaccccaagaccttagggattgacacctgggcctcaggcagagcccagccctgggctggggggctcctcaggacccagagatgtgcctggaaccactcctgatgccatggctagagtggcccccctgacttctgcccggggtgttgacctcgcctcacctttcacagaccagaccggcacaggctttgagctcattataaccacactccttgtctcgtg

SEQ ID NO: 152530 - protein, 1085 aa, Artificial Sequence
  derived and/or modified sequence
MPHFTVVPVDGPRRGDYDNLEGLSWVDYGERAELDDSDGHGNHRESSPFLSPLEASRGIDYYDRNLALFEEELDIRPKVSSLLGKLVSYTNLTQGAKEHEEAESGEGTRRRAAEAPSMGTLMGVYLPCLQNIFGVILFLRLTWMVGTAGVLQALLIVLICCCCTLLTAISMSAIATNGVVPAGGSYFMISRSLGPEFGGAVGLCFYLGTTFAAAMYILGAIEILLTYIAPPAAIFYPSGAHDTSNATLNNMRVYGTIFLTFMTLVVFVGVKYVNKFASLFLACVIISILSIYAGGIKSIFDPPVFPVCMLGNRTLSRDQFDICAKTAVVDNETVATQLWSFFCHSPNLTTDSCDPYFMLNNVTEIPGIPGAAAGVLQENLWSAYLEKGDIVEKHGLPSADAPSLKESLPLYVVADIATSFTVLVGIFFPSVTGIMAGSNRSGDLRDAQKSIPVGTILAIITTSLVYFSSVVLFGACIEGVVLRDKYGDGVSRNLVVGTLAWPSPWVIVIGSFFSTCGAGLQSLTGAPRLLQAIAKDNIIPFLRVFGHGKVNGEPTWALLLTALIAELGILIASLDMVAPILSMFFLMCYLFVNLACAVQTLLRTPNWRPRFKYYHWALSFLGMSLCLALMFVSSWYYALVAMLIAGMIYKYIEYQGAEKEWGDGIRGLSLSAARYALLRLEEGPPHTKNWRPQLLVLLKLDEDLHVKYPRLLTFASQLKAGKGLTIVGSVIQGSFLESYGEAQAAEQTIKNMMEIEKVKGFCQVVVASKVREGLAHLIQSCGLGGMRHNSVVLGWPYGWRQSEDPRAWKTFIDTVRCTTAAHLALLVPKNIAFYPSNHERYLEGHIDVWWIVHDGGMLMLLPFLLRQHKVWRKCRMRIFTVAQMDDNSIQMKKDLAVFLYHLRLEAEVEVVEMHNSDISAYTYERTLMMEQRSQMLRQMRLTKTEREREAQLVKDRHSALRLESLYSDEEDESAVGADKIQMTWTRDKYMTETWDPSHAPDNFRELVHIKPDQSNVRRMHTAVKLNEVIVTRSHDARLVLLNMPGPPRNSEGDENYMEFLEVLTEGLERVLLVRGGGREVITIYS

SEQ ID NO: 152531 - protein, 780 aa, Artificial Sequence
  derived and/or modified sequence
MPHFTVVPVDGPRRGDYDNLEGLSWVDYGERAELDDSDGHGNHRESSPFLSPLEASRGIDYYDRNLALFEEELDIRPKVSSLLGKLVSYTNLTQGAKEHEEAESGEGTRRRAAEAPSMGTLMGVYLPCLQNIFGVILFLRLTWMVGTAGVLQALLIVLICCCCTLLTAISMSAIATNGVVPAGGSYFMISRSLGPEFGGAVGLCFYLGTTFAAAMYILGAIEILLTYIAPPAAIFYPSGAHDTSNATLNNMRVYGTIFLTFMTLVVFVGVKYVNKFASLFLACVIISILSIYAGGIKSIFDPPVFPVCMLGNRTLSRDQFDICAKTAVVDNETVATQLWSFFCHSPNLTTDSCDPYFMLNNVTEIPGIPGAAAGVLQENLWSAYLEKGDIVEKHGLPSADAPSLKESLPLYVVADIATSFTVLVGIFFPSVTGIMAGSNRSGDLRDAQKSIPVGTILAIITTSLVYFSSVVLFGACIEGVVLRDKYGDGVSRNLVVGTLAWPSPWVIVIGSFFSTCGAGLQSLTGAPRLLQAIAKDNIIPFLRVFGHGKVNGEPTWALLLTALIAELGILIASLDMVAPILSMFFLMCYLFVNLACAVQTLLRTPNWRPRFKYYHWALSFLGMSLCLALMFVSSWYYALVAMLIAGMIYKYIEYQGAEKEWGDGIRGLSLSAARYALLRLEEGPPHTKNWRPQLLVLLKLDEDLHVKYPRLLTFASQLKAGKGLTIVGSVIQGSFLESYGEAQAAEQTPCAALRLPTWPCSCPRTSPSTPATTSATWRAT

SEQ ID NO: 152532 - DNA, 3258 bp, Artificial Sequence
  derived and/or modified sequence
atgcctcacttcactgtggtgccggtggacggtccaaggcgcggagattacgacaaccttgaaggactctcctgggtggattacggagagagagccgagctggatgattctgatggccatggaaaccaccgcgaaagctccccattcctctcccccttagaggcatcacgtgggattgactattatgatagaaacctggcccttttcgaggaagaactggacattaggccaaaggtgtctagcctgctgggaaagctggtgtcatataccaacctaacacaaggcgctaaggagcacgaggaagcagagagtggtgagggtactcggcgcagggccgcggaggccccgagcatgggaaccctcatgggcgtctacctcccctgcttgcagaatatatttggcgtaatcctgttcttgcggctgacatggatggtgggcaccgccggagtgctccaggcgttgttgatagtactcatttgctgctgttgtactttgctcacggccatcagcatgtccgctattgccacaaatggagtggtgccagccggaggatcctatttcatgattagccgctctctcggtcctgagttcggcggagctgttggattgtgcttctacctgggaaccacattcgccgccgcaatgtatatcctaggcgcaatcgagatactacttacctatattgcgcccccggctgcaatcttctatccctccggggctcacgatacatctaatgccactctcaataacatgcgggtgtatggaacaatattcctgaccttcatgacgctagtagtgtttgtaggcgttaagtacgtaaacaaattcgcttcattattcctggcatgtgtaatcatttctatcttgagcatttacgccggggggattaaaagcatctttgacccacctgtgttccccgtctgcatgttgggaaacagaactctgtctcgcgaccagttcgatatttgtgctaagactgccgtcgtcgataatgaaacagtagccacacagctgtggtctttcttctgccacagtcctaatttaactacagactcttgcgacccttatttcatgctcaacaacgtaaccgaaattccaggaatccccggagccgcagcaggagtgctgcaggagaatttatggtcagcatatctggaaaaaggcgacattgttgagaagcacgggctcccatctgctgatgcaccctctctaaaggaatccctgccgctgtatgtggttgccgatatagccacctccttcaccgtgctggttgggatcttctttccaagcgtgacaggcatcatggccggctccaataggtccggggacctgagagatgctcagaaatctattcctgttggaacaatcctcgcaataattactacatcattggtctatttctcatccgtggtcttgttcggcgcctgcatcgagggcgtcgtgctacgggataaatatggcgacggcgttagtcggaacctggtcgtgggcacactggcttggccctcgccctgggtcatagttattggctctttttttagtacttgcggtgccgggttgcaatctctgaccggcgcgccccggctgctacaagcaattgccaaggataacattatcccctttctcagggtgtttgggcacgggaaggttaacggtgagcccacctgggcccttctcttaacagccctcatagcggagctggggatcttaattgccagcctcgacatggtcgctccaatactgtctatgttctttctgatgtgttatctgtttgttaacttagcttgtgctgtccagacgcttctccgcacaccaaattggcggccacggttcaaatactaccattgggcactgagcttcttaggcatgtctctttgcctcgcacttatgttcgtctcttcatggtactacgccttagttgcaatgctgatcgctggcatgatatataagtatatcgagtatcaaggagctgaaaaagagtggggagacggaatcaggggactgagcctttcagccgcaagatacgcactgctgagactagaggagggccctccccacacaaaaaactggaggccacagctcctggttctgctgaagctggacgaggacctccatgtcaagtaccccaggctgctgacattcgcctcacagctcaaagcagggaaagggctcactatcgtgggatcagtgatccagggttccttcctggagtcttacggcgaggcccaggcggcagaacaaactatcaaaaacatgatggaaatcgagaaggtcaaaggattctgtcaggtcgtggtcgcctctaaagtcagagaaggactggctcaccttatacagagctgtggcctgggtggaatgcgccataacagcgtggttctgggctggccgtacggttggaggcaaagcgaggatccacgggcatggaagacttttatagacaccgtcaggtgcacgaccgcagctcatctggcactcctcgtcccaaagaacatcgcattttatcccagtaatcacgagcgctatttagaaggccacattgacgtctggtggatagtgcacgacggcggcatgcttatgctccttcccttcctgctgaggcagcacaaggtctggaggaagtgccgcatgcgtattttcacagttgcccagatggatgataactctatacaaatgaagaaagacctggccgtgtttctgtaccacttacgcctggaagctgaagtggaagtggtcgaaatgcataactccgacatatcagcctatacatacgaaaggaccctcatgatggagcaacgtagccaaatgctgcgacagatgaggctgactaagaccgagcgggagcgggaggctcagctggtgaaggataggcatagcgctctgaggctggagagcctctattccgatgaagaggatgaaagtgcagtgggggcagacaagatccagatgacatggaccagggataagtacatgacagagacttgggacccaagccacgccccagacaactttcgagagctggtccacatcaagcctgatcagagtaatgtccggagaatgcacacagcagttaaactgaacgaagtgattgtaactcggagccacgatgcccggttggtgttacttaacatgccaggcccgcctcgcaacagtgagggcgacgagaattacatggaattcctggaggtgctgacagagggacttgaacgggtgcttctggtacgcggcggcgggcgcgaggtgatcactatttactcttag

SEQ ID NO: 152533 - DNA, 3258 bp, Artificial Sequence
  derived and/or modified sequence
atgccccacttcaccgtggtgcctgtggatggccccaggagaggagactatgacaacctggagggcctgtcctgggtggactatggagagcgggcagagctggatgacagtgatggccacggcaaccaccgggagagcagccccttcctgagccccctggaggccagccggggcatcgactactatgacaggaacctggccctgtttgaggaggagctggacatccggcccaaggtgagcagcctgctgggcaagctggtgtcctacaccaacctgacccagggcgccaaggagcacgaggaggccgagagcggggagggcacccggcggcgggctgctgaggcccccagcatgggcaccctgatgggcgtgtacctgccctgcctgcagaacatctttggagtcatcctcttcctgcggctgacctggatggtgggcacagctggggtgctgcaggccctgctgattgtgctgatctgctgctgctgcaccctgctgacagccatctccatgtctgccatcgccaccaatggagtggtgcctgctgggggcagctacttcatgatcagccgcagcctgggccctgagtttggaggagctgtgggcctgtgcttctacctgggcaccacctttgctgctgccatgtacatcctgggcgccatcgagatcctgctgacctacatcgcccccccagctgccatcttctaccccagcggggcccatgacaccagcaatgccaccctgaacaacatgagggtgtatggcaccatcttcctgaccttcatgaccctggtggtgtttgtgggcgtgaagtatgtgaacaagtttgccagcctcttcctggcctgtgtgatcatcagcatcctgagcatctatgccggcggcatcaagagcatctttgacccccctgtgtttcctgtgtgcatgctgggcaacagaaccctgagccgggaccagtttgacatctgtgccaagacagctgtggtggacaatgaaacagtggccacccagctgtggagcttcttctgccacagccccaacctgaccacagacagctgtgacccctacttcatgctgaacaacgtgacagagatccctggcatccctggagctgctgctggggtgctgcaggagaacctgtggagcgcctacctggagaagggggacatcgtggagaagcacggcctgcccagcgcagatgcccccagcctgaaggagagcctgcccctgtatgtggtggccgacatcgccaccagcttcaccgtgctggtgggcatcttcttccccagcgtgacaggcatcatggccggcagcaacagaagtggggacctgagagatgcccagaagagcatccctgtgggcaccatcctggccatcatcaccaccagcctggtgtacttcagctctgtggtgctgtttggagcctgcattgaaggagtggtgctgcgggacaagtatggagatggagtgtccaggaacctggtggtgggcaccctggcctggcccagcccctgggtgattgtgattggcagcttcttcagcacctgtggggccggcctgcagagcctgaccggggccccccggctgctgcaggccatcgccaaggacaacatcatccccttcctgcgggtgtttggacatggcaaggtgaatggagagcccacctgggccctgctgctgacagccctgattgctgagctgggcatcctgattgccagcctggacatggtggcccccatcctgtccatgttcttcctgatgtgctacctgtttgtgaacctggcctgtgctgtgcagaccctgctgcggacccccaactggaggccccgcttcaagtactaccactgggccctgtccttcctgggcatgagcctgtgcctggccctgatgtttgtgtcctcctggtactatgccctggtggccatgctgattgctggcatgatctacaagtacatcgagtaccagggcgctgagaaggagtggggagatggcatccggggcctgagcctgtctgctgcccgctatgccctgctgcggctggaggagggccccccccacaccaagaactggaggccccagctgctggtgctgctgaagctggatgaggacctgcacgtgaagtacccccggctgctgacctttgccagccagctgaaggccggcaagggcctgaccatcgtgggcagcgtcatccagggcagcttcctggagagctatggagaggcccaggccgctgagcagaccatcaagaacatgatggagattgagaaggtgaagggcttctgccaggtggtggtggccagcaaggtgcgggagggcctggcccacctgatccagagctgtggcctgggcggcatgaggcacaacagcgtggtgctgggctggccctacggctggaggcagagcgaggacccccgggcctggaagaccttcatcgacacagtgcgctgcaccacagctgcccacctggccctgctggtgcccaagaacatcgccttctaccccagcaaccacgagcgctacctggagggccacattgatgtgtggtggatcgtgcatgatggcggcatgctgatgctgctgcccttcctgctgcggcagcacaaggtgtggaggaaatgtaggatgaggatcttcaccgtggcccagatggatgacaacagcatccagatgaagaaggacctggccgtgttcctgtaccacctgcggctggaggccgaggtggaggtggtggagatgcacaacagcgacatcagcgcctacacctatgaaagaaccctgatgatggagcagaggagccagatgctgcggcagatgaggctgaccaagacagagcgggagcgggaggcccagctggtgaaggacagacacagcgccctgcggctggagagcctgtacagtgatgaggaggatgaatctgctgtgggcgctgacaagatccagatgacctggacccgggacaagtacatgacagagacctgggaccccagccacgccccagacaacttccgggagctggtgcacatcaagccagaccagagcaatgtgcggaggatgcacacagctgtgaagctgaatgaggtgattgtgaccaggagccatgatgcccggctggtgctgctgaacatgcctggcccccccaggaacagtgaaggagatgagaactacatggagttcctggaggtgctgacagagggcctggagcgggtgctgctggtgcggggcggcggccgggaggtgatcaccatctacagctag

SEQ ID NO: 152534 - DNA, 3258 bp, Artificial Sequence
  derived and/or modified sequence
atgccccacttcaccgtggtgcccgtggacggcccccggcggggcgattacgacaatctcgaaggacttagttgggtggactacggagaacgggctgagttggatgactcggatggccatggaaatcaccgcgagtcatctcccttcctgagtcctctggaggcttcccggggcattgactattacgatcgtaacctcgcactgtttgaagaagagttggacatccgaccaaaagtgagtagcctgcttggcaaattagtttcttacacaaatctgacccagggagccaaggaacatgaagaggcggaaagcggggagggaactagaaggcgcgctgcggaagcaccaagtatgggcacacttatgggtgtttatctcccttgcctccagaacatattcggagtcattctttttctgcggctcacctggatggtgggcactgccggagtgctccaggccctgctgattgtgctcatttgctgctgctgtactctgttaacagctatctccatgtccgccatagccacgaatggtgtagtgcctgccggcggaagttattttatgatctcacgaagcctaggccccgagttcgggggggccgtcggcctgtgcttttatctgggtacgaccttcgccgccgcaatgtatatcctcggagccatagagatcctgctcacgtacatcgcaccgccggcggctatcttttacccttcgggcgcacatgacacttccaacgccacccttaataatatgagagtctacggaaccatatttcttacttttatgacactggtggtctttgtcggagtcaaatatgtcaacaagttcgcctccctgttcctagcgtgcgtcatcatttccattcttagcatctatgctggcgggatcaagtcaatctttgacccccctgtttttccagtgtgtatgctgggaaacaggaccctctcacgcgatcagttcgacatttgtgcgaaaacagctgtggtggacaacgaaaccgtggcaacccagctgtggtccttcttctgtcattctcccaatctgaccacggacagttgtgacccatactttatgctcaacaatgtgacggagattccaggcatcccaggtgctgctgccggagtgctgcaggagaatctttggtctgcgtacctggaaaaaggagacatagtagagaagcacggactgccaagcgccgatgcaccaagcctcaaagagtccctgccactctacgtagtggccgatatcgcaacctccttcactgttcttgtggggatttttttccctagcgtgactgggattatggccggctcgaataggagcggcgacctgcgggacgctcagaaatccatcccggtgggcacaatcctcgccatcatcacaacatctctggtgtatttctcctccgtggtacttttcggtgcctgcatcgaaggcgtggtgctgagggataagtacggcgatggagtctcacgtaacctcgtggtcggaacactggcttggcctagtccatgggttattgttatcggtagttttttctccacctgcggagctggcctgcagtctcttacaggagcccccagactactccaggcgattgcaaaggataacatcatccccttcttgagggttttcggacacggaaaagttaacggcgagcccacatgggcactcttgctcactgcgctgatcgctgagctgggcatcctgattgcttctctggatatggttgcaccaattctttccatgttctttcttatgtgttatctgttcgtgaaccttgcttgtgctgtccagacattgctgagaactcccaactggaggcctagatttaagtattatcactgggctttgtcatttctcggcatgagcctctgcctggctctcatgttcgtaagcagttggtattatgctctggtcgccatgctcattgccggcatgatctataagtacatagaataccaaggcgccgagaaagagtggggcgacggaattagaggattaagtctctctgcagcaaggtacgcccttctcagactggaggagggaccaccacacaccaagaattggaggccacagctcttggtgctgctgaagcttgacgaggacctgcacgtcaagtacccacggctgctgaccttcgcaagccagctaaaggccggtaaaggcttgaccattgtcgggtcagttatccaagggtcatttctggagtcctatggcgaggcacaagccgccgagcagacaattaagaacatgatggaaattgagaaagtcaaagggttctgtcaagtggtggtggctagcaaagttagagaaggattagcacacctaattcagagctgcgggctcggagggatgaggcataacagcgtggtgctgggatggccctatgggtggagacagtcagaagacccccgggcttggaagacatttattgacacagttaggtgtacaactgctgcacacctcgctctgctagttcccaaaaatatcgcattctatccttcgaatcatgaacggtatttagagggccatatcgacgtatggtggattgtccacgacggcggcatgttaatgttgctgccctttcttctccggcagcataaagtgtggcgcaagtgtcggatgagaatctttactgtggcacagatggatgataattctattcagatgaagaaggatcttgctgtgttcctctatcacctgcggctggaagcagaggtggaagtcgtggagatgcacaacagtgacatatccgcgtacacttacgaacgaaccctgatgatggaacagcgttcacagatgctcaggcagatgcggctgacaaagacagagagggagcgtgaggcacagcttgtgaaggaccgccatagtgcattgaggctggaatccctgtactccgatgaagaagacgaatctgcggtcggagcagataagattcaaatgacctggacaagagataaatatatgacagaaacatgggacccctcacacgcccctgacaatttccgcgaactggtgcacatcaaacccgaccaaagcaacgttaggcggatgcatacagccgtgaaactgaatgaagttattgtgactcgctcccatgatgccagattggtcctgcttaatatgccggggccccccaggaacagcgagggtgatgagaattatatggagttcctcgaggttctgactgaggggctagaaagggtgttgctagttcggggggggggccgcgaggtcatcacgatatacagttag

SEQ ID NO: 152535 - DNA, 3258 bp, Artificial Sequence
  derived and/or modified sequence
atgcctcatttcacagttgtgcctgttgatgggcctcggaggggagattacgacaatctggaagggctgtcatgggtggattatggtgaacgagccgaactggacgactcagatggccacggaaatcaccgagagtcctcaccctttctgtctccactggaggccagcagaggcattgactactacgaccggaaccttgcattgtttgaggaagagttggacatcagacccaaagtgtcatcccttctgggaaagttagtgtcctatacaaatctgactcagggtgccaaagagcatgaggaagcagaaagcggtgagggaactagacgcagagcagccgaagctccctccatgggaaccttaatgggggtctaccttccatgtttgcagaacatctttggcgtgatcctttttctgcgtctgacctggatggttgggactgctggcgtgctgcaggcactcctcatcgttcttatttgttgctgttgtaccctgctgaccgctatctcaatgtcggcaattgcgacgaacggcgtggtccctgccggtggatcatatttcatgatatcacgctccttaggaccagagtttggtggtgccgtggggttatgcttctacctggggacaacctttgcagcagccatgtacatcctgggagccatcgagatcctgcttacctatattgcaccacccgctgctatcttctacccctctggggctcatgacacatccaacgccacattgaataacatgcgagtctacggaacaatcttcctgacattcatgacccttgtcgtcttcgtgggcgtgaaatacgtcaacaaattcgcctctctgtttttagcgtgcgtcatcatcagtattctgagcatttatgcagggggaattaaatctatcttcgaccctccagtgttccccgtgtgcatgctgggcaaccgcaccctgagcagagatcagtttgacatctgcgcgaagacggctgtggttgacaatgaaacagtagcaacccagctatggagttttttctgtcacagccccaatcttactaccgactcctgcgatccttacttcatgctgaacaatgttaccgaaatccccggtatcccaggcgctgctgccggagttttgcaagagaatctgtggagtgcttatctggaaaagggagatattgtggaaaagcacggtttgccatcagctgacgcaccaagtctcaaggaatcactccccctgtacgtggtggcggacattgccacgtctttcacagttctcgtgggaatcttttttccatccgtgacaggtatcatggcaggcagcaataggtccggagacctccgagatgcacagaagtctatcccggtgggaacaatcctggctatcatcaccacatcgctggtttatttctcaagcgtagtcctatttggggcatgcattgagggcgtcgtgctccgagataaatacggggacggtgtatcccggaatctcgtggtggggaccctggcctggcctagtccctgggttatcgtcatcgggtctttcttttcaacgtgtggagctggcttgcagtccctgactggcgctcccaggctgcttcaagcaatcgctaaggataacattattccctttctcagggtctttggccacgggaaagtgaatggagaaccgacttgggcgcttctcctcacagctctcatagccgagctgggcatcctgatcgcttcattggacatggtagcgccaatcctttcaatgttttttttaatgtgttacctctttgtgaatttagcttgcgctgtccaaacactgctgaggacccctaattggagaccgcgatttaagtactatcactgggctctgagcttcctcggcatgtctctctgcctggctttaatgtttgtaagcagttggtattacgctctcgtcgcaatgcttatagcgggaatgatttataaatatatagagtaccaaggcgcagaaaaagaatggggcgatgggatcagaggtttaagcctgagtgcggcacggtacgcgctattgagactcgaagagggaccgccacatactaaaaactggaggccccagttgctcgtgcttcttaagcttgacgaggacctgcatgtcaaatatcccaggctgttaactttcgccagccaactgaaagcaggcaagggcctgaccatcgtcggatctgtcatacagggtagctttcttgagtcctatggcgaagctcaggctgctgagcagacaatcaagaatatgatggaaatcgagaaggtgaaaggcttctgtcaagtggttgtcgcgagcaaagtcagggagggcctagcccacctgattcagagttgtgggctcgggggaatgaggcacaattcagtggtcttagggtggccttatggctggcggcagtcagaagacccccgagcctggaagacctttattgacacagtccggtgcactaccgccgctcacctcgcccttctcgttccaaagaacatcgctttttacccttcaaaccatgagcgttacctggaggggcacattgatgtttggtggattgtgcatgatggtggcatgctgatgctgttacccttcctcctgcgacagcacaaggtgtggcgaaaatgcagaatgagaatcttcacggtagctcaaatggatgacaattcaatccagatgaagaaggacttagctgtctttttatatcatctcagactcgaagctgaggtggaggttgtggagatgcacaacagcgatatctctgcctatacctacgagcgcacactgatgatggagcagcgtagccaaatgctccgacagatgcggttgacaaagacagagagggaacgggaagcacaacttgtgaaggatcgtcattcagctcttagactggagtccctatacagcgatgaagaagacgaaagcgctgtgggcgctgataagattcagatgacatggactagggacaagtacatgaccgaaacatgggacccaagccacgctcccgacaactttagggaactggtacacattaagccggaccagtccaacgtccgacgcatgcacactgcagtgaagttaaatgaagtgatagtcaccaggtctcacgatgcacgccttgtcctgttaaacatgccaggcccacccaggaactctgaaggcgatgaaaattatatggaatttctagaggttttgaccgaaggcttagaacgggtgcttctggtaagaggtggcggtcgcgaggttatcactatctatagctag

SEQ ID NO: 152536 - DNA, 3869 bp, Artificial Sequence
  derived and/or modified sequence
gcgagcgggcggggcgtgtcggcccggggcggcggggacagcggcggggacagcggcgggcggctgggacggcgggtgcggcggggccgagcccgcacgatgcctcacttcaccgtggtgccagtggacgggccgaggcgcggcgactatgacaacctcgaggggctcagttgggtggactacggggagcgcgccgagctggatgactcggacggacatggcaaccacagagagagcagcccttttctttcccccttggaggcttccagaggaattgactactatgacaggaacctggcactgtttgaggaagagctggacatccgcccaaaggtatcgtctcttctgggaaagctcgtcagctacaccaacctcacccagggcgccaaagagcatgaggaggccgagagtggggagggcacccgccggagggcagccgaggcacccagcatgggcaccctcatgggggtgtacctgccctgcctgcagaatatctttggggttatcctcttcctgcggctgacctggatggtgggcacagcaggtgtgctacaggccctcctcatcgtgcttatctgctgctgttgtaccctgctgacggccatctccatgagtgccatcgccaccaacggtgtggttccagctgggggctcctatttcatgatctctcgttcactggggccagaatttggaggtgctgtgggcctgtgcttctacctgggaacaacattcgcagcagccatgtacatcctgggggccatcgagatcttgctgacctacattgccccaccagctgccattttttacccatcgggtgctcatgacacgtcgaatgccactttgaacaatatgcgtgtgtatgggaccattttcctgaccttcatgaccctggtggtgtttgtgggggtcaagtatgtgaacaaatttgcctcgctcttcctggcctgtgtgatcatctccatcctctccatctatgctgggggcataaagtctatatttgaccctcccgtgtttccggtatgcatgctgggcaacaggaccctgtcccgggaccagtttgacatctgtgccaagacagctgtagtggacaatgagacagtggccacccagctatggagtttcttctgccacagccccaaccttacgaccgactcctgtgacccctacttcatgctcaacaatgtgaccgagatccctggcatccccggggcagctgctggtgtgctccaggaaaacctgtggagcgcctacctggagaagggtgacatcgtggagaagcatgggctgccctccgcagatgccccgagcctgaaggagagcctgcctctgtacgtggtcgctgacatcgccacatccttcaccgtgctggtcggcatcttcttcccttctgtaacaggcatcatggctggctcaaaccgctctggggaccttcgtgacgcccagaagtctatccctgtggggaccattctggccatcattacaacttccctcgtgtacttcagcagtgtggttctctttggtgcctgcattgagggtgtggttctccgggacaagtatggcgatggtgtcagcaggaacttggtggtgggcacactggcctggccttcaccctgggtcatcgtcatcggctccttcttttcaacgtgtggcgctggcctccagagcctcacaggggcaccacgcctattgcaggccattgccaaggacaacatcatccccttcctccgggtgtttggccacgggaaggtgaatggtgaacccacatgggcactcctcctgacggcactcatcgccgagctgggcatcctcatcgcctccctcgacatggtggcccccatcttatccatgttctttctgatgtgctacctgttcgtgaacctcgcctgtgcggtgcagacactcctgaggacccccaactggcggccccggttcaagtactatcactgggcgctgtccttcctgggcatgagtctctgcctggcccttatgtttgtctcctcctggtactatgccctggtggccatgctcatcgccggcatgatctacaaatacatcgagtaccaaggggctgagaaggagtggggtgacgggatccgaggcctgtccctgagcgctgcccgctacgcgctgttgcggctggaggaggggcctcctcacaccaagaactggcggccgcagctgctggtgctgctgaagctggacgaggacctccacgtgaagtacccgcggctcctcaccttcgcctcccagctcaaggctggcaagggcctgaccattgttggttctgtcatccaggggagcttcttggagagctatggcgaggctcaggccgccgagcagaccatcaagaacatgatggaaattgagaaggtgaagggcttctgccaggtggtggtggccagcaaggtgcgggaggggctggcccacctcatccagtcctgtggcctgggaggcatgcggcataactccgtggtgctgggctggccctacggctggcgacagagcgaggacccccgtgcctggaagaccttcattgacaccgtgcgctgcactacggctgcccacctggccctgctcgtgcccaagaacatcgccttctaccccagcaaccacgagcgctacctggagggccacatagacgtgtggtggatcgtgcacgatggtggcatgctcatgcttctgcccttcctgctgcgccagcataaggtctggaggaagtgccggatgcgcatcttcacagtggcccagatggatgacaacagcatccagatgaagaaggacctggctgtctttctgtaccatctgcgccttgaggccgaggtggaggtggtggagatgcataacagtgacatctctgcatacacctacgagcggacgctgatgatggagcagcggtcgcagatgctgcggcagatgagactgaccaagactgagcgggagcgagaagcccagctggtcaaggatcggcactcggccctgcggctggagagcctgtactcggacgaggaagatgagtctgcagtgggggctgacaagatccagatgacgtggaccagggacaagtacatgactgagacctgggaccccagccatgcccctgacaatttccgggagctggtgcacattaagccggaccaatccaatgtgcggcgcatgcacactgctgtgaagctcaatgaagtcattgtcacgcgctcccacgacgcccgcctggttctcctaaacatgcctggcccacccaggaacagtgagggcgacgagaactacatggagttcctcgaggtgctgaccgagggccttgagcgggtgctgttggtgcgcggtggtggccgtgaagtcatcaccatctactcctgagcccagtgtcatcttgtggcctggagtcgaggtcttggccaggacataacaagctgtggtctggggtaacagcctcttcccagcacccacctgccagccctgcttgcctggccctgtcctggacccagctttgctaggtctccttggaaaccaggcctgggcctcaaaatggagatggatcccaggtcttgtgggaccctgggatgtttggggactttactatctagcaccccagtaggcctgtcctggccagagaagactggtaggggccgagtggggtttgaaggcagccggcccggcccagcccaggagcgctatttattgcatatttattgtttggatgtcaccatcagagacgaagggaagggtagccagggagggagtccagcccagctgcctgcaggaagatctggctcagtctactatgggcagggccccccaccaagctgagccgaatggagacagctgagctgaggcctgactttttcaataaaacattgtgtagttctggg

SEQ ID NO: 152537 - DNA, 3258 bp, Artificial Sequence
  derived and/or modified sequence
atgccccacttcaccgtggtgcccgtggacggccccagaagaggcgactacgacaacctggagggcctgagctgggtggactacggcgagagagccgagctggacgacagcgacggccacggcaaccacagagagagcagccccttcctgagccccctggaggccagcagaggcatcgactactacgacagaaacctggccctgttcgaggaggagctggacatcagacccaaggtgagcagcctgctgggcaagctggtgagctacaccaacctgacccagggcgccaaggagcacgaggaggccgagagcggcgagggcaccagaagaagagccgccgaggcccccagcatgggcaccctgatgggcgtgtacctgccctgcctgcagaacatcttcggcgtgatcctgttcctgagactgacctggatggtgggcaccgccggcgtgctgcaggccctgctgatcgtgctgatctgctgctgctgcaccctgctgaccgccatcagcatgagcgccatcgccaccaacggcgtggtgcccgccggcggcagctacttcatgatcagcagaagcctgggccccgagttcggcggcgccgtgggcctgtgcttctacctgggcaccaccttcgccgccgccatgtacatcctgggcgccatcgagatcctgctgacctacatcgccccccccgccgccatcttctaccccagcggcgcccacgacaccagcaacgccaccctgaacaacatgagagtgtacggcaccatcttcctgaccttcatgaccctggtggtgttcgtgggcgtgaagtacgtgaacaagttcgccagcctgttcctggcctgcgtgatcatcagcatcctgagcatctacgccggcggcatcaagagcatcttcgacccccccgtgttccccgtgtgcatgctgggcaacagaaccctgagcagagaccagttcgacatctgcgccaagaccgccgtggtggacaacgagaccgtggccacccagctgtggagcttcttctgccacagccccaacctgaccaccgacagctgcgacccctacttcatgctgaacaacgtgaccgagatccccggcatccccggcgccgccgccggcgtgctgcaggagaacctgtggagcgcctacctggagaagggcgacatcgtggagaagcacggcctgcccagcgccgacgcccccagcctgaaggagagcctgcccctgtacgtggtggccgacatcgccaccagcttcaccgtgctggtgggcatcttcttccccagcgtgaccggcatcatggccggcagcaacagaagcggcgacctgagagacgcccagaagagcatccccgtgggcaccatcctggccatcatcaccaccagcctggtgtacttcagcagcgtggtgctgttcggcgcctgcatcgagggcgtggtgctgagagacaagtacggcgacggcgtgagcagaaacctggtggtgggcaccctggcctggcccagcccctgggtgatcgtgatcggcagcttcttcagcacctgcggcgccggcctgcagagcctgaccggcgcccccagactgctgcaggccatcgccaaggacaacatcatccccttcctgagagtgttcggccacggcaaggtgaacggcgagcccacctgggccctgctgctgaccgccctgatcgccgagctgggcatcctgatcgccagcctggacatggtggcccccatcctgagcatgttcttcctgatgtgctacctgttcgtgaacctggcctgcgccgtgcagaccctgctgagaacccccaactggagacccagattcaagtactaccactgggccctgagcttcctgggcatgagcctgtgcctggccctgatgttcgtgagcagctggtactacgccctggtggccatgctgatcgccggcatgatctacaagtacatcgagtaccagggcgccgagaaggagtggggcgacggcatcagaggcctgagcctgagcgccgccagatacgccctgctgagactggaggagggccccccccacaccaagaactggagaccccagctgctggtgctgctgaagctggacgaggacctgcacgtgaagtaccccagactgctgaccttcgccagccagctgaaggccggcaagggcctgaccatcgtgggcagcgtgatccagggcagcttcctggagagctacggcgaggcccaggccgccgagcagaccatcaagaacatgatggagatcgagaaggtgaagggcttctgccaggtggtggtggccagcaaggtgagagagggcctggcccacctgatccagagctgcggcctgggcggcatgagacacaacagcgtggtgctgggctggccctacggctggagacagagcgaggaccccagagcctggaagaccttcatcgacaccgtgagatgcaccaccgccgcccacctggccctgctggtgcccaagaacatcgccttctaccccagcaaccacgagagatacctggagggccacatcgacgtgtggtggatcgtgcacgacggcggcatgctgatgctgctgcccttcctgctgagacagcacaaggtgtggagaaagtgcagaatgagaatcttcaccgtggcccagatggacgacaacagcatccagatgaagaaggacctggccgtgttcctgtaccacctgagactggaggccgaggtggaggtggtggagatgcacaacagcgacatcagcgcctacacctacgagagaaccctgatgatggagcagagaagccagatgctgagacagatgagactgaccaagaccgagagagagagagaggcccagctggtgaaggacagacacagcgccctgagactggagagcctgtacagcgacgaggaggacgagagcgccgtgggcgccgacaagatccagatgacctggaccagagacaagtacatgaccgagacctgggaccccagccacgcccccgacaacttcagagagctggtgcacatcaagcccgaccagagcaacgtgagaagaatgcacaccgccgtgaagctgaacgaggtgatcgtgaccagaagccacgacgccagactggtgctgctgaacatgcccggcccccccagaaacagcgagggcgacgagaactacatggagttcctggaggtgctgaccgagggcctggagagagtgctgctggtgagaggcggcggcagagaggtgatcaccatctacagctag

SEQ ID NO: 152538 - protein, 208 aa, Artificial Sequence
  derived and/or modified sequence
MDQWGVYFNPVLVSFCQSFFGYPLSIFFIVVNEFCERFSYYGMRAILILYFTNFISWDDNLSTAIYHTFVALCYLTPILGALIADSWLGKFKTIVSLSIVYTIGQAVTSVSSINDLTDHNHDGTPDSLPVHVVLSLIGLALIALGTGGIKPCVSAFGGDQFEEGQEKQRNRFFSIFYLAINAGSLLSTIITPMLRGKRYLKGTSVGLF

SEQ ID NO: 152539 - protein, 282 aa, Artificial Sequence
  derived and/or modified sequence
MRAILILYFTNFISWDDNLSTAIYHTFVALCYLTPILGALIADSWLGKFKTIVSLSIVYTIGQAVTSVSSINDLTDHNHDGTPDSLPVHVVLSLIGLALIALGTGGIKPCVSAFGGDQFEEGQEKQRNRFFSIFYLAINAGSLLSTIITPMLRGKRYLKGTSVGLFLVRPSPCLLRFVLFFPSALFSSCQLHAGMHVGIWSKCFLPCEFHLLFVLFKSLIPVTTGESKPSLAWASIFLNCYSCKVMLVVRGKRQERCLGSQAGGRSCHFSLQALLPSDISVT

SEQ ID NO: 152540 - protein, 708 aa, Artificial Sequence
  derived and/or modified sequence
MGMSKSHSFFGYPLSIFFIVVNEFCERFSYYGMRAILILYFTNFISWDDNLSTAIYHTFVALCYLTPILGALIADSWLGKFKTIVSLSIVYTIGQAVTSVSSINDLTDHNHDGTPDSLPVHVVLSLIGLALIALGTGGIKPCVSAFGGDQFEEGQEKQRNRFFSIFYLAINAGSLLSTIITPMLRVQQCGIHSKQACYPLAFGVPAALMAVALIVFVLGSGMYKKFKPQGNIMGKVAKCIGFAIKNRFRHRSKAFPKREHWLDWAKEKYDERLISQIKMVTRVMFLYIPLPMFWALFDQQGSRWTLQATTMSGKIGALEIQPDQMQTVNAILIVIMVPIFDAVLYPLIAKCGFNFTSLKKMAVGMVLASMAFVVAAIVQVEIDKTLPVFPKGNEVQIKVLNIGNNTMNISLPGEMVTLGPMSQTNAFMTFDVNKLTRINISSPGSPVTAVTDDFKQGQRHTLLVWAPNHYQVVKDGLNQKPEKGENGIRFVNTFNELITITMSGKVYANISSYNASTYQFFPSGIKGFTISSTEIPPQCQPNFNTFYLEFGSAYTYIVQRKNDSCPEVKVFEDISANTVNMALQIPQYFLLTCGEVVFSVTGLEFSYSQAPSNMKSVLQAGWLLTVAVGNIIVLIVAGAGQFSKQWAEYILFAALLLVVCVIFAIMARFYTYINPAEIEAQFDEDEKKNRLEKSNPYFMSGANSQKQM

SEQ ID NO: 152541 - DNA, 441 bp, Artificial Sequence
  derived and/or modified sequence
gagtcctcctttttgcacacacacgaatacaaagagccatacgaccttcgggtatcctttttccattttttttcctccttaatcttgtgtgtgttttcaaattttttaaaaatagagatctgtagcagtgttgggaatgtcttactaccctatcagttaatcctatacattgctcaaggctcaactggaagcttttcttcttttcaggtttagctgtgcctcccagtgactataatgacaaggaagctgtaaatgtatttgagttaagcttttgcgagaaaccctacagcttggggcctgggctcctctgaccatcctcattgagaaaggaaagtgagtccagagaagttgatgcttcctacctgttggagcggcccagcagtgtaagcgtggttgttactgccccatccgccatgtccttcagtgccaccattctcttct

SEQ ID NO: 152542 - DNA, 627 bp, Artificial Sequence
  derived and/or modified sequence
atggaccaatggggtgtgtacttcaacccagttctcgttagtttttgccagtccttttttggctatcccttatccatcttctttatcgttgtcaatgaattttgtgaaagatttagctactatggcatgagagctattctgatcctctactttaccaattttatctcctgggatgataacctctccacggccatctatcatacctttgtcgctctgtgctatctgacacccattctgggtgccttgatagctgactcctggttgggcaaattcaaaaccatcgttagtctgtccatcgtatacaccatcggtcaggccgtgacttctgtgagtagcattaatgatctcaccgaccacaatcatgatggaaccccagactctcttccggtccacgtggtgctgagcctaattgggctagccctcattgccctcgggaccggcggcattaagccttgtgtgagtgcattcgggggtgaccagttcgaggaagggcaagagaaacagcgaaatcgattcttttccatcttttatctcgccatcaatgccggatcattactttccaccatcattaccccgatgcttagaggaaagagatacctgaaagggacgagtgtgggcctgttctag

SEQ ID NO: 152543 - DNA, 849 bp, Artificial Sequence
  derived and/or modified sequence
atgcgggctatcttaatcctctacttcactaactttatctcctgggacgacaacctatccacggccatctatcatacctttgtggccctctgctacctgacacccattctgggagctttaatcgcagactcttggctgggaaaatttaaaactatagtgagtttgtcgatcgtgtacacaatcggacaagcggtgaccagcgtctcttcaataaacgatctgacagatcataatcatgacggtacccctgactctctccctgttcacgtggttttgtccttgattggactggctctgattgctttaggcacgggaggcatcaagccctgtgtgagcgcattcggaggcgaccaatttgaggaaggacaggaaaaacagcggaatcgcttcttctccatcttttatctggccattaatgctgggtccttattgtccaccatcattacccccatgctgcgggggaagcgctacctgaaaggtacctctgtgggtctttttcttgtgcgaccgtccccatgtttacttagattcgtcctcttctttcccagtgcactcttctcatcctgtcagctccatgcagggatgcatgtgggcatctggtctaagtgtttccttccgtgcgagttccacctgttattcgtgctatttaaatctctgattcccgtcaccacgggggagtctaagcccagcctggcctgggcatctatcttcctgaactgctattcctgtaaggtgatgctggttgttagaggcaaacgccaggaaagatgcctgggctcccaggcgggaggccgtagttgtcatttcagcctccaagcccttctcccatccgatatctctgtgacgtag

SEQ ID NO: 152544 - DNA, 2127 bp, Artificial Sequence
  derived and/or modified sequence
atgggtatgtctaaaagtcatagcttctttgggtaccccctgtcaatctttttcatcgtagtgaatgagttttgtgaacggttctcgtactatggaatgcgcgctattctgatactgtatttcacaaacttcatcagttgggatgataacctgtccactgcgatctaccacacgttcgtggccctgtgttacttaactcctattttgggggctctgatcgccgacagctggctcggaaagttcaagacaattgtgtctctctcaatcgtgtatacaatagggcaagccgtcacaagcgtgagctcaatcaacgacctgaccgaccacaatcacgatgggacacccgactcattacctgtccacgtcgtcttatcccttattggactggccctaatcgctctgggcaccggaggtatcaagccatgtgtgtcagcttttggaggagatcaattcgaagaggggcaggaaaagcagaggaatcgattcttttccatcttttaccttgcgataaacgctggctccctgctcagcacgatcattacaccaatgttacgagtccagcagtgcgggatccacagcaagcaggcttgctaccccctcgcctttggagtgccagcagctctcatggccgtggccttaatcgtgttcgtccttggcagcggcatgtacaaaaaattcaaaccccaggggaacattatgggaaaggttgctaagtgtatagggttcgccataaaaaacagatttcgacacagaagtaaggcattcccaaaacgtgagcattggctagactgggcaaaggagaagtacgatgagcgcttgataagccagataaaaatggtgacccgcgtgatgtttttgtatatccctcttcccatgttttgggctctcttcgaccaacaggggtcgcgctggaccctccaggctaccaccatgtccggcaagatcggcgctcttgagatccagcctgaccaaatgcaaaccgtgaacgctatcctgatagtaattatggtccccattttcgatgctgttctataccccttaatcgccaaatgtggatttaattttactagtcttaagaagatggccgttgggatggtgctggccagtatggccttcgtggtcgccgctattgtccaggtggagatcgataagaccctgcccgtgttccctaagggtaatgaagtgcaaattaaagtcctcaatatcggcaataatacgatgaatatcagcctccctggcgagatggtaactcttggcccaatgtctcagaccaacgcctttatgaccttcgatgtgaataaattgacgaggattaatatcagcagccctgggagccccgtgacagccgtgacagatgatttcaagcaagggcagagacacactctgctggtttgggcccctaaccactaccaggtcgttaaagacggactgaatcagaagcctgaaaagggcgagaacggaatacgcttcgtgaacactttcaatgagcttattaccatcaccatgagcggcaaggtgtacgctaacatctccagctacaacgcaagcacttaccaattctttccttccggcataaaaggcttcactattagcagcacggagattccaccccagtgtcagccgaacttcaatactttttacctggagttcggatcagcctatacctacatcgtgcagagaaagaacgattcttgtccagaggttaaagtttttgaggatatctccgcaaatactgtgaacatggctttacagataccccagtacttcttactgacctgtggggaggttgtgtttagcgttacaggactggagtttagctactcacaggccccctctaatatgaaatcagtgctccaggccgggtggttgttgaccgttgctgtgggcaacatcattgtgttaattgtggcaggggccgggcaattctccaagcagtgggccgaatatattctctttgctgcactattactggtggtatgcgtgattttcgccatcatggccaggttttatacatacataaatcccgctgaaattgaggcacagttcgatgaagacgaaaagaaaaatcggctggagaaaagtaatccatactttatgtctggggcaaattcccagaagcagatgtag

SEQ ID NO: 152545 - DNA, 627 bp, Artificial Sequence
  derived and/or modified sequence
atggaccagtggggcgtgtacttcaaccctgtgctggtgtccttctgccagagcttcttcggctaccccctgagcatcttcttcatcgtggtgaatgagttctgtgagcgcttctcctactacggcatgagggccatcctgatcctgtacttcaccaacttcatctcctgggatgacaacctgagcacagccatctaccacacctttgtggccctgtgctacctgacccccatcctgggcgccctgattgctgacagctggctgggcaagttcaagaccatcgtgtccctgagcatcgtgtacaccatcggccaggccgtgacctctgtgagcagcatcaatgacctgacagaccacaaccatgatggcaccccagacagcctgcctgtgcacgtggtgctgagcctgattggcctggccctgattgccctgggcaccggcggcatcaagccctgtgtgtctgccttcggcggggaccagtttgaggagggccaggagaagcagaggaaccgcttcttcagcatcttctacctggccatcaatgccggcagcctgctgagcaccatcatcacccccatgctgcggggcaagcgctacctgaagggcacctctgtgggcctcttctag

SEQ ID NO: 152546 - DNA, 849 bp, Artificial Sequence
  derived and/or modified sequence
atgagggccatcctgatcctgtacttcaccaacttcatctcctgggatgacaacctgagcacagccatctaccacacctttgtggccctgtgctacctgacccccatcctgggcgccctgattgctgacagctggctgggcaagttcaagaccatcgtgtccctgagcatcgtgtacaccatcggccaggccgtgacctctgtgagcagcatcaatgacctgacagaccacaaccatgatggcaccccagacagcctgcctgtgcacgtggtgctgagcctgattggcctggccctgattgccctgggcaccggcggcatcaagccctgtgtgtctgccttcggcggggaccagtttgaggagggccaggagaagcagaggaaccgcttcttcagcatcttctacctggccatcaatgccggcagcctgctgagcaccatcatcacccccatgctgcggggcaagcgctacctgaagggcacctctgtgggcctcttcctggtgcggcccagcccctgcctgctgcgctttgtgctcttcttccccagcgccctcttcagcagctgccagctgcatgctggcatgcacgtgggcatctggagcaagtgcttcctgccctgtgagttccacctgctgtttgtgctcttcaagagcctcatccctgtgaccaccggggagagcaagcccagcctggcctgggccagcatcttcctgaactgctacagctgcaaggtgatgctggtggtgcggggcaagaggcaggagcgctgcctgggcagccaggccggcggccgcagctgccacttcagcctgcaggccctgctgcccagcgacatctctgtgacctag

SEQ ID NO: 152547 - DNA, 2127 bp, Artificial Sequence
  derived and/or modified sequence
atgggcatgagcaagagccacagcttcttcggctaccccctgagcatcttcttcatcgtggtgaatgagttctgtgagcgcttctcctactacggcatgagggccatcctgatcctgtacttcaccaacttcatctcctgggatgacaacctgagcacagccatctaccacacctttgtggccctgtgctacctgacccccatcctgggcgccctgattgctgacagctggctgggcaagttcaagaccatcgtgtccctgagcatcgtgtacaccatcggccaggccgtgacctctgtgagcagcatcaatgacctgacagaccacaaccatgatggcaccccagacagcctgcctgtgcacgtggtgctgagcctgattggcctggccctgattgccctgggcaccggcggcatcaagccctgtgtgtctgccttcggcggggaccagtttgaggagggccaggagaagcagaggaaccgcttcttcagcatcttctacctggccatcaatgccggcagcctgctgagcaccatcatcacccccatgctgcgggtgcagcagtgtggcatccacagcaagcaggcctgctaccccctggccttcggcgtgcctgctgccctgatggctgtggccctgattgtgtttgtgctgggcagcggcatgtacaagaagttcaagccccagggcaacatcatgggcaaggtggccaagtgcatcggctttgccatcaagaaccgcttccgccacaggagcaaggccttccccaagcgggagcactggctggactgggccaaggagaagtatgatgagcggctcatcagccagatcaagatggtgaccagggtgatgttcctgtacatccccctgcccatgttctgggccctgtttgaccagcagggcagccgctggaccctgcaggccaccaccatgtctgggaagattggagccctggagatccagcctgaccagatgcagacagtgaatgccatcctgattgtcatcatggtgcccatctttgatgctgtgctgtaccccctcatcgccaagtgtggcttcaacttcaccagcctgaagaagatggctgtgggcatggtgctggcctccatggcctttgtggtggccgccatcgtgcaggtggagattgacaagaccctgcctgtgttccccaagggaaatgaggtgcagatcaaggtgctgaacatcggcaacaacaccatgaacatcagcctgcccggggagatggtgaccctgggccccatgagccagaccaatgccttcatgacctttgatgtgaacaagctgacccgcatcaacatcagcagccctggcagccctgtgacagctgtgacagatgacttcaagcagggccagaggcacaccctgctggtgtgggcccccaaccactaccaggtggtgaaggatggcctgaaccagaagccagagaagggagaaaatggcatccgctttgtgaacaccttcaatgaactcatcaccatcaccatgtctgggaaggtgtatgccaacatcagcagctacaatgccagcacctaccagttcttccccagcggcatcaagggcttcaccatcagcagcacagagatccccccccagtgccagcccaacttcaacaccttctacctggagtttggcagcgcctacacctacatcgtgcagaggaagaatgacagctgcccagaggtgaaggtgtttgaggacatcagcgccaacacagtgaacatggccctgcagatcccccagtacttcctgctgacctgtggggaggtggtgttttctgtgacaggcctggagttctcctacagccaggcccccagcaacatgaagtctgtgctgcaggccggctggctgctgactgtggccgtgggcaacatcatcgtgctgattgtggccggggccggccagttcagcaagcagtgggccgagtacatcctgtttgctgccctgctgctggtggtgtgtgtgatctttgccatcatggcccgcttctacacctacatcaacccagctgagattgaggcccagtttgatgaagatgagaagaagaaccggctggagaagagcaacccctacttcatgtctggggccaacagccagaagcagatgtag

SEQ ID NO: 152548 - DNA, 627 bp, Artificial Sequence
  derived and/or modified sequence
atggaccagtggggcgtgtacttcaaccccgtgctggtgagcttctgccagtccttttttgggtatcctctaagcatattcttcatagtcgttaatgaattttgtgaacgcttctcctactacgggatgcgggccattctaattttgtacttcactaacttcattagctgggatgacaatcttagcaccgccatctatcataccttcgtggccttgtgttatctcaccccaatattaggagccctgatcgctgacagttggctgggaaaatttaagaccatcgtttcgctgtctattgtctacaccatcgggcaggccgtgacatctgtgagctctattaacgatcttactgaccacaaccacgatggaactcccgattctttgccagtgcacgtggtcctgtccctgatcggcctagccctgatcgctttgggcaccggcggcatcaaaccctgcgtgtccgcattcggaggagaccagttcgaagaaggccaggagaagcagcggaatagatttttttcaatcttttatttagcaatcaatgcgggctcattactctcaacaataataacacccatgctgcggggaaaacgctacttgaagggtacatcggttggccttttttag

SEQ ID NO: 152549 - DNA, 849 bp, Artificial Sequence
  derived and/or modified sequence
atgcgggccatcctgatcctgtacttcaccaacttcatcagctgggacgacaatttaagcacagccatctaccacacattcgtggccctttgttacttgaccccgatcttaggggcgttgatcgccgactcatggctggggaaatttaagacaatagtctcactaagcatcgtgtacacaatcggccaggccgtgaccagtgtgtcatcaatcaatgatttgacggaccacaatcacgacggaactccggattctctgcctgtccacgtggtgctatcattaatcggtctcgcacttattgccctcggtactggtggaattaagccttgcgtgtccgcattcggaggagatcagttcgaggagggacaagagaagcagaggaacaggtttttctccattttttacctggcaatcaatgcgggctcacttctctctaccattattacacccatgctcagaggtaaaagatatctcaaaggtacctccgttggtctctttctggtgagaccatcgccttgcctactgcgattcgtgctcttcttcccctccgctttgttttccagttgtcagttacatgctggcatgcacgtcggcatttggagcaagtgcttcctgccatgcgagttccacctactgttcgtcctgttcaagtccctaatccctgttactacgggtgagagcaaaccaagcctcgcatgggcttcaatctttctgaattgttactcatgtaaggttatgctggtggtcagggggaaacgccaggagcggtgtctgggaagccaagccggcggtcggagctgccacttctcccttcaagcattactgccatccgacatctcagtgacgtag

SEQ ID NO: 152550 - DNA, 2127 bp, Artificial Sequence
  derived and/or modified sequence
atgggcatgagcaagagccacagcttcttcggctaccccctgagcatattttttattgtggttaatgaattttgtgagcggttcagctattacgggatgcgggccatcctcatcctctactttaccaactttatttcctgggatgacaatttgtccactgccatctaccacacctttgtcgcactgtgctacctaacccccattcttggtgcactcatcgctgattcgtggttaggtaagtttaaaaccatagtatctttgtcaatcgtctacacaatcggacaagctgttaccagtgtgtctagcataaacgacctgaccgaccacaaccatgatgggactcctgactcattacctgtccatgtagtgctctcccttatcgggcttgccctgatagctttgggcacgggcggcatcaagccctgcgtctctgcattcggaggagaccagttcgaggaaggtcaggagaagcagagaaatcggttcttttcgattttctacttagccatcaatgcaggctccctactctctacaatcataacgcccatgctgagagtgcagcagtgtggcattcactcaaaacaggcttgctatccactggcatttggagtccctgcggccctcatggctgtggcgttgatcgtttttgttctgggtagcgggatgtataaaaagttcaaacctcagggcaatattatgggaaaggtggcaaaatgcatcgggtttgctattaagaaccgcttccggcatagatcaaaagccttcccgaagagagaacactggcttgattgggcaaaagaaaagtacgatgagcggttgattagccagattaaaatggtaacccgagtaatgtttttgtatattcctctacctatgttctgggctctctttgaccaacagggaagccgttggacacttcaggcgaccactatgtccggcaaaatcggggctctggagattcaaccagatcagatgcagacagtgaacgctatcctgatcgtcattatggtgccgatctttgacgccgtcctctatccgcttattgccaaatgcggattcaactttacatcccttaaaaaaatggctgtcggcatggtactggcttctatggcctttgtggtggctgccatcgttcaggttgagattgataagactctgccagtatttcccaaaggtaatgaagtccagattaaggttcttaatatcggaaacaacactatgaatatctctctgccaggggaaatggtcacgcttgggcctatgtctcagaccaacgctttcatgacctttgatgtcaataaactgacccggatcaacatttcctctccaggaagtcccgtgacagccgtcactgatgactttaagcagggacagcgccatactctcttggtatgggctccaaatcactatcaggtcgtgaaggatggactgaatcagaagcccgaaaagggggaaaatgggatcagattcgtgaacaccttcaacgagttgataactataaccatgtcaggaaaggtgtatgccaacatttcttcctataacgcgtcaacataccagttcttccccagcggtatcaaaggctttacgatatcctctacagaaatacccccacaatgtcaaccaaatttcaacacattctacctggagtttgggtcagcctatacatacattgtgcaacgcaagaacgattcatgtcccgaagttaaggtttttgaagacatctcagcaaacacagtgaatatggcactgcaaattccccagtatttcctccttacatgtggggaagtggtctttagcgtgacaggactggagttctcttactcacaggcccctagcaatatgaaaagtgtgctgcaggccggatggctcctgactgtagccgttggtaacattatcgtattgatcgtggcgggcgccgggcagttttcaaagcagtgggcagagtatattttattcgctgccctgctgctggtggtctgtgtaatctttgcgattatggcaagattttacacatatattaacccagccgagattgaggcgcagtttgatgaagacgagaagaagaatcgcctcgaaaagagtaatccatacttcatgtccggcgctaattcacagaaacagatgtag

SEQ ID NO: 152551 - DNA, 627 bp, Artificial Sequence
  derived and/or modified sequence
atggatcagtggggagtgtattttaatcctgtcttggtaagtttttgccaatccttctttggttaccctctgtcaatcttctttattgtggtgaacgagttttgcgagcgattctcttattacggcatgcgcgctatcctgatcttatacttcacaaattttatcagctgggatgacaacttgtctacagccatttatcatacttttgtggccctgtgttacttgacaccaatactgggagctctgatcgccgactcttggctggggaagtttaagactatcgtgtccctttccatagtttacaccattggacaagctgtgacgagtgtgagctcaattaatgacctcactgaccacaatcacgatggaacccctgatagcctccccgtacacgttgttctctccctgattgggctagcactcattgcactgggcacaggaggcatcaaaccctgtgtctcagctttcgggggagatcagttcgaggagggtcaggagaagcagaggaatcgctttttctcaatcttctacttagccattaacgctggatctctcctaagtactattattacccccatgctgagaggaaagcgatacttaaagggaaccagcgtcggcttattctag

SEQ ID NO: 152552 - DNA, 849 bp, Artificial Sequence
  derived and/or modified sequence
atgagagccatcctcatactgtatttcactaactttatttcctgggatgataatctctcaaccgccatataccacacctttgtagcgctgtgttaccttacccccatactgggagccctgattgccgatagctggttgggtaaatttaagaccattgttagcttaagcatcgtctacactattggtcaagctgtcacttccgtcagctctatcaatgatctcaccgaccacaatcatgatggtactcccgactcccttcccgtgcacgtggtgctgtctttaatcgggctggccctgatcgccctgggaacaggaggtatcaaaccgtgcgtaagtgcctttgggggagaccagtttgaggaggggcaggaaaaacagcggaaccgcttcttctccattttctatttggccattaatgccggttccctgctgagcactattataacacccatgctgagagggaagcgctatctgaagggcacaagcgtgggactattccttgtgcgccctagcccatgtctcctaagattcgtactgttttttccctcggctctgtttagctcatgccaactgcacgctggcatgcacgtgggaatttggtcaaagtgtttcctgccttgtgagtttcacttgctgtttgtcctgttcaagtccctgatccccgtcacaactggcgagagtaaaccctcacttgcttgggctagcatcttcctcaattgctactcttgcaaagtcatgctggttgtccggggtaagaggcaagaacgctgtctgggaagccaggcagggggtagatcctgtcacttcagcctgcaggcactgctgccttcagacatatctgtcacgtag

SEQ ID NO: 152553 - DNA, 2127 bp, Artificial Sequence
  derived and/or modified sequence
atgggcatgagcaagtctcactctttttttggctacccgctttcaatttttttcatagtagtgaacgaattctgcgaaaggttctcatattacggcatgcgcgctatcctcatcctatactttacaaatttcatctcgtgggacgataatctatctaccgcaatttatcacacatttgtcgccctgtgctatttgacaccaatactgggggctcttattgcagactcctggcttggaaaattcaaaacgattgtgtcactcagcattgtctacactatcggtcaggccgtcacctccgtgagctccattaacgacttaacggatcacaatcacgatggcacaccagactccctgccggttcatgttgtcttatccctaattggccttgcactgattgcgctgggaactgggggaatcaagccatgtgtctccgcctttggaggagaccagttcgaagagggtcaggagaagcagcgtaataggtttttctccattttctacctcgctataaacgccggttcgctgctgtcaactattattactcccatgttacgcgttcagcagtgcgggattcactctaagcaggcttgctatccactcgcctttggtgttcccgctgctctgatggcagttgccctgatcgtttttgtgctaggtagtggcatgtacaagaaattcaagccccagggtaacataatgggcaaggtggccaagtgcatcggtttcgctatcaaaaatcggtttaggcatcgtagcaaggcttttcccaagagagaacattggctggattgggcaaaagagaaatacgatgaaaggctgatctctcaaattaagatggttacccgagtaatgttcttatatatccccctgcctatgttctgggcactgtttgaccagcaaggcagtcgatggactctgcaggctactaccatgagcggtaagatcggtgcgctggaaatccaaccagatcagatgcagacagttaacgcaattcttattgtaattatggtccccatcttcgatgcggtgctgtatcccctgatcgctaaatgtggctttaactttacttcccttaagaagatggctgtaggtatggtcctggcttcgatggcctttgtcgtggctgctatcgtgcaggtggagatcgacaagacattgcccgtatttcccaaaggcaacgaagtacagatcaaagtgttgaatatcggcaataacaccatgaacataagccttcctggggagatggtgaccctgggccctatgtcacagactaacgcctttatgaccttcgacgtaaataaactgacacggatcaatatctctagtcccggttcaccagtgacagccgtgactgatgacttcaaacagggccagaggcatacacttttggtatgggctccaaaccattaccaagtcgtcaaggacgggttaaatcagaagccagagaaaggagagaatggtatacggttcgtgaatacgttcaacgaactcataaccataaccatgagcggcaaagtatacgccaatatttcttcctacaacgcgtccacgtaccagtttttcccctccggaatcaaaggatttactatcagcagcaccgaaatccccccacaatgccagcccaacttcaacacattttatctggaatttgggagcgcttacacgtacatcgtgcagagaaaaaacgatagctgtcctgaggttaaagtgttcgaagacattagcgcaaatacagttaacatggccctgcagattccacaatacttcctcttgacatgcggtgaggtggtcttctcagtaaccgggctggaattcagctactctcaggcgccatcaaacatgaagagcgtgctccaggcaggctggctgcttaccgtggcggtaggcaacatcattgtgctgattgtcgctggtgccggacaattttccaagcagtgggccgagtacattctcttcgcagctctgttactggtggtgtgtgtgatctttgccattatggccagattctacacctacataaatcccgcagaaatcgaagcccagttcgacgaggacgagaaaaaaaatcggttggagaaatccaatccttattttatgtctggcgcaaactcacagaaacaaatgtag

SEQ ID NO: 152554 - DNA, 1619 bp, Artificial Sequence
  derived and/or modified sequence
cagtcaccggtaagttactgaatctgcgttggctgcctttcatgccactggtgctcctttgtggctatggaccagtggggggtgtatttcaatcctgtgcttgtttctttttgtcagagtttctttggttatcccctgagcatcttcttcatcgtggtcaatgagttttgcgaaagattttcctactatggaatgcgagcaatcctgattctgtacttcacaaatttcatcagctgggatgataacctgtccaccgccatctaccatacgtttgtggctctgtgctacctgacgccaattctcggagctcttatcgccgactcgtggctgggaaagttcaagaccattgtgtcgctctccattgtctacacaattggacaagcagtcacctcagtaagctccattaatgacctcacagaccacaaccatgatggcacccccgacagccttcctgtgcacgtggtgctgtccttgatcggcctggccctgatagctctcgggactggaggaatcaaaccctgtgtgtctgcgtttggtggagatcagtttgaagagggccaggagaaacaaagaaacagatttttttccatcttttacttggctattaatgctggaagtttgctttccacaatcatcacacccatgctcagaggtaagagatacctgaaaggaacttctgttggtcttttttagtaaggccaagtccgtgtcttcttcgttttgttctgttcttcccttctgccctgttttctagctgtcagctacatgctgggatgcacgttggaatctggagtaagtgcttccttccctgtgagtttcacctcctttttgtcttatttaaatcccttatcccagtgaccactggagagtctaagccatccttagcatgggcatccatcttcctaaactgttattcatgcaaagtcatgctcgtggtaagaggtaagaggcaagagaggtgccttggaagccaagctggtggccgtagctgccattttagccttcaagctttgctccccagtgatatttctgtgacttaggaagagtttactgggcaaaattgtattgattttttgtttgttttgttttgtttttagaaggagtcttgctctgtcacccacgctggagcgcagtggcgtgatcttggctcactgcaacctccacctcctgggttcaagcaattctcctgcctcagcctcctgagtagctgggacaacaggcgcctgccaccatgcccggataatattttttgtatttttagtagagatgggatttcaccatgttagccaggatggtctcgatctcctgccctcgtgatctgcctgccttggcctcccaaagtgctgggattacaggtgtgagccaccacgcctggctaaggcaaagtttttttctttgctttcccatcatctcaagtatttccaaaagaactgctcagataaagagaatgggacagtgtcagtaactatcagaggtttgtgcttgctaatgctccatagagagtttgtgaatttcccatgtggaagggaatatgtggtgttactggtgacaaactaacaagaccatcctgtccacatttgaatcagattagattatgaaataaagatttcagggggatt

SEQ ID NO: 152555 - DNA, 1621 bp, Artificial Sequence
  derived and/or modified sequence
cagtcaccggtaagttactgaatctgcgttggctgcctttcatgccactggtgctcctttgtggctatggaccagtggggggtgtatttcaatcctgtgcttgtttcttttttgtcagagtttctttggttatcccctgagcatcttcttcatcgtggtcaatgagttttgcgaaagattttcctactatggaatgcgagcaatcctgattctgtacttcacaaatttcatcagctgggatgataacctgtccaccgccatctaccatacgtttgtggctctgtgctacctgacgccaattctcggagctcttatcgccgactcgtggctgggaaagttcaagaccattgtgtcgctctccattgtctacacaattggacaagcagtcacctcagtaagctccattaatgacctcacagaccacaaccatgatggcacccccgacagccttcctgtgcacgtggtgctgtccttgatcggcctggccctgatagctctcgggactggaggaatcaaaccctgtgtgtctgcgtttggtggagatcagtttgaagagggccaggagaaacaaagaaacagatttttttccatcttttacttggctattaatgctggaagtttgctttccacaatcatcacacccatgctcagaggtaagagatacctgaaaggaacttctgttggtctttttttagtaaggccaagtccgtgtcttcttcgttttgttctgttcttcccttctgccctgttttctagctgtcagctacatgctgggatgcacgttggaatctggagtaagtgcttccttccctgtgagtttcacctcctttttgtcttatttaaatcccttatcccagtgaccactggagagtctaagccatccttagcatgggcatccatcttcctaaactgttattcatgcaaagtcatgctcgtggtaagaggtaagaggcaagagaggtgccttggaagccaagctggtggccgtagctgccattttagccttcaagctttgctccccagtgatatttctgtgacttaggaagagtttactgggcaaaattgtattgattttttgtttgttttgttttgtttttagaaggagtcttgctctgtcacccacgctggagcgcagtggcgtgatcttggctcactgcaacctccacctcctgggttcaagcaattctcctgcctcagcctcctgagtagctgggacaacaggcgcctgccaccatgcccggataatattttttgtatttttagtagagatgggatttcaccatgttagccaggatggtctcgatctcctgccctcgtgatctgcctgccttggcctcccaaagtgctgggattacaggtgtgagccaccacgcctggctaaggcaaagtttttttctttgctttcccatcatctcaagtatttccaaaagaactgctcagataaagagaatgggacagtgtcagtaactatcagaggtttgtgcttgctaatgctccatagagagtttgtgaatttcccatgtggaagggaatatgtggtgttactggtgacaaactaacaagaccatcctgtccacatttgaatcagattagattatgaaataaagatttcagggggatt

SEQ ID NO: 152556 - DNA, 2263 bp, Artificial Sequence
  derived and/or modified sequence
cacctgccaggagcacgtcccgccggcaggtcgcaggagccctgggagccgccgccatgggaatgtccaaatcacacagtttctttggttatcccctgagcatcttcttcatcgtggtcaatgagttttgcgaaagattttcctactatggaatgcgagcaatcctgattctgtacttcacaaatttcatcagctgggatgataacctgtccaccgccatctaccatacgtttgtggctctgtgctacctgacgccaattctcggagctcttatcgccgactcgtggctgggaaagttcaagaccattgtgtcgctctccattgtctacacaattggacaagcagtcacctcagtaagctccattaatgacctcacagaccacaaccatgatggcacccccgacagccttcctgtgcacgtggtgctgtccttgatcggcctggccctgatagctctcgggactggaggaatcaaaccctgtgtgtctgcgtttggtggagatcagtttgaagagggccaggagaaacaaagaaacagatttttttccatcttttacttggctattaatgctggaagtttgctttccacaatcatcacacccatgctcagagttcaacaatgtggaattcacagtaaacaagcttgttacccactggcctttggggttcctgctgctctcatggctgtagccctgattgtgtttgtccttggcagtgggatgtacaagaagttcaagccacagggcaacatcatgggtaaagtggccaagtgcatcggttttgccatcaaaaatagatttaggcatcggagtaaggcatttcccaagagggagcactggctggactgggctaaagagaaatacgatgagcggctcatctcccaaattaagatggttacgagggtgatgttcctgtatattccactcccaatgttctgggccttgtttgaccagcagggctccaggtggacactgcaggcaacaactatgtccgggaaaatcggagctcttgaaattcagcccgatcagatgcagaccgtgaacgccatcctgatcgtgatcatggtcccgatcttcgatgctgtgctgtaccctctcattgcaaaatgtggcttcaatttcacctccttgaagaagatggcagttggcatggtcctggcctccatggcctttgtggtggctgccatcgtgcaggtggaaatcgataaaactcttccagtcttccccaaaggaaacgaagtccaaattaaagttttgaatataggaaacaataccatgaatatatctcttcctggagagatggtgacacttggcccaatgtctcaaacaaatgcatttatgacttttgatgtaaacaaactgacaaggataaacatttcttctcctggatcaccagtcactgctgtaactgacgacttcaagcagggccaacgccacacgcttctagtgtgggcccccaatcactaccaggtggtaaaggatggtcttaaccagaagccagaaaaaggggaaaatggaatcagatttgtaaatacttttaacgagctcatcaccatcacaatgagtgggaaagtttatgcaaacatcagcagctacaatgccagcacataccagttttttccttctggcataaaaggcttcacaataagctcaacagagattccgccacaatgtcaacctaatttcaatactttctaccttgaatttggtagtgcttatacctatatagtccaaaggaagaatgacagctgccctgaagtgaaggtgtttgaagatatttcagccaacacagttaacatggctctgcaaatcccgcagtattttcttctcacctgtggcgaagtggtcttctctgtcacgggattggaattctcatattctcaggctccttccaacatgaagtcggtgcttcaggcaggatggctgctgaccgtggctgttggcaacatcattgtgctcatcgtggcaggggcaggccagttcagcaaacagtgggccgagtacattctatttgccgcgttgcttctggtcgtctgtgtaatttttgccatcatggctcggttctatacttacatcaacccagcggagatcgaagctcaatttgatgaggatgaaaagaaaaacagactggaaaagagtaacccatatttcatgtcaggggccaattcacagaaacagatgtgaaggtcaggaggcaagtggaggatggactgggcccgcagatgccctgacctctgcccccaggtagcaggacactccattgg

SEQ ID NO: 152557 - DNA, 627 bp, Artificial Sequence
  derived and/or modified sequence
atggaccagtggggcgtgtacttcaaccccgtgctggtgagcttctgccagagcttcttcggctaccccctgagcatcttcttcatcgtggtgaacgagttctgcgagagattcagctactacggcatgagagccatcctgatcctgtacttcaccaacttcatcagctgggacgacaacctgagcaccgccatctaccacaccttcgtggccctgtgctacctgacccccatcctgggcgccctgatcgccgacagctggctgggcaagttcaagaccatcgtgagcctgagcatcgtgtacaccatcggccaggccgtgaccagcgtgagcagcatcaacgacctgaccgaccacaaccacgacggcacccccgacagcctgcccgtgcacgtggtgctgagcctgatcggcctggccctgatcgccctgggcaccggcggcatcaagccctgcgtgagcgccttcggcggcgaccagttcgaggagggccaggagaagcagagaaacagattcttcagcatcttctacctggccatcaacgccggcagcctgctgagcaccatcatcacccccatgctgagaggcaagagatacctgaagggcaccagcgtgggcctgttctag

SEQ ID NO: 152558 - DNA, 849 bp, Artificial Sequence
  derived and/or modified sequence
atgagagccatcctgatcctgtacttcaccaacttcatcagctgggacgacaacctgagcaccgccatctaccacaccttcgtggccctgtgctacctgacccccatcctgggcgccctgatcgccgacagctggctgggcaagttcaagaccatcgtgagcctgagcatcgtgtacaccatcggccaggccgtgaccagcgtgagcagcatcaacgacctgaccgaccacaaccacgacggcacccccgacagcctgcccgtgcacgtggtgctgagcctgatcggcctggccctgatcgccctgggcaccggcggcatcaagccctgcgtgagcgccttcggcggcgaccagttcgaggagggccaggagaagcagagaaacagattcttcagcatcttctacctggccatcaacgccggcagcctgctgagcaccatcatcacccccatgctgagaggcaagagatacctgaagggcaccagcgtgggcctgttcctggtgagacccagcccctgcctgctgagattcgtgctgttcttccccagcgccctgttcagcagctgccagctgcacgccggcatgcacgtgggcatctggagcaagtgcttcctgccctgcgagttccacctgctgttcgtgctgttcaagagcctgatccccgtgaccaccggcgagagcaagcccagcctggcctgggccagcatcttcctgaactgctacagctgcaaggtgatgctggtggtgagaggcaagagacaggagagatgcctgggcagccaggccggcggcagaagctgccacttcagcctgcaggccctgctgcccagcgacatcagcgtgacctag

SEQ ID NO: 152559 - DNA, 2127 bp, Artificial Sequence
  derived and/or modified sequence
atgggcatgagcaagagccacagcttcttcggctaccccctgagcatcttcttcatcgtggtgaacgagttctgcgagagattcagctactacggcatgagagccatcctgatcctgtacttcaccaacttcatcagctgggacgacaacctgagcaccgccatctaccacaccttcgtggccctgtgctacctgacccccatcctgggcgccctgatcgccgacagctggctgggcaagttcaagaccatcgtgagcctgagcatcgtgtacaccatcggccaggccgtgaccagcgtgagcagcatcaacgacctgaccgaccacaaccacgacggcacccccgacagcctgcccgtgcacgtggtgctgagcctgatcggcctggccctgatcgccctgggcaccggcggcatcaagccctgcgtgagcgccttcggcggcgaccagttcgaggagggccaggagaagcagagaaacagattcttcagcatcttctacctggccatcaacgccggcagcctgctgagcaccatcatcacccccatgctgagagtgcagcagtgcggcatccacagcaagcaggcctgctaccccctggccttcggcgtgcccgccgccctgatggccgtggccctgatcgtgttcgtgctgggcagcggcatgtacaagaagttcaagccccagggcaacatcatgggcaaggtggccaagtgcatcggcttcgccatcaagaacagattcagacacagaagcaaggccttccccaagagagagcactggctggactgggccaaggagaagtacgacgagagactgatcagccagatcaagatggtgaccagagtgatgttcctgtacatccccctgcccatgttctgggccctgttcgaccagcagggcagcagatggaccctgcaggccaccaccatgagcggcaagatcggcgccctggagatccagcccgaccagatgcagaccgtgaacgccatcctgatcgtgatcatggtgcccatcttcgacgccgtgctgtaccccctgatcgccaagtgcggcttcaacttcaccagcctgaagaagatggccgtgggcatggtgctggccagcatggccttcgtggtggccgccatcgtgcaggtggagatcgacaagaccctgcccgtgttccccaagggcaacgaggtgcagatcaaggtgctgaacatcggcaacaacaccatgaacatcagcctgcccggcgagatggtgaccctgggccccatgagccagaccaacgccttcatgaccttcgacgtgaacaagctgaccagaatcaacatcagcagccccggcagccccgtgaccgccgtgaccgacgacttcaagcagggccagagacacaccctgctggtgtgggcccccaaccactaccaggtggtgaaggacggcctgaaccagaagcccgagaagggcgagaacggcatcagattcgtgaacaccttcaacgagctgatcaccatcaccatgagcggcaaggtgtacgccaacatcagcagctacaacgccagcacctaccagttcttccccagcggcatcaagggcttcaccatcagcagcaccgagatccccccccagtgccagcccaacttcaacaccttctacctggagttcggcagcgcctacacctacatcgtgcagagaaagaacgacagctgccccgaggtgaaggtgttcgaggacatcagcgccaacaccgtgaacatggccctgcagatcccccagtacttcctgctgacctgcggcgaggtggtgttcagcgtgaccggcctggagttcagctacagccaggcccccagcaacatgaagagcgtgctgcaggccggctggctgctgaccgtggccgtgggcaacatcatcgtgctgatcgtggccggcgccggccagttcagcaagcagtgggccgagtacatcctgttcgccgccctgctgctggtggtgtgcgtgatcttcgccatcatggccagattctacacctacatcaaccccgccgagatcgaggcccagttcgacgaggacgagaagaagaacagactggagaagagcaacccctacttcatgagcggcgccaacagccagaagcagatgtag

SEQ ID NO: 152560 - protein, 467 aa, Artificial Sequence
  derived and/or modified sequence
MQMDNRLPPKKVPGFCSFRYGLSFLVHCCNVIITAQRACLNLTMVVMVNSTDPHGLPNTSTKKLLDNIKNPMYNWSPDIQGIILSSTSYGVIIIQVPVGYFSGIYSTKKMIGFALCLSSVLSLLIPPAAGIGVAWVVVCRAVQGAAQGIVATAQFEIYVKWAPPLERGRLTSMSTSGFLLGPFIVLLVTGVICESLGWPMVFYIFGACGCAVCLLWFVLFYDDPKDHPCISISEKEYITSSLVQQVSSSRQSLPIKAILKSLPVWAISTGSFTFFWSHNIMTLYTPMFINSMLHVNIKENGFLSSLPYLFAWICGNLAGQLSDFFLTRNILSVIAVRKLFTAAGFLLPAIFGVCLPYLSSTFYSIVIFLILAGATGSFCLGGVFINGLDIAPRYFGFIKACSTLTGMIGGLIASTLTGLILKQDPESAWFKTFILMAAINVTGLIFYLIVATAEIQDWAKEKQHTRL

SEQ ID NO: 152561 - protein, 209 aa, Artificial Sequence
  derived and/or modified sequence
MQMDNRLPPKKVPGFCSFRYGLSFLVHCCNVIITAQRACLNLTMVVMVNSTDPHGLPNTSTKKLLDNIKNPMYNWSPDIQGIILSSTSYGVIIIQVPVGYFSGIYSTKKMIGFALCLSSVLSLLIPPAAGIGVAWVVVCRAVQGAAQGIVATAQFEIYVKWAPPLERGRLTSMSTSGFLLGPFIVLLVTGVICESLGWPMVFYIFGQFK

SEQ ID NO: 152562 - DNA, 1404 bp, Artificial Sequence
  derived and/or modified sequence
atgcagatggacaatcgactacccccaaagaaggttccggggttttgctcttttaggtatggactgagttttctcgtgcattgctgtaatgtcatcatcacagcccagcgcgcctgtctcaatctcactatggttgtgatggtaaatagcaccgacccccatgggctccctaatactagtactaaaaaacttcttgataatataaaaaacccaatgtataactggtcacccgacatccagggaattattctctcctcaacttcttacggagtgatcatcatccaggtccccgtcggctatttctcaggcatttattcaaccaaaaaaatgatagggttcgcactgtgcctctcctccgtcctgtccttgctgataccaccggccgctggaataggcgttgcatgggtagttgtctgccgtgctgtgcaaggtgccgcacaaggaattgtggccactgcccagttcgaaatctatgtgaaatgggctccacctctcgagcgtggtcgcctgacatcaatgtccaccagcggattcctgctgggccctttcatcgtgctgctggttacgggcgtgatatgtgaaagcctgggttggcctatggtgttctatatatttggagcttgtgggtgtgctgtttgcttgctctggttcgtcctgttttacgacgatccgaaggatcatccctgtatatcaatttcggaaaaagagtacatcacttcctcgctcgtgcagcaggtgagcagttcccgccagagcctcccaattaaggccattctcaagagcctgccagtatgggcaatcagtactgggtcctttaccttcttctggtcccataacattatgacactgtacactcctatgtttattaactcaatgctgcatgtaaatattaaagagaatggattcctgagcagcctgccatacctgtttgcatggatctgtggtaatctcgccggccaactgtccgattttttcctaacacgcaatattcttagcgtgatcgccgtgaggaagctattcaccgcagcaggattcctgctgcccgctatattcggagtctgcttaccctatttatcatctacattctactcaatagtgattttcctgattttggccggtgccacaggctcattttgcttagggggcgtgtttattaatggcctggacatcgctccccggtatttcgggttcataaaggcttgtagcaccttaacaggcatgataggtgggttaattgcatctacacttacagggctgatcttgaaacaagaccccgagtctgcatggtttaagaccttcatcctcatggctgcaattaacgtgacaggactgatcttttacctcattgtcgcaactgccgagatccaagattgggccaaggaaaagcaacatacccgattgtag

SEQ ID NO: 152563 - DNA, 1404 bp, Artificial Sequence
  derived and/or modified sequence
atgcagatggacaataggctgccaccgaagaaggtacccggcttttgctcttttcgctatgggctgagtttcctcgtgcattgctgcaacgtcattatcaccgctcagcgggcctgtctcaacctcacgatggtggtcatggtaaactctacagatccgcatgggcttcccaatacaagcaccaaaaaactgctcgacaatatcaaaaacccgatgtataattggtcacctgacatccagggcatcatcctcagttctacgagctacggggtgatcatcattcaggtgcccgtagggtatttttccgggatctatagcaccaaaaagatgattggcttcgctctgtgtctgtcctctgtactgtccctgctaataccaccagcggccggtattggtgttgcttgggtggtggtttgccgcgcagtgcagggagccgcgcaaggcatcgtcgctactgcccagttcgagatctacgttaaatgggccccccctctagagagaggccgacttaccagcatgtctacaagcgggttcctcctgggaccattcattgtgttactcgtgaccggggtgatatgcgagagccttggttggcccatggtgttctacatcttcggagcttgcggttgcgctgtgtgcctactgtggttcgtgctcttttacgatgatccgaaggaccatccttgcattagtatctctgagaaggaatatatcacttcctctctggttcagcaggtgtcatctagtcggcagtccctgcccattaaggccatactaaaatccctccccgtttgggcaatcagtacgggatcctttaccttcttctggtctcacaacattatgactctatatacccctatgtttataaactccatgctgcatgtgaatattaaggaaaacgggttcctgtcctcgcttccttatctcttcgcctggatatgcggcaacctcgctggacagctgtccgactttttcctgacccggaatatcctgtcggtaatagcagtgcgcaagctattcaccgcagccggatttcttcttccagctattttcggcgtttgtttgccatatctcagctcgacgttctacagcatagtgattttccttatcctggcaggcgctaccgggtccttttgccttggcggggtttttatcaacgggttggatatcgcacctcgctattttggtttcattaaagcttgctcaacactcaccggaatgataggtgggcttattgcaagcactctgacagggcttatactgaagcaggacccagagagtgcctggttcaaaacattcattttaatggcggctattaatgtcactgggttgatcttttacctgattgtggccaccgctgagattcaggactgggcgaaggaaaagcagcatacccgactgtag

SEQ ID NO: 152564 - DNA, 1404 bp, Artificial Sequence
  derived and/or modified sequence
atgcagatggacaaccggctgccccccaagaaggtgcccggcttctgcagcttccgctatggcctgtccttcctggtgcactgctgcaacgtcatcatcacagcccagagggcctgcctgaacctgaccatggtggtgatggtgaacagcacagacccccacggcctgcccaacaccagcaccaagaagctgctggacaacatcaagaaccccatgtacaactggagcccagacatccagggcatcatcctgagcagcaccagctatggagtcatcatcatccaggtgcctgtgggctacttcagcggcatctacagcaccaagaagatgattggatttgccctgtgcctgagctctgtgctgagcctgctgatccccccagctgctggcattggagtggcctgggtggtggtgtgcagagctgtgcagggcgccgcccagggcatcgtggccacagcccagtttgagatctacgtgaagtgggccccacccctggagcggggccgcctgacctccatgagcaccagcggcttcctgctgggccccttcatcgtgctgctggtgactggagtcatctgtgagagcctgggctggcccatggtgttctacatctttggagcctgtggctgtgctgtgtgcctgctgtggtttgtgctcttctatgatgaccccaaggaccacccctgcatcagcatcagcgagaaggagtacatcaccagcagcctggtgcagcaggtgagcagcagccggcagagcctgcccatcaaggccatcctgaagagcctgcctgtgtgggccatcagcacaggcagcttcaccttcttctggagccacaacatcatgaccctgtacacccccatgttcatcaacagcatgctgcacgtgaacatcaaggaaaatggcttcctgagcagcctgccctacctgtttgcctggatctgtggcaacctggccggccagctgagtgacttcttcctgaccaggaacatcctgtctgtgattgctgtgaggaagctgttcaccgctgctggcttcctgctgcctgccatctttggagtgtgcctgccctacctgagcagcaccttctacagcatcgtcatcttcctgatcctggccggggccaccggcagcttctgcctgggcggcgtcttcatcaatggcctggacatcgccccccgctacttcggcttcatcaaggcctgcagcaccctgaccggcatgattggaggcctcatcgccagcaccctgaccggcctcatcctgaagcaggaccctgagagcgcctggttcaagaccttcatcctgatggccgccatcaacgtgacaggcctcatcttctacctgattgtggccacagctgagatccaggactgggccaaggagaagcagcacacccggctgtag

SEQ ID NO: 152565 - DNA, 1404 bp, Artificial Sequence
  derived and/or modified sequence
atgcagatggacaaccggctgccccccaagaaggtgcccggcttctgcagttttagatatggtctgagcttcctggtgcattgttgtaacgtgataattacagcacagagagcatgcctcaatttgaccatggtcgtgatggtgaactccactgacccacacggcttgccaaacacatcgaccaaaaagttactggacaacatcaaaaaccccatgtacaactggtcccctgacattcagggaatcatcctgagtagtacatcttacggcgtaatcattattcaggtgccagtcgggtacttttccgggatatacagtactaagaagatgatcggcttcgcattgtgtttatcatccgtgctctcactgctgatccccccggccgctgggatcggtgtcgcctgggttgtcgtgtgtagagccgtgcaaggcgcagcacaaggaatcgtcgctactgcccaatttgagatttacgttaagtgggctccacctctggagagagggcggttaaccagcatgtctacttctggattcctgttggggccatttatcgtgctgcttgtgactggcgtgatctgtgaaagcttaggatggcctatggtattttacattttcggagcttgcggatgcgccgtctgtctgctatggtttgtcctgttctatgacgaccccaaggaccatccatgtattagcatcagtgagaaggaatacatcacctcttccctcgtacaacaagtttcaagcagtcgacagagcctgcccatcaaggcaatccttaagtccctgcccgtgtgggccattagtactggatcgttcacattcttttggtctcataatataatgactctctacacccctatgttcattaacagcatgttgcatgtaaatattaaagagaatggcttcctgagttctctcccttacctgttcgcatggatttgtggaaatctggcaggccaactttctgatttttttctgacacggaacatcctgtctgttatcgccgtgagaaaattatttacggctgctggtttccttcttccggcaatctttggggtgtgcctaccctatctgagttcaaccttctattccatcgtgatttttctgattctcgcaggcgccaccggttctttttgcctgggaggggtgtttatcaatggactcgacatcgcacccaggtacttcggctttatcaaagcatgcagcacgcttactggcatgatcggcggtctgatcgctagcacattaaccgggctgatcttaaagcaggatcccgaatccgcctggtttaaaacctttatactcatggccgcaatcaatgtcacaggcctaatcttctacctcattgtggctaccgcagagattcaagattgggcaaaggagaagcagcacactcgcctctag

SEQ ID NO: 152566 - DNA, 1404 bp, Artificial Sequence
  derived and/or modified sequence
atgcagatggacaaccggctgccccccaagaaggtgcccggcttctgctccttcaggtatggtctgtctttcttggtgcactgttgcaatgtgatcatcacagcccagagagcctgcctgaacctcaccatggtcgtaatggtcaacagcacggacccacacggtcttcccaacactagtactaaaaaactcctggacaacataaagaacccaatgtataattggtctccagacattcagggcatcattttatcgagtacctcttacggcgtgattattattcaggtgcccgtcggttatttttccggcatttactccaccaagaagatgattgggttcgccctatgtttatctagcgtcctgtctttattgattccccccgccgccggtattggcgttgcctgggtggtggtctgtagggcagtgcagggagcggcgcagggcatcgtggccacagcacaatttgaaatttacgtcaagtgggcccctcctctagagaggggacgcctgacaagtatgagcacatctggttttttgttagggccattcatagtactgttagtgacaggagtgatttgtgagtccctgggttggccaatggtgttttatatattcggagcatgcggttgcgccgtgtgtctactgtggttcgtgctgttctacgatgacccgaaggaccatccatgcatcagcattagcgagaaggaatacatcacctctagtctggttcaacaggtctctagctcccggcaatccctcccaataaaggcaattctgaagagcctgccagtttgggcgatttccacaggcagcttcacctttttttggagtcacaatataatgactttgtacacacccatgttcatcaactccatgttacacgtgaatataaaggagaatggttttctctcttctcttccttatctgttcgcgtggatttgcgggaacctcgcgggccagctatccgattttttcctgacaagaaatatcctgtccgtaatagcggtcagaaagctcttcacggcagcaggcttcctgctccctgccatttttggcgtgtgtctcccctatctgagctcaactttttacagtatcgtgattttcctcattctggccggggccaccggatccttttgtctgggtggagtctttatcaacggtctggatatcgctcccagatactttggcttcatcaaggcttgcagcaccctgactggcatgatcggcggccttatcgcctcaaccttaaccgggttgattcttaagcaagacccagagtccgcctggttcaagacgtttattttaatggccgccattaatgttacgggtcttatattttatctcattgtggccacagccgagatccaggactgggcgaaagagaaacagcacactagactgtag

SEQ ID NO: 152567 - DNA, 1404 bp, Artificial Sequence
  derived and/or modified sequence
atgcaaatggacaaccgtctgccacccaaaaaggtgcccggtttctgctccttccgctacggcctgtcgtttctggtgcattgctgtaacgtgattatcacggcacagagagcctgcctgaatttaactatggtcgttatggtaaactcgactgacccacatggtctgccgaacactagtaccaaaaagctgctcgataatatcaaaaatccaatgtacaactggtcccctgacatccaggggatcatcttgtccagcaccagctacggagtcatcattatccaggtgcctgtggggtacttttccggaatatattccacaaaaaagatgatcgggtttgccctctgcctctctagcgtgcttagcctgctcataccaccagcggcaggaattggagtggcctgggtggtcgtgtgtcgggcagtgcagggagcagcgcagggaatcgtggccactgcacagtttgaaatttacgtaaaatgggctccacccctcgagcggggacggctgacctccatgagtacaagtggattcttgttaggaccttttatagtcttactggtgactggtgtcatttgtgagagtctgggctggcccatggtcttttatattttcggggcatgtggttgtgctgtatgtttgctgtggtttgtgctattctacgatgatccaaaggaccatccttgcatatcgatttctgaaaaggagtacattacttcatcattggtgcagcaagtctccagctcccggcaatcactgcctatcaaagctatcctgaagagcctcccggtttgggccatttctactggatcttttacttttttctggtcccacaatataatgactttatatacacccatgttcatcaattcaatgctgcacgtcaacatcaaggaaaacggctttttgtcaagtctcccgtatctgttcgcttggatctgtggcaacttggcgggacagttgtcagacttcttcttaacgagaaatattctgtccgttatcgccgttaggaagctgttcactgccgctggcttcctgctcccggctatatttggcgtttgcctgccctacctctctagcactttttactcaattgtcatttttttaattctcgctggcgctacagggtccttttgtctgggaggagtatttataaacggtctggatatagcacctcgatactttgggttcatcaaggcctgctctactctgacaggcatgatcggtggacttatcgcctccactctgaccgggctgatactgaaacaggatcctgagagcgcgtggttcaaaactttcatcctcatggctgccatcaacgtcacaggactgattttctacctcatcgtcgcgacagcagagattcaggactgggccaaggagaagcagcataccagactatag

SEQ ID NO: 152568 - DNA, 1404 bp, Artificial Sequence
  derived and/or modified sequence
atgcagatggataacaggctgcctcccaagaaagtccccggtttctgcagtttcaggtatggactttcctttctggtgcactgctgtaatgtgataatcactgcccagcgggcttgcctcaaccttacgatggtggtgatggtgaacagtacagatccacatggcttgcccaatactagcaccaaaaagctgcttgataatatcaaaaatcccatgtacaattggtcacctgacatccagggtatcatcctttcctctacctcgtacggtgtgatcatcatccaggtcccagtcgggtatttctctggcatctacagcacgaaaaagatgatcggattcgccttgtgcctctcaagcgttctgagcttgctgatccccccagctgcaggcattggggtcgcctgggtggtggtgtgtagagccgtgcagggagccgcacaagggattgtcgcaaccgcacaattcgagatatatgtgaaatgggcaccacctctcgaacggggacggctaaccagcatgagtacctccgggtttcttctggggccatttattgtccttcttgtaactggagtgatctgcgaatctctgggctggccgatggtgttctacatcttcggcgcatgcgggtgtgccgtgtgtttgctctggtttgtcctcttctacgacgacccaaaagatcacccgtgtatttctattagcgagaaagagtacataacctccagtttggtccagcaggtttcctcgagccgtcaatctctacctatcaaagctattctgaagtctctgcccgtctgggcaatatcaacaggaagcttcacattcttttggtcccacaacattatgactctctacactcccatgttcatcaattctatgcttcatgtcaacataaaagaaaacgggtttctgagctccttgccttatctgttcgcgtggatttgcggtaaccttgcaggtcagctctcagactttttccttacccgcaatatcctgagcgtcatcgctgtcagaaagttgttcactgcggctgggttcctcttgccggctatctttggggtgtgtttgccttatttgtccagtacgttctactctatagtgatttttctcatcctggccggagcgaccggatctttttgcctcgggggtgtcttcattaatggccttgatattgcacccaggtactttggattcatcaaggcatgtagtacccttaccggaatgatcgggggattgattgctagcacgcttactggcttaattttgaagcaagacccagaatctgcctggttcaagactttcatactgatggccgctatcaatgttactgggctgattttttatttgatcgtggctacagctgaaatccaggactgggcaaaagagaaacagcacactcgactgtag

SEQ ID NO: 152569 - DNA, 1844 bp, Artificial Sequence
  derived and/or modified sequence
attgtgtaaagttgagagaaaagtcttcacagcggaagaagaaatcacttttttgtcccgaatcagtgggtggaggcaaaacccttcagcaagaagagaagcaacttcagccgtgtatgcaaatggataaccggttgcctcccaaaaaagttccaggtttctgttcctttcgctatggattgtctttccttgtgcactgttgtaatgttataataacagcacagcgtgcgtgcctgaacctcacaatggtagtcatggtgaatagcacagatccacatggtttgcccaacacctccacaaagaagctcctggataatataaagaaccctatgtataattggagcccagatatccagggaatcatcttgagttccacctcctatggtgtcatcatcatccaagttcctgttggatacttctctggaatatattctacaaagaaaatgattggctttgcattatgcctcagctctgtgttaagcctgctcatcccaccagcagctggaattggagtagcttgggtcgttgtatgtcgagcagttcagggagcagcccaggggatagttgcaacagcccagtttgaaatatatgtcaaatgggctcctcccctggaacgaggccgacttacttctatgagtacatcagggtttttgctgggaccctttattgtcctacttgtgactggagttatctgtgaatctctgggctggcccatggtcttctatatttttggtgcttgtggctgtgccgtatgtcttctctggttcgttctgttttatgatgaccccaaagaccacccatgtataagcatcagtgaaaaggaatacatcacatcctccctggtccagcaggtcagttcaagtagacaatctctgcctatcaaggctatacttaagtcgcttccagtctgggctatttccactggtagttttacgtttttctggtcacataacatcatgacactatacactccaatgtttatcaactccatgcttcatgttaatataaaagagaatgggttcttgtcttcccttccctatttgtttgcctggatctgtggtaacctagcaggtcagttatcagacttcttcctgaccaggaatattctcagcgtaattgctgtccggaaactcttcacagcagcaggatttctccttcctgcaatctttggtgtctgcctgccttacctgagttccaccttctacagcattgtcattttcctaatacttgctggtgcaacaggcagcttttgcttgggtggagtgtttataaatggcttggatattgctcccagatattttggatttattaaagcatgttcaactttaactggaatgataggaggactaattgcttccactttgactggattgatccttaagcaggatccggaatccgcctggtttaaaaccttcatcctgatggcagccattaatgtgactggcctaattttctaccttatagttgctacagcagaaattcaggactgggctaaagaaaaacaacacacacgtctctgaagtgtgaaacagagcacttgcagagcctgggacaacctccttattgaagggaagagggaccagcacatgaggctgaggctgaggggcagtcaccagcaccaggaagaaggtggtaggaggagtcctaggggccagttttaccctcccacatatcctgtgtgcatcgttttttaacatgtgttgtttgtaacatgtaatatatctgaattttaaatgggggtggtgatttatctcagtcttcctctctgcatcagttgctttataaatgattgtcaaaccaataaatacacacaagataaaattttattctaaggcttcatgaaa

SEQ ID NO: 152570 - DNA, 1433 bp, Artificial Sequence
  derived and/or modified sequence
cagtgggtggaggcaaaacccttcagcaagaagagaagcaacttcagccgtgtatgcaaatggataaccggttgcctcccaaaaaagttccaggtttctgttcctttcgctatggattgtctttccttgtgcactgttgtaatgttataataacagcacagcgtgcgtgcctgaacctcacaatggtagtcatggtgaatagcacagatccacatggtttgcccaacacctccacaaagaagctcctggataatataaagaaccctatgtataattggagcccagatatccagggaatcatcttgagttccacctcctatggtgtcatcatcatccaagttcctgttggatacttctctggaatatattctacaaagaaaatgattggctttgcattatgcctcagctctgtgttaagcctgctcatcccaccagcagctggaattggagtagcttgggtcgttgtatgtcgagcagttcagggagcagcccaggggatagttgcaacagcccagtttgaaatatatgtcaaatgggctcctcccctggaacgaggccgacttacttctatgagtacatcagggtttttgctgggaccctttattgtcctacttgtgactggagttatctgtgaatctctgggctggcccatggtcttctatatttttggtcagttcaagtagacaatctctgcctatcaaggctatacttaagtcgcttccagtctgggctatttccactggtagttttacgtttttctggtcacataacatcatgacactatacactccaatgtttatcaactccatgcttcatgttaatataaaagagaatgggttcttgtcttcccttccctatttgtttgcctggatctgtggtaacctagcaggtcagttatcagacttcttcctgaccaggaatattctcagcgtaattgctgtccggaaactcttcacagcagcaggatttctccttcctgcaatctttggtgtctgcctgccttacctgagttccaccttctacagcattgtcattttcctaatacttgctggtgcaacaggcagcttttgcttgggtggagtgtttataaatggcttggatattgctcccagatattttggatttattaaagcatgttcaactttaactggaatgataggaggactaattgcttccactttgactggattgatccttaagcaggatccggaatccgcctggtttaaaaccttcatcctgatggcagccattaatgtgactggcctaattttctaccttatagttgctacagcagaaattcaggactgggctaaagaaaaacaacacacacgtctctgaagtgtgaaacagagcacttgcagagcctgggacaacctccttattgaagggaagagggaccagcacatgaggctgaggctgaggggcagtcacca

SEQ ID NO: 152571 - DNA, 1704 bp, Artificial Sequence
  derived and/or modified sequence
aaaagtcttcacagcggaagaagaaatcacttttttgtcccgaatcagtgggtggaggcaaaacccttcagcaagaagagaagcaacttcagccgtgtatgcaaatggataaccggttgcctcccaaaaaagttccaggtttctgttcctttcgctatggattgtctttccttgtgcactgttgtaatgttataataacagcacagcgtgcgtgcctgaacctcacaatggtagtcatggtgaatagcacagatccacatggtttgcccaacacctccacaaagaagctcctggataatataaagaaccctatgtataattggagcccagatatccagggaatcatcttgagttccacctcctatggtgtcatcatcatccaagttcctgttggatacttctctggaatatattctacaaagaaaatgattggctttgcattatgcctcagctctgtgttaagcctgctcatcccaccagcagctggaattggagtagcttgggtcgttgtatgtcgagcagttcagggagcagcccaggggatagttgcaacagcccagtttgaaatatatgtcaaatgggctcctcccctggaacgaggccgacttacttctatgagtacatcagggtttttgctgggaccctttattgtcctacttgtgactggagttatctgtgaatctctgggctggcccatggtcttctatatttttggtgcttgtggctgtgccgtatgtcttctctggttcgttctgttttatgatgaccccaaagaccacccatgtataagcatcagtgaaaaggaatacatcacatcctccctggtccagcaggtcagttcaagtagacaatctctgcctatcaaggctatacttaagtcgcttccagtctgggctatttccactggtagttttacgtttttctggtcacataacatcatgacactatacactccaatgtttatcaactccatgcttcatgttaatataaaagagaatgggttcttgtcttcccttccctatttgtttgcctggatctgtggtaacctagcaggtcagttatcagacttcttcctgaccaggaatattctcagcgtaattgctgtccggaaactcttcacagcagcaggatttctccttcctgcaatctttggtgtctgcctgccttacctgagttccaccttctacagcattgtcattttcctaatacttgctggtgcaacaggcagcttttgcttgggtggagtgtttataaatggcttggatattgctcccagatattttggatttattaaagcatgttcaactttaactggaatgataggaggactaattgcttccactttgactggattgatccttaagcaggatccggaatccgcctggtttaaaaccttcatcctgatggcagccattaatgtgactggcctaattttctaccttatagttgctacagcagaaattcaggactgggctaaagaaaaacaacacacacgtctctgaaggtgagaagtgatcagattaaggacaatttttgaaactgggaatgcaggagacagaggagataaggatgactcctcagacgagaaggaataacgggtgcaggtttggagaagaggagaccatgttaagcctgagaatattagacatcctgaaatggctgtgggactctgtggggatgctaaggctggagatataaatttgg

SEQ ID NO: 152572 - DNA, 1404 bp, Artificial Sequence
  derived and/or modified sequence
atgcagatggacaacagactgccccccaagaaggtgcccggcttctgcagcttcagatacggcctgagcttcctggtgcactgctgcaacgtgatcatcaccgcccagagagcctgcctgaacctgaccatggtggtgatggtgaacagcaccgacccccacggcctgcccaacaccagcaccaagaagctgctggacaacatcaagaaccccatgtacaactggagccccgacatccagggcatcatcctgagcagcaccagctacggcgtgatcatcatccaggtgcccgtgggctacttcagcggcatctacagcaccaagaagatgatcggcttcgccctgtgcctgagcagcgtgctgagcctgctgatcccccccgccgccggcatcggcgtggcctgggtggtggtgtgcagagccgtgcagggcgccgcccagggcatcgtggccaccgcccagttcgagatctacgtgaagtgggccccccccctggagagaggcagactgaccagcatgagcaccagcggcttcctgctgggccccttcatcgtgctgctggtgaccggcgtgatctgcgagagcctgggctggcccatggtgttctacatcttcggcgcctgcggctgcgccgtgtgcctgctgtggttcgtgctgttctacgacgaccccaaggaccacccctgcatcagcatcagcgagaaggagtacatcaccagcagcctggtgcagcaggtgagcagcagcagacagagcctgcccatcaaggccatcctgaagagcctgcccgtgtgggccatcagcaccggcagcttcaccttcttctggagccacaacatcatgaccctgtacacccccatgttcatcaacagcatgctgcacgtgaacatcaaggagaacggcttcctgagcagcctgccctacctgttcgcctggatctgcggcaacctggccggccagctgagcgacttcttcctgaccagaaacatcctgagcgtgatcgccgtgagaaagctgttcaccgccgccggcttcctgctgcccgccatcttcggcgtgtgcctgccctacctgagcagcaccttctacagcatcgtgatcttcctgatcctggccggcgccaccggcagcttctgcctgggcggcgtgttcatcaacggcctggacatcgcccccagatacttcggcttcatcaaggcctgcagcaccctgaccggcatgatcggcggcctgatcgccagcaccctgaccggcctgatcctgaagcaggaccccgagagcgcctggttcaagaccttcatcctgatggccgccatcaacgtgaccggcctgatcttctacctgatcgtggccaccgccgagatccaggactgggccaaggagaagcagcacaccagactgtag

SEQ ID NO: 152573 - protein, 1040 aa, Artificial Sequence
  derived and/or modified sequence
MGTATRRKPHLLLVAAVALVSSSAWSSALGSQTTFGPVFEDQPLSVLFPEESTEEQVLLACRARASPPATYRWKMNGTEMKLEPGSRHQLVGGNLVIMNPTKAQDAGVYQCLASNPVGTVVSREAILRFGFLQEFSKEERDPVKAHEGWGVMLPCNPPAHYPGLSYRWLLNEFPNFIPTDGRHFVSQTTGNLYIARTNASDLGNYSCLATSHMDFSTKSVFSKFAQLNLAAEDTRLFAPSIKARFPAETYALVGQQVTLECFAFGNPVPRIKWRKVDGSLSPQWTTAEPTLQIPSVSFEDEGTYECEAENSKGRDTVQGRIIVQAQPEWLKVISDTEADIGSNLRWGCAAAGKPRPTVRWLRNGEPLASQNRVEVLAGDLRFSKLSLEDSGMYQCVAENKHGTIYASAELAVQALAPDFRLNPVRRLIPAARGGEILIPCQPRAAPKAVVLWSKGTEILVNSSRVTVTPDGTLIIRNISRSDEGKYTCFAENFMGKANSTGILSVRDATKITLAPSSADINLGDNLTLQCHASHDPTMDLTFTWTLDDFPIDFDKPGGHYRRTNVKETIGDLTILNAQLRHGGKYTCMAQTVVDSASKEATVLVRGPPGPPGGVVVRDIGDTTIQLSWSRGFDNHSPIAKYTLQARTPPAGKWKQVRTNPANIEGNAETAQVLGLTPWMDYEFRVIASNILGTGEPSGPSSKIRTREAAPSVAPSGLSGGGGAPGELIVNWTPMSREYQNGDGFGYLLSFRRQGSTHWQTARVPGADAQYFVYSNESVRPYTPFEVKIRSYNRRGDGPESLTALVYSAEEEPRVAPTKVWAKGVSSSEMNVTWEPVQQDMNGILLGYEIRYWKAGDKEAAADRVRTAGLDTSARVSGLHPNTKYHVTVRAYNRAGTGPASPSANATTMKPPPRRPPGNISWTFSSSSLSIKWDPVVPFRNESAVTGYKMLYQNDLHLTPTLHLTGKNWIEIPVPEDIGHALVQIRTTGPGGDGIPAEVHIVRNGGTSMMVENMAVRPAPHPGTVISHSVAMLILIGSLEL

SEQ ID NO: 152574 - DNA, 3123 bp, Artificial Sequence
  derived and/or modified sequence
atggggactgcaacgcgccggaaaccccatctgctgctggttgccgcggttgccctggtatctagcagcgcatggtcttctgccctggggtcccagactacctttggccccgtatttgaggaccagcccctgagcgtcctgttcccagaggagtctaccgaagaacaggtgctcctggcgtgtcgcgcgcgggccagccctccagccacatacagatggaaaatgaacggcaccgaaatgaagctggaacccgggagcagacatcagctcgttgggggaaacttggtcatcatgaatccgaccaaggcccaagacgctggcgtgtaccaatgcctcgcctcaaatcccgtcggcacggtcgtctcccgtgaagctatccttcggtttggctttctgcaggaattttccaaagaggagcgggatcctgtcaaagcccacgaagggtggggcgtgatgctgccttgtaacccccctgcacattaccctggcctgagctatagatggctgttgaatgaatttccaaatttcatccccacggacgggaggcatttcgtgtcgcagacgacagggaatttgtacattgcacgcacgaacgcttctgacttgggaaattattcctgcctggccactagccatatggatttctccaccaaatccgtattcagcaagtttgcacagcttaacttggccgccgaagacacccgactcttcgctccatccataaaggctcggtttccggccgaaacctatgctctggtaggccaacaggtgacccttgaatgtttcgcattcggcaaccccgtccctagaatcaaatggagaaaagtagatgggtctctgagtccacaatggacaacggcagagcccactctccagataccctccgtgagctttgaggacgaaggaacttatgaatgtgaggcagaaaactccaaggggagggacactgtacagggccgcatcatcgtgcaggcccagcccgagtggctgaaggtgatatcagacacagaagcggacatcggatcaaacctgcggtggggatgtgccgccgccgggaagcctagacctaccgttcgttggctccgcaacggagagcctctggctagccagaatagggtggaagtacttgctggcgaccttcggttcagtaaactcagcctggaagatagcgggatgtatcaatgcgttgcagagaacaaacacgggacaatctacgcctccgcagagctggcggttcaggcgctggcccccgacttcaggctgaatccggttcgccgtctgattcctgctgcaagaggaggagagatcctcattccctgccaaccgagggccgcccccaaagctgtggttttatggtcaaagggaaccgagatcttggttaactcctctcgcgttaccgtgactcctgacggaacgctcattattaggaacatttcaaggtcggacgaagggaaatacacgtgctttgccgaaaattttatgggaaaagcaaatagcacgggcatcttgtctgtccgcgatgccaccaagatcactctcgccccatctagcgccgatatcaacctgggtgacaacctgacactgcagtgccacgcgagccatgatcccacgatggacctgactttcacctggacactggacgactttccgatagattttgacaaaccgggggggcactaccggcgcacaaacgtgaaagagacaattggggacttgacaatactgaacgcgcagctgaggcacgggggaaaatacacgtgcatggcccagactgtggtggactccgccagtaaagaggctactgtgctggtgaggggcccgccgggcccacctgggggtgtggttgtgcgggacatcggcgacaccacaatccagttgagctggagcagaggatttgacaaccattccccgattgctaagtacacgcttcaggcgagaaccccaccagctggcaagtggaagcaggtgaggacaaatcctgcaaatatcgaggggaatgccgaaactgctcaggttctggggttgactccgtggatggattatgagttccgagttattgccagtaacatcctggggactggagaacctagcggtccatcaagtaagatccgcactagggaagccgcccccagtgtggcaccgagtggactgagcgggggcggtggcgccccaggcgagctcatcgtgaactggacccctatgtcaagggagtaccagaatggagatgggttcggatatctgctgagctttcgccggcagggtagcacccactggcagacagctagggtgcccggggctgacgctcagtactttgtgtatagtaatgaatcagtgcgcccatacactccgtttgaagtgaagatcagatcatataaccgtcggggggatggacctgagagcctgaccgccctcgtgtattctgccgaagaggagcctcgcgtggctcccacaaaagtctgggccaagggagtgtcatcttcggagatgaacgtcacctgggaaccagtgcagcaggacatgaacggaattctgctgggttacgagatccggtattggaaggcaggcgataaggaggccgccgcagaccgggtaaggacagccggtctcgataccagtgcgcgcgtttcaggtctgcaccctaacactaaataccacgtgactgttagagcatacaaccgggcaggcacaggcccagcttcgccatctgctaatgcaacaactatgaagccgccacctagacggcctcctgggaatatttcttggaccttctcctcatcttcattatccatcaaatgggaccccgttgtcccattccgcaatgagtctgccgtaactggctataaaatgctctaccagaacgacttgcatcttactccgacactgcacctgaccggaaaaaactggattgaaatccctgtccccgaggatataggccacgcccttgttcagataagaactacgggcccgggaggggacggaatcccggctgaggtgcacatcgtgagaaacggcggcacttcaatgatggtagagaatatggcagtaaggcctgccccccaccccggcactgtaataagccacagcgtggcaatgctgatccttatcggttcactcgagttgtag

SEQ ID NO: 152575 - DNA, 3123 bp, Artificial Sequence
  derived and/or modified sequence
atgggcacagccaccaggaggaagccccacctgctgctggtggccgctgtggccctggtgagcagcagcgcctggagcagcgccctgggcagccagaccacctttggacctgtgtttgaggaccagcccctgtctgtgctcttccctgaggagagcacagaggagcaggtgctgctggcctgccgggcccgggccagccccccagccacctaccgctggaagatgaatggaacagagatgaagctggagcccggcagccgccaccagctggtgggcggcaacctggtgatcatgaaccccaccaaggcccaggatgctggggtgtaccagtgcctggccagcaaccctgtgggcaccgtggtgtcccgggaggccatcctgcgcttcggcttcctgcaggagttcagcaaggaggagcgggaccctgtgaaggcccacgagggctggggcgtgatgctgccctgcaaccccccagcccactacccaggcctgagctaccgctggctgctgaatgagttccccaacttcatccccacagatggccgccactttgtgtcccagaccactggaaacctgtacatcgcccggaccaatgccagtgacctgggcaactacagctgcctggccaccagccacatggacttcagcaccaagtctgtgttcagcaagtttgcccagctgaacctggccgctgaggacacccggctgtttgcccccagcatcaaggcccgcttccctgctgagacctacgccctggtgggccagcaggtgaccctggagtgctttgccttcggcaaccctgtgccccgcatcaagtggaggaaggtggatggcagcctgagcccccagtggaccacagctgagcccaccctgcagatccccagcgtgtcctttgaagatgagggcacctatgaatgtgaggccgagaacagcaagggccgggacacagtgcagggccgcatcatcgtgcaggcccagcctgagtggctgaaggtgatcagtgacacagaggccgacatcggcagcaacctgcgctggggctgtgccgctgctgggaagccccggcccaccgtgcgctggctgagaaatggagagcccctggccagccagaacagagtggaggtgctggccggggacctgcgcttcagcaagctgagcctggaggacagcggcatgtaccagtgtgtggccgagaacaagcacggcaccatctatgccagcgctgagctggccgtgcaggccctggccccagacttccggctgaaccctgtgagaagactcatcccagctgcccggggcggggagatcctgatcccctgccagccccgggccgcccccaaggctgtggtgctgtggagcaagggcacagagatcctggtgaacagcagccgggtgacagtgaccccagatggcaccctcatcatccggaacatcagcagaagtgatgagggcaagtacacctgctttgctgagaacttcatgggcaaggccaacagcacaggcatcctgtctgtgagagatgccaccaagatcaccctggcccccagcagcgctgacatcaacctgggggacaacctgaccctgcagtgccacgccagccatgaccccaccatggacctgaccttcacctggaccctggatgacttccccatcgactttgacaagccaggcggccactacagaaggaccaacgtgaaggagaccatcggggacctgaccatcctgaatgcccagctgcggcatggaggcaagtacacctgcatggcccagacagtggtggacagcgccagcaaggaggccaccgtgctggtgcggggccccccaggccccccaggaggagtggtggtgcgggacattggagacaccaccatccagctgtcctggagccggggctttgacaaccacagccccatcgccaagtacaccctgcaggcccggaccccacctgctgggaagtggaagcaggtgaggaccaacccagccaacatcgagggcaatgctgagacagcccaggtgctgggcctgaccccctggatggactatgagttccgggtcatcgccagcaacatcctgggcactggagagcccagcggccccagcagcaagatccgcacccgggaggccgcccccagcgtggcccccagcggcctgagcggcggcggcggggcccctggagagctgattgtgaactggacccccatgagccgggagtaccagaatggagatggcttcggctacctgctgtccttccggcggcagggcagcacccactggcagacagcccgggtgcctggagcagatgcccagtactttgtgtacagcaatgaatctgtgcggccctacaccccatttgaggtgaagatccgcagctacaacagaagaggagatggccctgagagcctgacagccctggtgtacagcgctgaggaggagccccgggtggcccccaccaaggtgtgggccaagggcgtgagcagcagcgagatgaatgtgacctgggagcctgtgcagcaggacatgaatggcatcctgctgggctatgagatccgctactggaaggccggggacaaggaggccgctgctgacagagtgaggacagctggcctggacaccagcgcccgggtgtctggcctgcaccccaacaccaagtaccacgtgacagtgcgggcctacaacagagctggcaccggccctgccagccccagcgccaatgccaccaccatgaagcccccaccaagaagacctcctggcaacatctcctggaccttcagcagcagcagcctgagcatcaagtgggaccctgtggtgcccttcagaaatgaatctgctgtgacaggctacaagatgctgtaccagaatgacctgcacctgacccccaccctgcacctgaccgggaagaactggattgagatccctgtgcctgaagatattggacatgccctggtgcagatccgcaccactggacctggaggagatggcatcccagctgaggtgcacatcgtgagaaatggaggcacctccatgatggtggagaacatggctgtgcggcctgccccccaccctggcaccgtcatcagccacagcgtggccatgctgatcctgattggcagcctggagctgtag

SEQ ID NO: 152576 - DNA, 3123 bp, Artificial Sequence
  derived and/or modified sequence
atgggcaccgccacccggcggaagccccacctgctgctggtggccgcagtggcgcttgtgtccagtagtgcatggagctctgcactcgggagtcagacaacgtttggcccagtattcgaggaccagcccctttccgtgctcttccctgaagagtctactgaagagcaggtgctgctggcctgccgcgctagagcatccccccccgccacataccggtggaaaatgaatggaaccgagatgaagctggaacccgggtcccggcaccagttggtggggggcaacctggtcattatgaatcccaccaaggcccaggatgctggggtctatcagtgtctcgcaagcaaccctgtgggaacagtcgtgtcacgcgaagctatcttgagatttggctttctgcaggagttttccaaggaggagcgcgaccctgtcaaagctcatgaaggttggggagtgatgctgccatgtaatccccccgcacattaccctggcctgagttatagatggttgttgaatgagttcccaaatttcatccccacagatggtcgccactttgtgtcacagaccactgggaacctctacattgccagaaccaacgccagcgacctcgggaattattcttgccttgcgacatcccatatggacttcagtacaaaaagcgtgttcagcaaatttgcacaattgaacctagcagctgaggacaccaggcttttcgctccttcaatcaaagccaggttccccgccgagacctacgccctagttggacaacaggtgaccttggaatgttttgccttcggtaaccctgtgccgcgcatcaaatggcggaaggtggacggctcactgtctccccagtggaccaccgctgaaccgaccttgcagatccctagcgtttcttttgaggacgagggcacctatgaatgtgaagcagaaaacagcaaaggtcgagacactgtccaaggccgaattatcgttcaggcacagccagaatggctgaaggtgatcagcgatactgaagccgacattggttctaatttgcgctggggctgtgctgctgccggcaaaccgcgtcctacggtgcgatggcttagaaacggcgagccactagcatcccagaacagggttgaagtactggccggggacctgcgcttttctaagctcagtctggaggattccggcatgtaccagtgcgtggctgagaacaagcacggtactatctatgcctcggcggaactagctgtccaggccctggcaccagactttaggctgaatccggttagacgacttatccctgcagcaaggggaggggagatcttaattccatgccaaccaagggctgccccaaaagccgtcgtgctgtggtctaaagggaccgagatcctagtgaattctagtcgagtgaccgtgacccctgatggaaccctgatcataaggaacattagtcgatctgacgaggggaaatatacatgctttgctgaaaattttatgggaaaagctaatagtaccggtatcctgtcagtccgcgacgccactaagatcacactggcaccaagcagtgcagatattaacttgggggataatttgactcttcagtgccatgctagccatgatcccactatggatctgacctttacttggaccctcgatgacttccccatcgacttcgataagccaggcgggcactatcggcgtactaacgtcaaagagaccatcggcgatctgaccatcctgaacgcacagctcaggcatggtgggaaatatacatgcatggctcaaacagtcgtggactctgcctccaaagaggccactgtactggttcggggaccaccagggccaccagggggagtcgttgttagagacattggggataccaccatccaactctcatggtcccgtggcttcgataaccatagtccaatcgccaagtacacactgcaggcccgcacccctccggccgggaagtggaagcaggtgcgaaccaatccagccaacatagaaggcaatgccgaaaccgcccaggtcttaggtctgactccatggatggactatgagttcagagttattgctagcaacattcttggaacaggggaacctagcggcccaagttctaaaatccgtacgcgtgaagcggccccatctgtcgccccatcgggtctgtcaggcggcgggggagcccctggagagttgattgttaactggacgcccatgagtcgcgaatatcagaacggggatgggttcggctatctgttatcttttaggaggcagggcagcacgcactggcagactgcccgcgtccccggagctgatgcccaatactttgtttacagcaacgagagcgtccggccatatactccgttcgaggtgaagatcagatcctacaaccgcagaggtgacggccccgagagtctcactgctttggtctactcagccgaggaggaaccacgagtcgctcccactaaggtttgggccaagggcgtctccagcagcgaaatgaacgtcacttgggagccagtgcagcaggatatgaacgggatcttgttggggtatgagatcagatattggaaggccggcgataaagaggccgccgctgatcgcgtgcgcactgctggcttggatacatcagcaagggtcagtggactccacccgaatacaaagtaccacgtgactgttcgcgcgtacaacagagccggaactggacccgcctcaccttccgcgaatgcaaccacaatgaaacctccgcctcgcaggccgcccggaaatatcagttggaccttctcatcgtcgagcctgtctatcaagtgggaccccgtagtcccctttagaaacgagtccgctgtgactgggtataagatgctgtaccaaaatgatctccatcttactcccaccttgcaccttactggaaaaaactggatcgaaattcctgtgcctgaggatatcggccacgctctggtgcaaatcagaacaacaggaccgggaggcgacggcattcccgcagaggtgcatatagtgaggaatggaggtaccagtatgatggttgagaacatggctgtccggcctgctccccatcccggcactgtaatttcccactctgtggctatgcttatcttgataggatcattggagctttag

SEQ ID NO: 152577 - DNA, 3123 bp, Artificial Sequence
  derived and/or modified sequence
atggggactgccacacgaagaaagccacatctgctgcttgttgctgcggtggccctcgtaagctctagtgcatggtcttccgcactgggcagccagactaccttcggcccagtcttcgaggatcagcccctctctgtgctgtttcctgaggagtctaccgaggagcaggtcctgctggcctgccgcgctagggccagccctcccgcaacctatagatggaaaatgaatggcacggagatgaaactggagcccggttcccgtcatcagctggttggaggtaacctagtcatcatgaaccccacaaaggcccaggacgctggggtttaccagtgtctggcttccaatccagtaggtaccgtggtgagccgcgaagcaattctgcggttcggctttctgcaggagttctctaaggaggaacgggaccccgtgaaagcccatgaaggatggggagtgatgttaccttgtaacccccctgcccactaccccggactgtcatataggtggctgctcaatgaattccctaacttcattcccactgacggaaggcatttcgtgtctcagacgactggtaatctctacatcgcaagaacgaatgccagtgacctgggcaattatagttgcctggctacaagtcacatggacttctctacaaagtctgtctttagcaagttcgctcagttgaatctggcagccgaagatacaaggttattcgcgccttcgataaaagccagatttccggctgagacatacgccttagtaggacagcaggtgaccttggagtgcttcgctttcgggaaccccgttccccgaatcaaatggcggaaggtcgatggttcactaagtccccagtggacaactgcagaaccaaccttgcaaatccccagcgtgtcttttgaggatgaagggacctatgaatgtgaggccgaaaattctaaaggaagggatacagtgcagggccgaatcatagttcaggctcagccggaatggcttaaagtgatcagcgataccgaggccgatatcggctctaaccttcgctggggctgcgcagctgcaggcaaacccaggccaactgtccgctggctgcgcaatggtgagcccctagccagtcagaatagagtcgaagtgctggccggtgatctcaggttcagcaaactgagccttgaggattctggcatgtaccaatgtgttgccgaaaataaacatggcaccatctatgcctctgcagagttggctgttcaggcattagctcccgactttcgcctgaacccagttagaaggctcatcccggctgcgagaggtggggagatcctgattccctgtcagcctagggcagctcctaaggctgtagtcctgtggagcaaaggtaccgagattctggttaactcttcccgggtcaccgtcaccccggatgggactctcatcatcaggaacatttcaaggagcgacgaggggaaatacacctgcttcgctgagaactttatgggcaaggcgaactccacaggaatcctgtccgtgagggacgcaaccaagattactctggctccgagctcggccgatataaacttgggcgataacctcaccttacaatgtcatgcttcacatgacccgacgatggacctcacatttacctggacattggatgattttcctatcgacttcgataagcccggaggccattacagaagaacgaacgtcaaagaaacaatcggggatttaacaatactgaacgcccagctgagacacggaggtaagtacacatgcatggcccagacagtcgtcgatagcgcctctaaggaagcaaccgtgctcgttagaggtccaccaggcccacccggaggggtagtcgtacgcgacattggagatacgaccatccagctttcctggtcaagagggttcgataaccactctcctatcgccaaatatacgctgcaggcgaggacccctcctgcagggaaatggaaacaggtgcgaaccaatccagccaacatcgaaggcaacgcagagacagctcaggtcttaggactgaccccatggatggattacgaattccgagtgattgcttccaacatattgggcactggcgaaccatcaggaccttcttctaaaattcgaacccgggaggcggcaccttccgtggcaccatccggcttgtccggtggtggcggagcgccaggcgagttgatcgtgaactggacgcctatgtctcgggagtatcaaaatggcgatggcttcggatatcttctttcattccgtagacagggatctacacactggcagacggcaagagtgccaggagccgatgcccagtacttcgtctactcaaacgagagtgtgaggccgtatacccctttcgaagtcaagatccgatcctacaatcgcaggggtgacggacctgagtctctcacagcgctcgtgtattctgccgaggaagagcctagagtagccccaacaaaggtttgggccaaaggagtatcctcatccgagatgaatgtgacctgggagcccgtacagcaagatatgaatgggatcctgctggggtatgagattcggtactggaaggccggtgataaggaagccgctgccgatcgcgtgaggacggcagggctcgacacgtcagcaagagttagtgggctgcaccccaatacgaagtaccacgttaccgttagagcctacaacagggcagggactgggccagcaagtcccagcgcaaacgctaccaccatgaagcctccaccgaggcgccctcctggcaacatatcctggaccttttctagctccagtctgagcattaagtgggatcccgttgttccctttagaaacgaatccgccgtgacagggtataagatgttgtatcagaatgacctgcaccttacgccaacattgcacctgacaggcaagaactggatagaaatccccgtccctgaggacatagggcatgctttagttcagatcaggacgactggtcctggcggagacggcatacctgccgaggtgcatatcgtgcgtaacggtggaacctctatgatggtagagaacatggctgtgcggcctgcaccacatccgggtacagtgatctcacatagcgtggctatgctcattctcatcgggtctttggagctatag

SEQ ID NO: 152578 - DNA, 8141 bp, Artificial Sequence
  derived and/or modified sequence
gctccgggcgcgctcacacacacgcgccctcacccgccaccgccgccgcggccgccgccgcacccggacagcgagcggctgaggccgccagggcccaaaggacagcggcccagacaggggctggcggcccggccggccccggctcaccgactcgggcagcatccacctgccccagccaacacccttctctcgccccaggtcctttctcagcctccagctgggctgtccccaagctgagctgaggctcttctcctccgatccccacctctgcccggacatccaccatggggacagccaccaggaggaagccacacctgctgctggtagctgctgtggcccttgtctcctcttcagcttggagttcagccctgggatcccaaaccaccttcgggcctgtctttgaagaccagcccctcagtgtgctattcccagaggagtccacggaggagcaggtgttgctggcatgccgcgcccgggccagccctccagccacctatcggtggaagatgaatggtaccgagatgaagctggagccaggttcccgtcaccagctggtggggggcaacctggtcatcatgaaccccaccaaggcacaggatgccggggtctaccagtgcctggcctccaacccagtgggcaccgttgtcagcagggaggccatcctccgcttcggctttctgcaggaattctccaaggaggagcgagacccagtgaaagctcatgaaggctggggggtgatgttgccctgtaacccacctgcccactacccaggcttgtcctaccgctggctcctcaacgagttccccaacttcatcccgacggacgggcgtcacttcgtgtcccagaccacagggaacctgtacattgcccgaaccaatgcctcagacctgggcaactactcctgtttggccaccagccacatggacttctccaccaagagcgtcttcagcaagtttgctcagctcaacctggctgctgaagatacccggctctttgcacccagcatcaaggcccggttcccagcagagacctatgcactggtggggcagcaggtcaccctggagtgcttcgcctttgggaaccctgtcccccggatcaagtggcgcaaagtggacggctccctgtccccgcagtggaccacagctgagcccaccctgcagatccccagcgtcagctttgaggatgagggcacctacgagtgtgaggcggagaactccaagggccgagacaccgtgcagggccgcatcatcgtgcaggctcagcctgagtggctaaaagtgatctcggacacagaggctgacattggctccaacctgcgttggggctgtgcagccgccggcaagccccggcctacagtgcgctggctgcggaacggggagcctctggcctcccagaaccgggtggaggtgttggctggggacctgcggttctccaagctgagcctggaagactcgggcatgtaccagtgtgtggcagagaataagcacggtaccatctacgccagcgccgagctagccgtgcaagcactcgcccctgacttcaggctgaatcccgtgaggcgtctgatccccgcggcccgcgggggagagatccttatcccctgccagccccgggcagctccaaaggccgtggtgctctggagcaaaggcacggagattttggtcaacagcagcagagtgactgtaactccagatggcaccttgatcataagaaacatcagccggtcagatgaaggcaaatacacctgctttgctgagaacttcatgggcaaagccaacagcactggaatcctatctgtgcgagatgcaaccaaaatcactctagccccctcaagtgccgacatcaacttgggtgacaacctgaccctacagtgccatgcctcccacgaccccaccatggacctcaccttcacctggaccctggacgacttccccatcgactttgataagcctggagggcactaccggagaactaatgtgaaggagaccattggggatctgaccatcctgaacgcccagctgcgccatggggggaagtacacgtgcatggcccagacggtggtggacagcgcgtccaaggaggccacagtcctggtccgaggtccgccaggtcccccaggaggtgtggtggtgagggacattggcgacaccaccatccagctcagctggagccgtggcttcgacaaccacagccccatcgctaagtacaccctgcaagctcgcactccacctgcagggaagtggaagcaggttcggaccaatcctgcaaacatcgagggcaatgccgagactgcacaggtgctgggcctcaccccctggatggactatgagttccgggtcatagccagcaacattctgggcactggggagcctagtgggccctccagcaaaatccggaccagggaagcagccccctcggtggcaccctcaggactcagcggaggaggtggagcccccggagagctcatcgtcaactggacgcccatgtcacgggagtaccagaacggagacggcttcggctacctgctgtccttccgcaggcagggcagcactcactggcagaccgcccgggtgcctggcgccgatgcccagtactttgtctacagcaacgagagcgtccggccctacacgccctttgaggtcaagatccgcagctacaaccgccgcggggatgggcccgagagcctcactgcactcgtgtactcagctgaggaagagcccagggtggcccctaccaaggtgtgggccaaaggggtctcatcctcagagatgaacgtgacctgggaacccgtgcagcaggacatgaatggtatcctcctggggtatgagatccgctactggaaagctggggacaaagaagcagctgcggaccgagtgaggacagcagggctggacaccagtgcccgagtcagcggcctgcatcccaacaccaagtaccatgtgaccgtgagggcctacaaccgggctggcactgggcctgccagcccttctgccaacgccacgaccatgaagccccctccgcggcgacctcctggcaacatctcctggactttctcaagctctagtcttagcattaagtgggaccctgtggtccctttccgaaatgagtctgcagtcaccggctataagatgctgtaccagaatgacttacacctgactcccacgctccacctcaccggcaagaactggatagaaatcccagtgcctgaagacattggccatgccctggtacaaattcggaccacagggcccggaggggatgggatccctgcagaagtccacatcgtgaggaatggaggcacaagcatgatggtggagaacatggcagtccgcccagcaccacaccctggcaccgtcatttcccactccgtggcgatgctgatcctcataggctccctggagctctgatcctggaacccctccctctgcgccgcagctggacgccacctccgacggacacagccagccccttcctgctgccaaggtggcctgacactgtgccagagagtggctggttttaaatacctactttaaacagtgccctttttgtaggaggtaggatattttatattctgccgcaggatagaacccacgcaaggattttctttaaattgagaggcaccaggcagtaacttccatgatgacactgacgcctatacctgagctctaggctgcctggagggaaggaacaggcccatgggaagaagggggttttaaaaacatgtcttcaactcagcagagatggccctctgggaccctatacggactccgccacttgagagcagtcctaggcccggcaggaacaccagacatgaacaggttgaagaactggagcgaagtgcacacctcaccatccttcagtctaaggaagaagggcaagccctgggaccaagagctctcccgccttctccctcgagcagcagcaaggaccctgacgctgtccccgataactccctaggggctcctgcctgcccaagcggctgagaaccagcgccccgatgcctgaggctgggagcctgagccccttcagctttgaggggggtgatactccaggctgtttggggtgggagccaaaaagagttgagaggccagggcccttggtggaaaggggcaccagccttggtctgagatagtcacaacccaggtgacgatgccctctcagccaacactgccaacctgaccctgtcatcccgattgacagcgccacttcaggtggctgggtgactaaagggcttgtcttggtggggtctcccacccctccaagacccattctgcacagtccctccagggtttgggcaggagatggccaatcatgcgcccacctctccagtgctgcctgcagtcagctcggcctccccgacctgcagccccagactctgctctcccagcactgactcactcctgcctgggaggggaatgcagcattcatgctgtgtgtcctggtattgggaggtttctgggaagggcagaggataaatgtggccctgcctgctcccaggtatacctaggaccacctggccagatccgctcccagacggccttggactgcttgcatttccccggagaaaaaggggttaataaatgggccatcctttcctgagctctgggtatactaccagtcacagaacgtcagagctggaagaagccttagagctcaacttcttcaagcccctcactttacagatgaggaaatggaggtggtccagagagggtctgggattcccaaggtcacacagcccagaagagatggggctgggttaagaactcgagtcttccacctttctgttcaaggctgtttgtctacccagaggaaggaggcactgctgaatggctatggcctggctaagaaggtgattagtcagtagggtgtgaaaattctacttcaaggggttcggattggtgatcatggggattggcatggctgggttcccgtccaaggtgtgggcagagcttctaccaaacttcaacatggagggctgacttgaagctccctgtccccctcactcttgccccaagaaaagaggccaaagcaagagcagattccctaggcaagagcagcagcacaactaggaaaccccaaagcccatgctccgacaggtggcccttcacagggggcagcgggacaggcatcttgaagggcatatgtcctcggaagctccgagcctgttttctgtagtttatagttagagctctattttgttatggttttttaaacttttaagtcctgctctattttcctgggcaggtttatgttgatgtttacccactacaattttttaaaaatataagctcacatgccttttccctgccacagccaaacccccactgcaccctacccacccacccctagcccaggtcagctttcctggagctggctaatgaaagcctcctcacctcttcccaacccttacaagcaagggtgctaggggctcagctatacgaccattctccctgacagggagtccaaacttggcctagcatccctcctggcccccctctggccacgacttggcctgtgcctggttctctatcagaaaggggatgctgaacaaaacctccttccaagttttatccaattcgttcctcattgcctcgggctgcgtcaggggaagcaggggacaggtgtccagttgctgggccgagggaggagctggtttggcataggacctaaccagtgaagctagaggctacagccactaaacttgcttcaggccaacgatagttactcacaagtaagtaccttaatgctaatgaggtccactaaaaaggggaggaaggcagacctcctgggagacccacgaagggtttttagccagggaaaactgagccccaggaaaacctaaccactgggcaggcagaatttgtttgagggatagaacgacaacaaaataaatgttcctgcagcctgagatttcaggtagagtactgactaaggtttaataagacaataggtgacctgaggacatgcaagcttgtaaaatgcaacagcctcctgctagagtgacttgtacatgagcttgcttgcagaagactagattagatgtttctcaggatcccctcctgcgcaggggttctctgattttcgtgttctctgcccagatgggctgggggagttgagagtgtgcttattttcactgcgatcatgagaccacagttctgggttatctcctctcatacatcaagccccagaggaggcggcaagaggaacagccacaaacaagtactttaccccacagcttagtggccagtaaacaccctggggactaggaaaaggaaccaactgtaggcacctctccagggcctagggagacaagtgtcctctcttctgcatacatttgggctccccttacagagccctttgccctggctctctggtccttgttgctctaacagtccagatgtacacccagcctcagggggaaggcagctctctccagacagagtctcagggcccagcaaggtcaggttatctgctttcattcagggcaacaaatgatacaaatggtgccagggagtggcaaggccatgggggtaggtgggggtgtctttttcttttcataaagtaacaacagacgagactgaggttaaacatcagaaaaaaacctctggaatgaccttcctcattccaggaggccctggaataaggaagaggcttctttctgagggagctttgaggaattttgacagctgttgacatgggatttgggaaaggtgaagctgtgactggaggggcaggagatggtccaagtgtccatccagagatgagactcttagaatcaaagtgttcagcccaggaagtcttggagatcccaccttctgtggccctgcaccttatgggaagccattaagggggctcatctaggaattctggttacagcccagtgctcatcccagcgtatgctgcctctttagggcagccccaagggccagccagcctgtactctgggcaagagcccaaaatggctaggaatgtttgactcccttaatctcttccccagctacagaggaatcttttctctgcctggtctcagaatgggactgccaactggctcattggtgggagacacagtatcctcaaacctgtggccactggcatgacagtggtgctctgtctccctgggtgacacccaccctaggcttcctcctggatgtgatggggattgccagagaggctcttagcataaaaggcattaggtgggcatttttctgtgtgcccccaaaaagctccatggaaacaggcacctggtagctgcggaacacccgtggacttgtgtatatggtcataggctttgggaagacaggacgtaaaggaaaatgagagaaacaaaatgggtcagatagctttggccacagccccaggcagcctttggggcctatgacacttagtgcccttagatgggatacatcttgcctcggccccaagactcctccaacttacccgtcccatccagggcctgcacagcttagagaggctcacagcttggcaaatgctagggcttcatcagaccactgacttgactcagtgtttgttaaaatggaaccactcccgttggcctactgtttctctcctgtacttcttgtaatgatagttatttattgactctggtagcaggcagttcttaaataaagatggtttctcaacctgttggggaagctggcacgagctgtgggtgttatcatcaggctaaagcatacctccttgtcctgttcttcactccagaggcttttatccaagaatttctttaccccccacacagtgaaatataagtaagttacaacatacagtctatattgcttcatccagtcccaggaggagggaaaaattaggccaagatcttaaggcaggtccaagcagagcacaggcaggcatttggctagaatcagttggctttacctaatacagtggcagtaaacaatgcttatgtgatggtactgcttcaaggtggcctgatttttaagacatctttgaggtgttgactcagtggtcccaaaggaaagtctccctgcagatatattaatgatacccaactggtgagaacgaggctgctgcctctactcttggttcacagcagccacaagggtgtgaattactagtcactttccagccacactttctcacacattcgataaccatttatcaaa

SEQ ID NO: 152579 - DNA, 3123 bp, Artificial Sequence
  derived and/or modified sequence
atgggcaccgccaccagaagaaagccccacctgctgctggtggccgccgtggccctggtgagcagcagcgcctggagcagcgccctgggcagccagaccaccttcggccccgtgttcgaggaccagcccctgagcgtgctgttccccgaggagagcaccgaggagcaggtgctgctggcctgcagagccagagccagcccccccgccacctacagatggaagatgaacggcaccgagatgaagctggagcccggcagcagacaccagctggtgggcggcaacctggtgatcatgaaccccaccaaggcccaggacgccggcgtgtaccagtgcctggccagcaaccccgtgggcaccgtggtgagcagagaggccatcctgagattcggcttcctgcaggagttcagcaaggaggagagagaccccgtgaaggcccacgagggctggggcgtgatgctgccctgcaacccccccgcccactaccccggcctgagctacagatggctgctgaacgagttccccaacttcatccccaccgacggcagacacttcgtgagccagaccaccggcaacctgtacatcgccagaaccaacgccagcgacctgggcaactacagctgcctggccaccagccacatggacttcagcaccaagagcgtgttcagcaagttcgcccagctgaacctggccgccgaggacaccagactgttcgcccccagcatcaaggccagattccccgccgagacctacgccctggtgggccagcaggtgaccctggagtgcttcgccttcggcaaccccgtgcccagaatcaagtggagaaaggtggacggcagcctgagcccccagtggaccaccgccgagcccaccctgcagatccccagcgtgagcttcgaggacgagggcacctacgagtgcgaggccgagaacagcaagggcagagacaccgtgcagggcagaatcatcgtgcaggcccagcccgagtggctgaaggtgatcagcgacaccgaggccgacatcggcagcaacctgagatggggctgcgccgccgccggcaagcccagacccaccgtgagatggctgagaaacggcgagcccctggccagccagaacagagtggaggtgctggccggcgacctgagattcagcaagctgagcctggaggacagcggcatgtaccagtgcgtggccgagaacaagcacggcaccatctacgccagcgccgagctggccgtgcaggccctggcccccgacttcagactgaaccccgtgagaagactgatccccgccgccagaggcggcgagatcctgatcccctgccagcccagagccgcccccaaggccgtggtgctgtggagcaagggcaccgagatcctggtgaacagcagcagagtgaccgtgacccccgacggcaccctgatcatcagaaacatcagcagaagcgacgagggcaagtacacctgcttcgccgagaacttcatgggcaaggccaacagcaccggcatcctgagcgtgagagacgccaccaagatcaccctggcccccagcagcgccgacatcaacctgggcgacaacctgaccctgcagtgccacgccagccacgaccccaccatggacctgaccttcacctggaccctggacgacttccccatcgacttcgacaagcccggcggccactacagaagaaccaacgtgaaggagaccatcggcgacctgaccatcctgaacgcccagctgagacacggcggcaagtacacctgcatggcccagaccgtggtggacagcgccagcaaggaggccaccgtgctggtgagaggcccccccggcccccccggcggcgtggtggtgagagacatcggcgacaccaccatccagctgagctggagcagaggcttcgacaaccacagccccatcgccaagtacaccctgcaggccagaaccccccccgccggcaagtggaagcaggtgagaaccaaccccgccaacatcgagggcaacgccgagaccgcccaggtgctgggcctgaccccctggatggactacgagttcagagtgatcgccagcaacatcctgggcaccggcgagcccagcggccccagcagcaagatcagaaccagagaggccgcccccagcgtggcccccagcggcctgagcggcggcggcggcgcccccggcgagctgatcgtgaactggacccccatgagcagagagtaccagaacggcgacggcttcggctacctgctgagcttcagaagacagggcagcacccactggcagaccgccagagtgcccggcgccgacgcccagtacttcgtgtacagcaacgagagcgtgagaccctacacccccttcgaggtgaagatcagaagctacaacagaagaggcgacggccccgagagcctgaccgccctggtgtacagcgccgaggaggagcccagagtggcccccaccaaggtgtgggccaagggcgtgagcagcagcgagatgaacgtgacctgggagcccgtgcagcaggacatgaacggcatcctgctgggctacgagatcagatactggaaggccggcgacaaggaggccgccgccgacagagtgagaaccgccggcctggacaccagcgccagagtgagcggcctgcaccccaacaccaagtaccacgtgaccgtgagagcctacaacagagccggcaccggccccgccagccccagcgccaacgccaccaccatgaagcccccccccagaagaccccccggcaacatcagctggaccttcagcagcagcagcctgagcatcaagtgggaccccgtggtgcccttcagaaacgagagcgccgtgaccggctacaagatgctgtaccagaacgacctgcacctgacccccaccctgcacctgaccggcaagaactggatcgagatccccgtgcccgaggacatcggccacgccctggtgcagatcagaaccaccggccccggcggcgacggcatccccgccgaggtgcacatcgtgagaaacggcggcaccagcatgatggtggagaacatggccgtgagacccgccccccaccccggcaccgtgatcagccacagcgtggccatgctgatcctgatcggcagcctggagctgtag

SEQ ID NO: 152580 - protein, 770 aa, Artificial Sequence
  derived and/or modified sequence
MFPQSRHPTPHQAAGQPFKFTIPESLDRIKEEFQFLQAQYHSLKLECEKLASEKTEMQRHYVMYYEMSYGLNIEMHKQTEIAKRLNTICAQVIPFLSQEHQQQVAQAVERAKQVTMAELNAIIGQQQLQAQHLSHGHGPPVPLTPHPSGLQPPGIPPLGGSAGLLALSSALSGQSHLAIKDDKKHHDAEHHRDREPGTSNSLLVPDSLRGTDKRRNGPEFSNDIKKRKVDDKDSSHYDSDGDKSDDNLVVDVSNEDPSSPRASPAHSPRENGIDKNRLLKKDASSSPASTASSASSTSLKSKEMSLHEKASTPVLKSSTPTPRSDMPTPGTSATPGLRPGLGKPPAIDPLVNQAAAGLRTPLAVPGPYPAPFGMVPHAGMNGELTSPGAAYASLHNMSPQMSAAAAAAAVVAYGRSPMVGFDPPPHMRVPTIPPNLAGIPGGKPAYSFHVTADGQMQPVPFPPDALIGPGIPRHARQINTLNHGEVVCAVTISNPTRHVYTGGKGCVKVWDISHPGNKSPVSQLDCLNRDNYIRSCKLLPDGCTLIVGGEASTLSIWDLAAPTPRIKAELTSSAPACYALAISPDSKVCFSCCSDGNIAVWDLHNQTLVRQFQGHTDGASCIDISNDGTKLWTGGLDNTVRSWDLREGRQLQQHDFTSQIFSLGYCPTGEWLAVGMESSNVEVLHVNKPDKYQLHLHESCVLSLKFAYCGKWFVSTGKDNLLNAWRTPYGASIFQSKESSSVLSCDISVDDKYIVTGSGDKKATVYEVIY

SEQ ID NO: 152581 - DNA, 2313 bp, Artificial Sequence
  derived and/or modified sequence
atgttcccccagagcagacaccccaccccccaccaggccgccggccagcccttcaagttcaccatccccgagagcctggacagaatcaaggaggagttccagttcctgcaggcccagtaccacagcctgaagctggagtgcgagaagctggccagcgagaagaccgagatgcagagacactacgtgatgtactacgagatgagctacggcctgaacatcgagatgcacaagcagaccgagatcgccaagagactgaacaccatctgcgcccaggtgatccccttcctgagccaggagcaccagcagcaggtggcccaggccgtggagagagccaagcaggtgaccatggccgagctgaacgccatcatcggccagcagcagctgcaggcccagcacctgagccacggccacggcccccccgtgcccctgaccccccaccccagcggcctgcagccccccggcatcccccccctgggcggcagcgccggcctgctggccctgagcagcgccctgagcggccagagccacctggccatcaaggacgacaagaagcaccacgacgccgagcaccacagagacagagagcccggcaccagcaacagcctgctggtgcccgacagcctgagaggcaccgacaagagaagaaacggccccgagttcagcaacgacatcaagaagagaaaggtggacgacaaggacagcagccactacgacagcgacggcgacaagagcgacgacaacctggtggtggacgtgagcaacgaggaccccagcagccccagagccagccccgcccacagccccagagagaacggcatcgacaagaacagactgctgaagaaggacgccagcagcagccccgccagcaccgccagcagcgccagcagcaccagcctgaagagcaaggagatgagcctgcacgagaaggccagcacccccgtgctgaagagcagcacccccacccccagaagcgacatgcccacccccggcaccagcgccacccccggcctgagacccggcctgggcaagccccccgccatcgaccccctggtgaaccaggccgccgccggcctgagaacccccctggccgtgcccggcccctaccccgcccccttcggcatggtgccccacgccggcatgaacggcgagctgaccagccccggcgccgcctacgccagcctgcacaacatgagcccccagatgagcgccgccgccgccgccgccgccgtggtggcctacggcagaagccccatggtgggcttcgacccccccccccacatgagagtgcccaccatcccccccaacctggccggcatccccggcggcaagcccgcctacagcttccacgtgaccgccgacggccagatgcagcccgtgcccttcccccccgacgccctgatcggccccggcatccccagacacgccagacagatcaacaccctgaaccacggcgaggtggtgtgcgccgtgaccatcagcaaccccaccagacacgtgtacaccggcggcaagggctgcgtgaaggtgtgggacatcagccaccccggcaacaagagccccgtgagccagctggactgcctgaacagagacaactacatcagaagctgcaagctgctgcccgacggctgcaccctgatcgtgggcggcgaggccagcaccctgagcatctgggacctggccgcccccacccccagaatcaaggccgagctgaccagcagcgcccccgcctgctacgccctggccatcagccccgacagcaaggtgtgcttcagctgctgcagcgacggcaacatcgccgtgtgggacctgcacaaccagaccctggtgagacagttccagggccacaccgacggcgccagctgcatcgacatcagcaacgacggcaccaagctgtggaccggcggcctggacaacaccgtgagaagctgggacctgagagagggcagacagctgcagcagcacgacttcaccagccagatcttcagcctgggctactgccccaccggcgagtggctggccgtgggcatggagagcagcaacgtggaggtgctgcacgtgaacaagcccgacaagtaccagctgcacctgcacgagagctgcgtgctgagcctgaagttcgcctactgcggcaagtggttcgtgagcaccggcaaggacaacctgctgaacgcctggagaaccccctacggcgccagcatcttccagagcaaggagagcagcagcgtgctgagctgcgacatcagcgtggacgacaagtacatcgtgaccggcagcggcgacaagaaggccaccgtgtacgaggtgatctactag

SEQ ID NO: 152582 - DNA, 2313 bp, Artificial Sequence
  derived and/or modified sequence
atgttcccccagtctagacaccctacgccacatcaggccgctggacagcctttcaagtttacgataccggaaagtctcgatcgtataaaggaggaatttcagttcctgcaggctcagtaccatagtttaaagctggaatgtgaaaagctggcctcggaaaagaccgagatgcagagacactacgtcatgtattatgaaatgagctatggcttgaatattgaaatgcacaaacaaaccgaaattgccaaaaggctgaataccatctgtgcgcaggttataccctttcttagtcaagaacatcagcagcaggtggcacaggccgttgagagggcaaaacaggtgacgatggctgaattgaatgccatcattggacagcaacagctgcaagcacagcacctgagccacggccatggacctcccgtcccactcacaccgcacccatccggattgcagcctccaggtatcccgcctctcggcggctctgccgggttactggcactgagcagcgctttgagcggtcagagccatcttgcgatcaaggacgacaagaagcaccatgatgccgagcaccaccgggatagagaaccgggcacttctaactctctcctagttcctgattccttaaggggtacagataagaggaggaatggtcctgaattcagtaatgacattaaaaaaaggaaggtggacgacaaagactcaagccattatgactctgacggagataaatctgatgacaacctggtcgtcgatgttagcaacgaagaccctagtagtccaagggcctcaccagctcattctcctagagagaacggcatcgacaagaaccgacttctcaaaaaggatgccagctctagcccagcaagcacagcttcatctgcctcttccaccagcttaaagtctaaagagatgagcttgcatgagaaggccagtaccccggttttgaaaagctctaccccgacgcccaggtccgacatgccaactcccggtacatctgctacccccggtcttcgcccagggttggggaagccccctgctatcgacccattggtgaatcaggccgcggccgggcttagaacaccacttgcagtgccgggcccttaccccgcgcctttcgggatggtcccacacgccggtatgaatggcgaactaacctctcccggagccgcctacgcttctctgcacaatatgagccctcagatgtccgccgccgccgcagccgccgccgtggtggcatacgggcggtctcccatggttggatttgaccctccaccccatatgagagtgcctacgatacctcccaatctggccggcattcccggcgggaagcccgcatattcattccacgtgacggccgatggccaaatgcaacccgtcccattcccccctgatgccctcattggacccggtatcccacgccatgctcggcagatcaataccttgaatcatggggaagtcgtctgcgcggtgacaattagtaatcctacccgccacgtatacaccggaggcaagggctgtgtgaaggtgtgggatattagccaccccggcaacaagtcgccggtcagtcagctcgattgcctgaaccgagacaattacatacgatcctgtaaactgctgccggacggttgtacactgattgtggggggggaggcatccacgctgagcatttgggacctggcagcccctaccccccgaattaaggccgaactcacgtccagtgctcccgcttgttacgctctggccattagtcctgatagcaaggtgtgctttagctgttgctctgacgggaatattgccgtctgggatctccataaccagacattggtacggcagtttcagggccacacggacggggcttcctgcatagatatctctaacgatggcacaaagctctggaccggtggcctggataacactgtgcgtagctgggacctgcgggaaggtcggcagctccagcaacacgactttaccagccagattttttcactcgggtattgcccaactggggagtggctcgctgtgggaatggaatcatccaatgtcgaagtgctccacgtaaacaagcctgacaagtatcaactgcacctgcacgaaagttgcgtattatccctgaaattcgcctactgtggcaagtggttcgtgtcgacaggaaaagataatctgctcaacgcctggcggactccctatggcgctagcatttttcagagcaaggagtcctcctcagtgctcagttgtgatatcagcgttgacgacaaatacattgtgaccgggtctggagacaaaaaggcaacagtatatgaagtgatttattag

SEQ ID NO: 152583 - DNA, 2313 bp, Artificial Sequence
  derived and/or modified sequence
atgttcccccagagccgccaccccaccccccaccaggccgccggccagcccttcaagttcaccatccctgagagcctggaccgcatcaaggaggagttccagttcctgcaggcccagtaccacagcctgaagctggagtgtgagaagctggccagcgagaagacagagatgcagaggcactacgtgatgtactatgagatgtcctatggcctgaacatcgagatgcacaagcagacagaaattgccaagaggctgaacaccatctgtgcccaggtgatccccttcctgagccaggagcaccagcagcaggtggcccaggccgtggagcgggccaagcaggtgaccatggccgagctgaatgccatcatcggccagcagcagctgcaggcccagcacctgagccacggccacggcccccctgtgcccctgaccccccaccccagcggcctgcagcccccaggcatcccccccctgggcggcagcgctggcctgctggccctgagcagcgccctgagcggccagagccacctggccatcaaggatgacaagaagcaccatgatgctgagcaccaccgggaccgggagcccggcaccagcaacagcctgctggtgcctgacagcctgcggggcacagacaagagaagaaatggacctgagttcagcaatgacatcaagaagaggaaggtggatgacaaggacagcagccactatgacagtgatggagacaagagtgatgacaacctggtggtggatgtgtccaatgaagaccccagcagcccccgggccagccctgcccacagcccccgggagaatggaattgacaagaaccggctgctgaagaaggatgccagcagcagccctgccagcacagccagcagcgccagcagcaccagcctgaagagcaaggagatgagcctgcacgagaaggccagcacccctgtgctgaagagcagcacccccacccccaggagtgacatgcccaccccaggcaccagcgccaccccaggcctgcggcccggcctgggcaagcccccagccatcgaccccctggtgaaccaggccgccgccggcctgcggacccccctggccgtgcccggcccctacccagcccccttcggcatggtgccccacgccggcatgaatggagagctgaccagccctggagctgcctatgccagcctgcacaacatgagcccccagatgtctgctgctgctgctgctgctgctgtggtggcctacggccgcagccccatggtgggctttgatcctccaccccacatgagggtgcccaccatcccccccaacctggccggcatccctgggggcaagccagcctacagcttccacgtgacagcagatggccagatgcagcctgtgcccttccccccagatgccctgattggccctggcatccccaggcatgcccggcagatcaacaccctgaaccacggggaggtggtgtgtgctgtgaccatcagcaaccccaccaggcatgtgtacacaggaggcaagggctgtgtgaaggtgtgggacatcagccaccctggcaacaagagccctgtgtcccagctggactgcctgaacagagacaactacatccgcagctgcaagctgctgcctgatggctgcaccctcatcgtgggcggggaggccagcaccctgagcatctgggacctggccgcccccaccccccgcatcaaggccgagctgaccagcagcgccccagcctgctacgccctggccatcagcccagacagcaaggtgtgcttcagctgctgcagtgatggcaacattgctgtgtgggacctgcacaaccagaccctggtgcggcagttccagggccacacagatggagccagctgcatcgacatcagcaatgatggcaccaagctgtggacaggaggcctggacaacacagtgcgctcctgggacctgcgggagggccggcagctgcagcagcacgacttcaccagccagatcttcagcctgggctactgccccaccggggagtggctggccgtgggcatggagagcagcaatgtggaggtgctgcacgtgaacaagccagacaagtaccagctgcacctgcacgagagctgtgtgctgagcctgaagtttgcctactgcggcaagtggtttgtgtccacaggcaaggacaacctgctgaatgcctggaggaccccctatggagccagcatcttccagagcaaggagagcagctctgtgctgagctgtgacatctctgtggatgacaagtacatcgtgacaggcagcggggacaagaaggccaccgtgtatgaggtgatctactag

SEQ ID NO: 152584 - DNA, 2313 bp, Artificial Sequence
  derived and/or modified sequence
atgttcccccagagccggcaccccaccccccaccaggccgccggccagccctttaagttcacgattccagagtccctagaccggatcaaggaagagttccagttcctccaggcacagtatcactcattgaagctcgagtgtgaaaaattggcaagtgagaaaaccgagatgcagcggcactatgtcatgtattacgaaatgagttacggactgaatattgagatgcataaacagaccgaaatcgctaagcgcttgaacaccatctgtgctcaggttatccctttcctctcccaggagcaccagcagcaggtggcccaggctgtggaacgcgctaagcaggtcacaatggctgaattgaatgccataatcggccagcagcaacttcaggcacagcatctcagtcacgggcacggccccccagtgccactgaccccgcaccctagcggtttgcagccaccgggaatccctcccctcggaggcagtgctggacttcttgctttgagcagcgccttgagcggccagtctcatttggcaatcaaagatgacaagaagcaccacgatgcagagcaccaccgagatcgagaacctggcacgtctaatagcttattagttcccgactctctgcggggtactgataagaggcgcaatggacccgaattttcaaatgacattaaaaaacggaaagtggacgacaaggactctagccattacgattctgacggggataaatcagatgacaatttggtagtcgacgtcagtaatgaggatccaagttcaccaagagcgtctcccgcccatagtcctcgcgaaaacgggatagataagaacagactcctgaagaaggatgcctcttcgagtcccgcgtcgacagcctctagtgctagctccacctctctgaagagtaaggagatgagcctgcacgagaaggcatccacccccgtgctcaaaagctctacacctactcccaggtcagacatgcctacccccggcacaagtgcaaccccggggctcaggccagggctgggcaaaccccctgcaatagatccccttgtgaatcaggccgccgcgggcttacggacaccacttgccgttcccggaccttacccagctcccttcggcatggtgcctcatgccggaatgaacggagaactgacctcccctggcgcagcctacgcctccctgcacaatatgtccccacagatgtcagccgccgcggcagctgctgctgtggtggcatacgggcgatccccaatggtggggtttgaccccccccctcacatgcgcgtgccgacaataccgcctaacttggcagggatacccggtggaaagccagcctacagtttccatgtcaccgcggatggccagatgcaaccagtgcccttcccacccgatgccttgatcgggccaggcataccgcgacatgcgcgccagatcaacacccttaatcacggcgaagtagtgtgtgccgtgactatctcaaaccctacccgccacgtttacacgggaggaaaagggtgtgtaaaagtgtgggatatctcgcatccagggaacaagagtcctgtgtcacaactggattgtctgaacagggacaattatatccgctcgtgcaaactcctacctgatgggtgtacactgattgtgggtggagaagccagtaccctcagcatatgggacttggcagctcctacccctaggataaaggctgagctgacatccagcgctcccgcgtgttatgcgcttgcgatttcccccgactccaaggtctgcttcagttgctgcagcgacggtaatattgcagtgtgggatctgcataaccagacactcgtgaggcaattccagggacacacagacggggcaagctgcatagatatttctaacgatggcacaaaattatggaccgggggcctggacaacaccgttagatcttgggacctgagggaagggcgtcaactccagcaacacgatttcacctcacaaattttttcattgggctattgtcccactggcgagtggctggcagttggtatggaatcatccaatgtagaggtcttgcacgtcaacaagcctgacaaataccaactccatctgcatgaaagttgcgtcctttccctgaagtttgcttattgtggaaagtggttcgtctccaccggaaaggataatttactgaacgcctggaggacaccctacggggcatctatctttcaatcgaaagaaagctcctccgtgctgtcgtgcgacataagcgtggatgataagtatatagtgactggcagcggggacaagaaagcgacagtttacgaggtcatttactag

SEQ ID NO: 152585 - DNA, 2313 bp, Artificial Sequence
  derived and/or modified sequence
atgttccctcagagtaggcaccccacaccacaccaggccgcagggcaaccgttcaagtttacaatacctgagtccctcgacagaatcaaggaggaatttcaattcctgcaagctcagtaccactccttaaagctggagtgcgagaaactggcctctgagaaaactgaaatgcagagacactacgtgatgtattatgaaatgtcttatggtctgaatattgagatgcacaagcagaccgaaatcgcgaagcggctgaacactatatgcgcacaggtgattccatttctgtctcaggagcaccaacagcaagtggctcaggctgtggagcgcgctaaacaagtgaccatggccgaactgaacgccattatcgggcagcagcagctccaggcgcaacacctgtctcatggacatggccctccagtgcccttgacacctcaccctagcggactccagcctcctggaatcccacccctagggggatctgctggcctcttagcactgagcagcgccttgtctggtcagagtcacctggctatcaaagacgacaaaaagcaccatgatgctgagcaccaccgcgacagagagcctggaacttccaacagtttactggtacccgacagcttgaggggaaccgataagaggcggaatgggcctgaattttctaatgatatcaaaaaacggaaggtagatgataaggacagcagccattatgatagcgacggcgataaaagtgacgacaacctggtagtggatgtttctaacgaggacccaagcagtcctagagcgtctccagcccattcccctagagagaatggtatagataagaacagattgctcaaaaaggacgcttccagctccccagccagcacagcctccagcgcctcttcaacgagcttgaagtcgaaggagatgtcacttcatgagaaggcaagtacccctgtcctcaagtctagcacccctacgcctaggtcagatatgcccaccccaggtacatccgccactccagggttacgaccaggattgggcaaaccaccagctatcgaccctctggtgaaccaggcggcagccggtttacgtactcccctggccgtgccaggaccctacccagctccctttggaatggttccccatgccggaatgaacggcgaattgacgtccccaggcgcagcctacgcatctctgcacaatatgagcccccagatgagtgccgcagccgcagccgcagctgtcgtagcctatggccgaagtcctatggtgggcttcgaccccccaccacacatgcgggtcccgactatcccccctaatctggccggaatcccaggcggaaagccagcatactcctttcacgttactgctgatgggcagatgcaaccagtaccctttcctccagacgctcttatcggcccaggcatacccaggcatgcaagacaaatcaataccttgaatcacggcgaggtagtctgcgcagtgaccatctcgaatcccaccagacacgtgtataccggaggcaaaggctgcgttaaggtgtgggacatctcccatcccggtaacaagtcacccgtgagtcagttggattgtttgaaccgggacaattacattaggagttgcaagttgctccccgatggttgcacactgatagtgggaggggaagcctcaacactctccatctgggacctggccgctccaacgccccgaattaaagctgaactcacgagcagtgcgcctgcttgctacgctcttgctatatcccccgattctaaggtctgttttagctgctgtagtgacggtaacattgcagtgtgggatctccataatcagactttagtgaggcagtttcaaggccacaccgacggggcttcctgtattgacataagcaacgacggcacaaagctttggactggcggactggataacacggtgcggtcatgggatctcagggagggccgtcaattacagcagcacgactttacctcgcagatcttttccctcggttactgccctaccggtgagtggttggcagtgggaatggaatcgagcaatgtggaggtcctgcacgttaacaagccagacaagtaccaactccacctgcatgagtcttgtgtgttgagtctgaaattcgcatactgcggcaaatggttcgtgagtactggcaaggataacctgctaaacgcctggcgcactccttacggcgcaagcatctttcagagcaaagagtcaagttcagtcctgagctgtgacatcagcgtggacgacaaatatatcgtcacaggatctggcgacaagaaggcaacagtgtatgaagtgatttattag

SEQ ID NO: 152586 - DNA, 1800 bp, Artificial Sequence
  derived and/or modified sequence
aggagaagagcaaagaaaagcagtccgtctggatttgtttgcccaggactggcgccgcgcacgcggatcgccgaggggagtgcggtcggagtcaccgcgcccccgcctccccgcccgggcagctgaggccgggggttggagcgctgcccccgcgcacagtccccgagcgcccgacgtctccgcgcaggttcttgaagcagctgggcctggggcgcccactaatgtggccctgagggccggagcccgcaccgacgggagcgggagccggagcagctgcgggcgccgagtggccggtgcgcccggcggagcgcgcgtgcgtggccagcgcgctccccgcttctgcttggctttccggcttaattttcctcggcgggattaaagttggaaattgaccggagaattgagttgccggggaacagagccccggccgccgccagagcgatgttcccgcagagccggcacccgacgccgcaccaggctgcaggccagcccttcaagttcactatcccggagtccctggaccggattaaagaggaattccagttcctgcaggcgcagtatcacagccttaaattggaatgtgagaaactggcaagtgaaaagacagaaatgcagaggcactatgtgatgtattatgaaatgtcatatggattaaacattgaaatgcacaaacagactgaaatcgccaagagattgaatacgatttgtgcacaagtcatcccatttctgtctcaggaacatcaacaacaggtggcccaggctgttgaacgtgccaaacaggtgaccatggcagaattgaatgccatcatcgggcagcagcagttgcaagctcagcatctttctcatggccacggacccccagttccccttacgcctcacccttcgggacttcagcctcctggaatcccgcccctcgggggcagtgccggccttcttgcgctgtctagtgctctgagtgggcagtctcacttggcaataaaagatgacaagaagcaccacgatgcagagcaccacagagacagagagccgggcacaagtaattccctcctggtcccagacagtctaagaggcacagataaacgcagaaatggacctgaattttccaatgacatcaagaaaaggaaggtggatgataaggactccagccactatgacagtgatggtgacaaaagcgatgacaacttagttgtggatgtgtctaatgaggacccttcttctccgcgagcaagccctgcccactcgccccgggaaaatggaatcgacaaaaatcgcctgctaaagaaggatgcttctagcagtccagcttccacggcctcctcggcaagttccacttctttgaaatccaaagaaatgagcttgcatgaaaaagccagcacgcctgttctgaaatccagcacaccaacgcctcggagcgacatgccaacgccgggcaccagcgccactccaggcctccgtccaggtctcggcaagcctccagccatagaccccctcgttaaccaagcggcagctggcttgaggacacccctggcagtgcccggcccatatcctgctccttttgggatggtcccccacgctggcatgaacggcgagctgaccagcccaggcgctgcctacgccagtttacacaacatgtcgccccagatgagcgccgcagccgccgcggccgccgtggtggcctacgggcgctcccccatggtggggtttgatcctccccctcacatgagagtacctaccattcctccaaacctggcaggaatccctggggggaaaccgagccttgttcctgccccagcacattga

SEQ ID NO: 152587 - DNA, 3893 bp, Artificial Sequence
  derived and/or modified sequence
tttgcccgccggggagggtggccgattggcggagcgcactcctgctgttttccccaccatctcgtggatgtcgtccctcgggtggtgagagaactttgcagtgggctggagcgccctttgcggagaagcacacgaaggtgaaggaaggaaagaaagaagaccgaggaagaaggagctcggaagaagggtccggagcggccggtccggccgtgcagggcgagtgcgcccgaggcgcggcgccctgatgctccccgggctcgaggagcattgggcacttgcgggactgctctcggtggagtagccccgtcgggcccggagggtttgtgcaaccgcggagaacaccgagtgctggtcgcacggggcgtgccgagccgcctcccggcgcgccctccgcactttccccgcctcgtcatccgtcgctccccggccaggagcctccgctgcgtcttcaacctcgctcccctttgcgtcccgggagcctgcgagcacccggccgaaggcgcagccgaatcttgcgggagtcgccccgaaagcgtcgggtttgtgtggggttagcgggggccgccgcgccacctgcacctcgcccgccgccgcctcggggaaagcccgaagaggaggcggaccaggagaagagcaaagaaaagcagtccgtctggatttgtttgcccaggactggcgccgcgcacgcggatcgccgaggggagtgcggtcggagtcaccgcgcccccgcctccccgcccgggcagctgaggccgggggttggagcgctgcccccgcgcacagtccccgagcgcccgacgtctccgcgcaggttcttgaagcagctgggcctggggcgcccactaatgtggccctgagggccggagcccgcaccgacgggagcgggagccggagcagctgcgggcgccgagtggccggtgcgcccggcggagcgcgcgtgcgtggccagcgcgctccccgcttctgcttggctttccggcttaattttcctcggcgggattaaagttggaaattgaccggagaattgagttgccggggaacagagccccggccgccgccagagcgatgttcccgcagagccggcacccgacgccgcaccaggctgcaggccagcccttcaagttcactatcccggagtccctggaccggattaaagaggaattccagttcctgcaggcgcagtatcacagccttaaattggaatgtgagaaactggcaagtgaaaagacagaaatgcagaggcactatgtgatgtattatgaaatgtcatatggattaaacattgaaatgcacaaacagactgaaatcgccaagagattgaatacgatttgtgcacaagtcatcccatttctgtctcaggaacatcaacaacaggtggcccaggctgttgaacgtgccaaacaggtgaccatggcagaattgaatgccatcatcgggcagcagcagttgcaagctcagcatctttctcatggccacggacccccagttccccttacgcctcacccttcgggacttcagcctcctggaatcccgcccctcgggggcagtgccggccttcttgcgctgtctagtgctctgagtgggcagtctcacttggcaataaaagatgacaagaagcaccacgatgcagagcaccacagagacagagagccgggcacaagtaattccctcctggtcccagacagtctaagaggcacagataaacgcagaaatggacctgaattttccaatgacatcaagaaaaggaaggtggatgataaggactccagccactatgacagtgatggtgacaaaagcgatgacaacttagttgtggatgtgtctaatgaggacccttcttctccgcgagcaagccctgcccactcgccccgggaaaatggaatcgacaaaaatcgcctgctaaagaaggatgcttctagcagtccagcttccacggcctcctcggcaagttccacttctttgaaatccaaagaaatgagcttgcatgaaaaagccagcacgcctgttctgaaatccagcacaccaacgcctcggagcgacatgccaacgccgggcaccagcgccactccaggcctccgtccaggtctcggcaagcctccagccatagaccccctcgttaaccaagcggcagctggcttgaggacacccctggcagtgcccggcccatatcctgctccttttgggatggtcccccacgctggcatgaacggcgagctgaccagcccaggcgctgcctacgccagtttacacaacatgtcgccccagatgagcgccgcagccgccgcggccgccgtggtggcctacgggcgctcccccatggtggggtttgatcctccccctcacatgagagtacctaccattcctccaaacctggcaggaatccctggggggaaacctgcatactccttccacgttactgcagacggtcagatgcagcctgtcccttttccccccgacgccctcatcggacccggaatcccccggcatgctcgccagatcaacaccctcaaccacggggaggtggtgtgcgctgtgaccatcagcaaccccacgagacacgtgtacacaggcgggaagggctgcgtcaaggtctgggacatcagccaccctggcaataagagccctgtctcccagctcgactgtctgaacagagacaattatatccgttcctgtaaattgctacccgatggctgcactctcatagtgggaggggaagccagtactttgtccatttgggacctggcggctccaaccccgcgcatcaaggcggagctgacgtcctcggcccccgcctgctacgccctggccatcagccccgattccaaggtctgcttctcatgctgcagcgacggcaacatcgctgtgtgggatctgcacaaccagacactagtgaggcaattccagggccacacagacggagccagctgtattgacatttctaatgatggcaccaagctctggacgggtggtttggacaacacagtcaggtcctgggacctgcgcgaggggcggcagctgcagcagcacgacttcacctcccagatcttctccctggggtactgccccaccggggagtggctggcagtgggcatggagagcagcaatgtggaggtgctgcacgtgaacaagcctgacaagtaccagctgcacctgcatgagagctgcgtgctgtccctgaaatttgcttactgtggtaaatggtttgtgagtactggaaaagataacctcctcaatgcttggcggaccccctatggagccagcatattccagtccaaagagtcctcgtcagtgcttagctgtgacatctctgtggatgataagtacatagtcactggctcgggggacaagaaggctacagtctatgaagtcatctactgaaaacattatgtggtttaacgtttatagttgaattgggccaaaatgtttcgaatttatagaaatagaaaagttgtaactttaaaagagaaaaaaaattacaaacacctgtttccaaaccttgacagaaaactactttgagtctacaaagaggaggcgacaagtccatcagcagaaagtcacctgtctacatagaccaaatggagcaccaaggccaagcggacagaggggccatgggttgtaggattgaggaacggaatctgccgactcacatgacagcccattctttctttctgggtgatctggggatcacgccttgcccaagtgtgagattacctttctgttccttgcagttcacctcactttccgtcctttgtagagcagtggtgtctccaatgaacttgtttcctggttttgcatcttgtgaaatgtttttttgtatttttgttgaaggttaaacatttgtataaattgtaaatatatttggtttattacagtaaaggctttagtaccaataa

SEQ ID NO: 152588 - protein, 772 aa, Artificial Sequence
  derived and/or modified sequence
MYPQGRHPAPHQPGQPGFKFTVAESCDRIKDEFQFLQAQYHSLKVEYDKLANEKTEMQRHYVMYYEMSYGLNIEMHKQTEIAKRLNTILAQIMPFLSQEHQQQVAQAVERAKQVTMTELNAIIGQQQLQAQHLSHATHGPPVQLPPHPSGLQPPGIPPVTGSSSGLLALGALGSQAHLTVKDEKNHHELDHRERESSANNSVSPSESLRASEKHRGSADYSMEAKKRKAEEKDSLSRYDSDGDKSDDLVVDVSNEDPATPRVSPAHSPPENGLDKARSLKKDAPTSPASVASSSSTPSSKTKDLGHNDKSSTPGLKSNTPTPRNDAPTPGTSTTPGLRSMPGKPPGMDPIGIMASALRTPISITSSYAAPFAMMSHHEMNGSLTSPGAYAGLHNIPPQMSAAAAAAAAAYGRSPMVSFGAVGFDPHPPMRATGLPSSLASIPGGKPAYSFHVSADGQMQPVPFPHDALAGPGIPRHARQINTLSHGEVVCAVTISNPTRHVYTGGKGCVKIWDISQPGSKSPISQLDCLNRDNYIRSCKLLPDGRTLIVGGEASTLTIWDLASPTPRIKAELTSSAPACYALAISPDAKVCFSCCSDGNIAVWDLHNQTLVRQFQGHTDGASCIDISHDGTKLWTGGLDNTVRSWDLREGRQLQQHDFTSQIFSLGYCPTGEWLAVGMESSNVEVLHHTKPDKYQLHLHESCVLSLKFAYCGKWFVSTGKDNLLNAWRTPYGASIFQSKESSSVLSCDISADDKYIVTGSGDKKATVYEVIY

SEQ ID NO: 152589 - DNA, 2319 bp, Artificial Sequence
  derived and/or modified sequence
atgtacccccagggcagacaccccgccccccaccagcccggccagcccggcttcaagttcaccgtggccgagagctgcgacagaatcaaggacgagttccagttcctgcaggcccagtaccacagcctgaaggtggagtacgacaagctggccaacgagaagaccgagatgcagagacactacgtgatgtactacgagatgagctacggcctgaacatcgagatgcacaagcagaccgagatcgccaagagactgaacaccatcctggcccagatcatgcccttcctgagccaggagcaccagcagcaggtggcccaggccgtggagagagccaagcaggtgaccatgaccgagctgaacgccatcatcggccagcagcagctgcaggcccagcacctgagccacgccacccacggcccccccgtgcagctgcccccccaccccagcggcctgcagccccccggcatcccccccgtgaccggcagcagcagcggcctgctggccctgggcgccctgggcagccaggcccacctgaccgtgaaggacgagaagaaccaccacgagctggaccacagagagagagagagcagcgccaacaacagcgtgagccccagcgagagcctgagagccagcgagaagcacagaggcagcgccgactacagcatggaggccaagaagagaaaggccgaggagaaggacagcctgagcagatacgacagcgacggcgacaagagcgacgacctggtggtggacgtgagcaacgaggaccccgccacccccagagtgagccccgcccacagcccccccgagaacggcctggacaaggccagaagcctgaagaaggacgcccccaccagccccgccagcgtggccagcagcagcagcacccccagcagcaagaccaaggacctgggccacaacgacaagagcagcacccccggcctgaagagcaacacccccacccccagaaacgacgcccccacccccggcaccagcaccacccccggcctgagaagcatgcccggcaagccccccggcatggaccccatcggcatcatggccagcgccctgagaacccccatcagcatcaccagcagctacgccgcccccttcgccatgatgagccaccacgagatgaacggcagcctgaccagccccggcgcctacgccggcctgcacaacatccccccccagatgagcgccgccgccgccgccgccgccgccgcctacggcagaagccccatggtgagcttcggcgccgtgggcttcgacccccacccccccatgagagccaccggcctgcccagcagcctggccagcatccccggcggcaagcccgcctacagcttccacgtgagcgccgacggccagatgcagcccgtgcccttcccccacgacgccctggccggccccggcatccccagacacgccagacagatcaacaccctgagccacggcgaggtggtgtgcgccgtgaccatcagcaaccccaccagacacgtgtacaccggcggcaagggctgcgtgaagatctgggacatcagccagcccggcagcaagagccccatcagccagctggactgcctgaacagagacaactacatcagaagctgcaagctgctgcccgacggcagaaccctgatcgtgggcggcgaggccagcaccctgaccatctgggacctggccagccccacccccagaatcaaggccgagctgaccagcagcgcccccgcctgctacgccctggccatcagccccgacgccaaggtgtgcttcagctgctgcagcgacggcaacatcgccgtgtgggacctgcacaaccagaccctggtgagacagttccagggccacaccgacggcgccagctgcatcgacatcagccacgacggcaccaagctgtggaccggcggcctggacaacaccgtgagaagctgggacctgagagagggcagacagctgcagcagcacgacttcaccagccagatcttcagcctgggctactgccccaccggcgagtggctggccgtgggcatggagagcagcaacgtggaggtgctgcaccacaccaagcccgacaagtaccagctgcacctgcacgagagctgcgtgctgagcctgaagttcgcctactgcggcaagtggttcgtgagcaccggcaaggacaacctgctgaacgcctggagaaccccctacggcgccagcatcttccagagcaaggagagcagcagcgtgctgagctgcgacatcagcgccgacgacaagtacatcgtgaccggcagcggcgacaagaaggccaccgtgtacgaggtgatctactag

SEQ ID NO: 152590 - DNA, 2319 bp, Artificial Sequence
  derived and/or modified sequence
atgtatccccagggaagacacccagctccacaccaacccggccagcccggttttaaattcacagtcgctgagagctgtgatcgaatcaaagacgagtttcaatttttacaggctcagtaccattctctaaaagtggagtacgacaagctggccaatgagaagacggaaatgcagcgacactacgtgatgtattacgagatgtcctatggcctgaatatcgagatgcataaacagacagaaatcgccaaacgcctcaacacaattctggcacagatcatgccctttctctctcaggaacaccagcagcaggtcgcccaggctgttgagagggcaaaacaggtcaccatgacggagctgaacgcgatcatcgggcaacagcaattgcaggcacagcatctttcccacgcaacacacggtccaccagttcagctgccccctcaccccagtggactgcagcctccgggtataccaccagttacagggagctccagtggcctgctggcgttaggtgctttagggagccaggctcacctgacagtaaaggacgaaaagaatcaccacgaactggatcatcgcgaaagggaaagtagcgcaaataatagtgtgagtccctccgagtctctcagagcctccgagaaacatcgaggatcggctgactactcaatggaagctaaaaaaagaaaagccgaagagaaggacagcctatcccgttacgactccgatggagacaaatctgatgatctggtggttgatgtcagcaacgaggatcctgccactcccagagtctctccagctcattctcctccagagaacggtttggacaaagccagatctttaaagaaggacgctccaactagccccgcctctgtggcaagtagctcaagcacaccctctagcaaaactaaagacttaggccacaatgataagagctctactccaggcttaaaatcaaacacaccaaccccaaggaatgacgctcccacccctggcaccagtactactcctggcctcaggtccatgcccggtaaacctccagggatggatccaattggaattatggcatctgccttaaggactcccatctctataacgtcatcttacgccgccccctttgcgatgatgtcccaccacgagatgaatggcagcttgacttcaccgggagcttacgcaggcctacataacattcccccccaaatgagcgctgctgccgccgcggctgcggcggcctacgggcggtcccccatggtctcatttggcgctgtaggctttgatccgcatccaccaatgcgtgctaccgggctgccgagcagtctcgccagtatcccaggtgggaagcccgcttacagctttcacgtgagcgccgacggccagatgcagcctgtaccgtttcctcacgatgccctggccggtccagggatccccagacacgcgcggcagatcaatactctcagtcacggagaggtagtgtgcgccgttaccatctcaaatccaaccagacatgtgtacactggcggcaagggttgtgtgaagatctgggacatctctcagcccgggtccaagagtccaattagccagctcgactgcctaaaccgcgacaactacatcaggagctgtaagctgttacccgacggacgcaccctcattgtggggggggaagcatctaccctaacaatctgggacctcgcctcacctactcctcgtatcaaagccgagctgacctcaagcgctccagcgtgctatgctctagcaattagtcccgacgcaaaagtgtgcttcagctgctgcagcgacggaaacatcgcagtgtgggatctgcataatcagaccctggtgcgacaattccagggccatacggatggggcctcatgtatcgatatttctcacgatgggaccaaactttggacaggcggtctggataacactgtgcgatcttgggacctccgtgagggaagacagttgcagcagcatgacttcacgtcacagatcttcagcctgggatactgcccaactggggagtggctagcagtgggaatggaatctagtaacgtggaagtgctccaccatacaaaaccggacaaatatcagctccacttacacgagagctgcgttctgtccttgaagtttgcctattgcggcaaatggtttgtaagtactggaaaggacaatctgctgaacgcctggagaacaccctacggagcttctatttttcagtcaaaagagtcctccagtgtcctgtcttgcgatataagtgcggacgacaaatacatcgttaccggatccggtgataagaaggctacggtatatgaagtaatttattag

SEQ ID NO: 152591 - DNA, 2319 bp, Artificial Sequence
  derived and/or modified sequence
atgtacccccagggccgccacccagccccccaccagcccggccagcccggcttcaagttcaccgtggccgagagctgtgaccgcatcaaggatgagttccagttcctgcaggcccagtaccacagcctgaaggtggagtatgacaagctggccaatgagaagacagagatgcagaggcactacgtgatgtactatgagatgtcctatggcctgaacatcgagatgcacaagcagacagaaattgccaagaggctgaacaccatcctggcccagatcatgcccttcctgagccaggagcaccagcagcaggtggcccaggccgtggagcgggccaagcaggtgaccatgacagagctgaatgccatcatcggccagcagcagctgcaggcccagcacctgagccacgccacccacggcccccctgtgcagctgcccccccaccccagcggcctgcagcccccaggcatcccccctgtgacaggcagcagcagcggcctgctggccctgggcgccctgggcagccaggcccacctgactgtgaaggatgagaagaaccaccacgagctggaccaccgggagcgggagagcagcgccaacaacagcgtgagccccagcgagagcctgcgggccagcgagaagcaccggggcagcgctgactacagcatggaggccaagaagaggaaggccgaggagaaggacagcctgagccgctatgacagtgatggagacaagagtgatgacctggtggtggatgtgtccaatgaagatcctgccaccccccgggtgtccccagcccacagccccccagaaaatggcctggacaaggcccggagcctgaagaaggatgcccccaccagccctgcctctgtggccagcagcagcagcacccccagcagcaagaccaaggacctgggccacaatgacaagagcagcaccccaggcctgaagagcaacacccccaccccaagaaatgatgcccccaccccaggcaccagcaccaccccaggcctgcgctccatgcctgggaagcccccaggcatggaccccatcggcatcatggccagcgccctgcggacccccatcagcatcaccagcagctatgctgccccctttgccatgatgagccaccacgagatgaatggcagcctgaccagccctggggcctatgccggcctgcacaacatccccccccagatgtctgctgctgctgctgctgctgctgctgcctacggccgcagccccatggtgtcctttggagctgtgggctttgacccccacccccccatgagggccaccggcctgcccagcagcctggccagcatccctgggggcaagccagcctacagcttccacgtgtctgcagatggccagatgcagcctgtgcccttcccccatgatgccctggccggccctggcatccccaggcatgcccggcagatcaacaccctgagccatggagaggtggtgtgtgctgtgaccatcagcaaccccaccaggcatgtgtacacaggaggcaagggctgtgtgaagatctgggacatcagccagcccggcagcaagagccccatcagccagctggactgcctgaacagagacaactacatccgcagctgcaagctgctgcctgatggccgcaccctcatcgtgggcggggaggccagcaccctgaccatctgggacctggccagccccaccccccgcatcaaggccgagctgaccagcagcgccccagcctgctacgccctggccatcagcccagatgccaaggtgtgcttcagctgctgcagtgatggcaacattgctgtgtgggacctgcacaaccagaccctggtgcggcagttccagggccacacagatggagccagctgcatcgacatcagccatgatggcaccaagctgtggacaggaggcctggacaacacagtgcgctcctgggacctgcgggagggccggcagctgcagcagcacgacttcaccagccagatcttcagcctgggctactgccccaccggggagtggctggccgtgggcatggagagcagcaatgtggaggtgctgcaccacaccaagccagacaagtaccagctgcacctgcacgagagctgtgtgctgagcctgaagtttgcctactgcggcaagtggtttgtgtccacaggcaaggacaacctgctgaatgcctggaggaccccctatggagccagcatcttccagagcaaggagagcagctctgtgctgagctgtgacatctctgcagatgacaagtacatcgtgacaggcagcggggacaagaaggccaccgtgtatgaggtgatctactag

SEQ ID NO: 152592 - DNA, 2319 bp, Artificial Sequence
  derived and/or modified sequence
atgtacccccagggccggcaccccgccccccaccagcccggccagcccgggttcaagttcactgtggcggaaagctgcgaccgaattaaagatgagttccagttcctgcaggcacagtatcactccctgaaggtggagtacgacaagctggccaatgaaaagacagaaatgcagaggcactatgtgatgtattacgaaatgagctacggactgaacattgagatgcataagcaaactgagatcgcaaagcgcctgaacacaatccttgcccagattatgccttttctttctcaagagcaccagcagcaggtcgctcaggccgtggaacgggcaaagcaggtgacaatgactgaactcaatgctatcattgggcaacagcaacttcaagcacagcacctcagtcatgctactcatggaccacccgtccaactgcccccccatccaagcggtcttcagcctcccggaatcccgcctgtcacaggatcgagtagcggcctactggcactaggggccctggggagtcaagcacacctcactgtcaaagatgaaaagaaccaccatgagctggatcaccgagagcgggagtcctccgctaacaattcagtgtctccgagtgaatctttacgagcttccgagaaacacagagggagtgctgactactcaatggaggctaagaaacggaaagcagaggagaaggacagcctatctcgttacgactccgacggtgacaagagcgacgacctggtcgtggatgtgtctaatgaagacccagctacaccccgcgtaagtcccgcacattctccgccagagaacggtctagacaaggcaagaagcctgaagaaagatgccccgacaagtcctgcctctgtggcctcatcctcctctactccctcatcaaagaccaaagacttaggacacaatgacaagtcctctacacctgggttgaagtctaataccccaacaccacgtaacgacgctcctactccaggcacgagtacaactcctggattgcgcagcatgcctggtaagcctcctggaatggatcctattggtatcatggcctctgcactgagaacacctatctctattacctccagttatgctgcaccctttgcgatgatgtctcatcatgaaatgaatggctccctgacgagcccaggcgcttacgctgggctgcataatatcccacctcagatgtccgcagccgccgccgcagctgcagcagcttatggtcgatctcctatggtatctttcggagccgtggggtttgacccacatccccccatgcgagcaacagggttgccatcttctctggcctcaatccctggtgggaagcctgcttatagcttccatgtaagcgcagacggccagatgcagccggttccatttccacatgatgcccttgccggtcccggaattcctcggcatgccagacagatcaatacgttatctcacggcgaggtcgtttgcgccgtcaccatttccaaccccacaagacacgtctacacgggaggtaaaggctgcgtgaagatctgggatatcagccagccgggttccaaatccccaatctctcagcttgattgtcttaacagagataactatatacgttcttgtaaacttctgcccgatggtaggacattgatcgtgggcggcgaggcctcaacgttaacgatctgggacctcgccagtcccactccgcgaatcaaggcggaactgacaagttcggcaccggcttgctatgcgctggctataagcccagacgctaaagtctgtttcagctgctgttcagatggtaacattgccgtctgggatctgcataatcagacactggtcagacagtttcaaggacacacggacggggcatcctgcatagacatttcccacgatgggactaagctgtggacgggggggctggataatacagtccgatcttgggatttgcgcgaaggcagacagctgcagcagcacgattttactagccagattttttccctcggctactgtcccacaggggagtggctagcagtaggcatggaatcaagcaacgtggaagtactccatcatactaaaccagacaagtaccaattacacctacatgagagctgcgtcctcagtctgaaatttgcgtactgcggcaaatggttcgttagcacgggcaaggacaatcttttgaacgcgtggcgcaccccctacggagccagtatcttccagtccaaggaatctagctctgtgctgagttgtgacatctccgccgatgacaaatatattgttaccggctctggggataaaaaggcgacagtgtatgaagttatctactag

SEQ ID NO: 152593 - DNA, 2319 bp, Artificial Sequence
  derived and/or modified sequence
atgtatcctcaaggacgccacccagcaccacaccagcccggacagcctgggttcaaattcaccgtggctgagagctgtgatcggattaaggatgaattccaattcctacaagcacagtatcactccctgaaagtggagtacgataaactggccaatgagaaaaccgagatgcagcggcactacgttatgtactatgaaatgagttacgggctgaacatcgaaatgcacaaacagacagagattgctaaaaggcttaacacaatactcgctcagattatgccctttctgtcacaggaacaccagcaacaggtggcccaagctgttgaaagagccaaacaagttactatgactgagttgaacgcaattatcggtcagcaacagctgcaggcacagcatctcagccacgccactcatggtccgccagtccagttgccaccccacccgagtggcctccagcctcctggcattccacccgttaccggcagttcttccggactcctggcacttggggcacttggatcgcaagcgcatttgacagtaaaagatgagaagaatcaccacgagctagatcaccgcgagcgcgaatcatctgccaacaattctgtcagcccgtctgaatccctgcgggcatctgagaagcaccgtgggagcgccgactactccatggaggccaagaaaaggaaagcagaggagaaggactctctgtcacgctatgattctgatggtgataaaagtgacgacctggtcgtcgatgtgtcaaacgaggatcccgctaccccaagagtgtcacctgcccacagccctcctgagaatggtctcgacaaagcgagatccctcaaaaaagacgccccaacatcacccgcatcagtagcctcctcttcctccacccccagcagcaagacaaaagatctgggacataatgataagtcatcgacccccggtttgaagagcaacaccccgacacctaggaatgacgcgcctaccccaggaacttccacgacacctggcctcaggagtatgccaggaaaaccgcctggtatggacccaattgggatcatggcttccgcactacggacgcccattagcatcacgtcttcttatgctgctcccttcgccatgatgtctcatcacgaaatgaatggctctctcacaagcccaggagcctacgccggactccacaacatcccccctcagatgtctgctgctgcagcagccgctgccgctgcttatgggcgatcaccaatggtttcatttggggctgtgggatttgaccctcaccctccgatgcgggcaactggcctgccaagcagtttggcctcaattcccggaggaaagccagcatattctttccacgttagtgctgatggccagatgcagccagtgcctttccctcacgacgccctcgccggtcccggtatcccacgccacgctcggcagatcaacaccctttcacatggcgaggtcgtctgtgctgtgactatctcaaatcccacaaggcacgtatacacagggggtaagggctgcgtgaagatctgggacatctctcaaccgggatccaagtctcctatttctcagctggattgtctgaaccgtgacaactacatcagaagctgcaagttgttgcctgatggcaggactctcattgttggcggtgaagccagcactctgactatctgggatttggcaagtcccactcctcgcattaaggccgaactcacttcatccgctcccgcttgctacgcactggccatttctcccgatgctaaagtgtgtttttcatgttgctccgatgggaatatcgccgtctgggatctccacaaccagacactggtgcgtcagttccagggacataccgacggcgcttcctgtattgacatatcacacgacggcactaagctgtggaccggcggactcgacaatactgtccgttcttgggacctgcgggagggcagacagctgcaacaacacgacttcaccagccagatcttcagcctcggatactgccccaccggggaatggctggcagtgggtatggaatcttcgaacgtagaggttctgcaccacacgaagcccgacaaataccagctgcacttgcacgagagttgcgtcttgtccctcaagttcgcctactgcggcaagtggttcgtgtccaccgggaaagacaacctcttgaatgcctggcgcactccttacggcgcatccatcttccagagcaaggagtccagttcagtgctgtcatgtgacatttccgcggatgataagtatatagtcaccggtagtggagataaaaaagccacggtgtacgaggtgatatattag

SEQ ID NO: 152594 - DNA, 6004 bp, Artificial Sequence
  derived and/or modified sequence
tataatatatatctatttattatatgtctttcggttaattcctgatctgaggagcgctgtttttcactcccatgcgaaagtcaccagcgggtagggcctgattgctacttttcatgcatagttttagacacaagagggcattgtgacgtcgcgcccagcggcacccagtcgtaggccgagtcccgcagccccacgtgggggccccgcgctcccattggccagcgccggacgaagctgccacattattttgttacttttcagtccctatttggaactgctctcgcggcagttcagacctcgtgctcgtccccttcgcctgtctgtgtgtggtatccgtaggtccggggcacttttttttttggtgtgtgtgtgtgtgcgtgcgcgcgtgtgtgtgtgttgggtgtgtgtgttttgggggtttgccggggcgcggagaggagagccgggccgaggggaaggaaggaagccgtagagctccccggtctcgggctgcgtctcccctccagcgctctcctgcctgtgcgctccgacgcggcagcggcggtggcgctgagcgctcctcggtggggacgcggtgctcaagctgggagcagcgagaaccctttgcggaggcttcccgtgcccgctggacttaggatgccagggcgtttgatttgcacctactgagcccggagttcctccccggccctgggaagggcttgcagcggcggcggcggcggcggcagcggcagtagcagacggaacagcaggctctcctctccgagggggggcgtcgaagcgcccgcgccgggctcccgccctcaccctccggcgctcctgcggccccaagccaccacctcgtagcccgcctccttcctcttctcgccgcgagccccaggcccggacgcctctaggatcggacccgcgcgccccggatgcttggggctgccccggcgcgcccccctacaggcgcgacccgctgagtgacccggagggggcccgagctcgccccaggaggggcccccggcctcgggaccccgcgccggacctgctggggagccgacgatgtccgcgcagtcccaggcattgacgcgctcgacgcagcccagggaaggcggccggccgctgcccgccgagccctaggcgcacaaagcccgcgcccgccgcccggccccggcgcccgccgacgactttgccgcctgctccgcggctctttgtctccacttggggcgggcgcccgactctgggatttcgctgcgagaacgagctgggggggccgggggcgagctctcggtttcccggccgccccccgctcgggctcggctcccccctcccccgcacctccccggcccgggctctcggcgcttccacgctctcggaatcacgacccctccctgccatgtatccgcagggcagacatccggctccccatcaacccgggcagccgggatttaaattcacggtggctgagtcttgtgacaggatcaaagacgaattccagttcctgcaagctcagtatcacagcctcaaagtggagtacgacaagctggcaaacgagaagacggagatgcagcgccattatgtgatgtactatgagatgtcctatggcttgaacattgaaatgcacaagcagacagagattgcgaagagactgaacacaattttagcacagatcatgcctttcctgtcacaagagcaccagcagcaggtggcgcaggcagtggagcgcgccaagcaggtcaccatgacggagctgaacgccatcatcgggcagcagcagctccaggcgcagcacctctcccatgccacacacggccccccggtccagttgccaccccacccgtcaggtctccagcctccaggaatccccccagtgacagggagcagctccgggctgctggcactgggcgccctgggcagccaggcccatctgacggtgaaggatgagaagaaccaccatgaactcgatcacagagagagagaatccagtgcgaataactctgtgtcaccctcggaaagcctccgggccagtgagaagcaccggggctctgcggactacagcatggaagccaagaagcggaaggcggaggagaaggacagcttgagccgatacgacagtgatggagacaagagtgatgatctggtggtggatgtttccaatgaggaccccgcaacgccccgggtcagcccggcacactcccctcctgaaaatgggctggacaaggcccgtagcctgaaaaaagatgcccccaccagccctgcctcggtggcctcttccagtagcacaccttcctccaagaccaaagaccttggtcataacgacaaatcctccacccctgggctcaagtccaacacaccaaccccaaggaacgacgccccaactccaggcaccagcacgaccccagggctcaggtcgatgccgggtaaacctccgggcatggacccgataggtataatggcctcggctctgcgcacgcccatctccatcaccagctcctatgcggcgcccttcgccatgatgagccaccatgagatgaacggctccctcaccagtcctggcgcctacgccggcctccacaacatcccaccccagatgagcgccgccgccgctgctgcagccgctgcctatggccgatcgccaatggtgagctttggagctgttggttttgaccctcaccccccgatgcgggccacaggcctcccctcaagcctggcctccattcctggaggaaaaccagcgtactcattccatgtgagtgctgatgggcagatgcagcccgtgcccttcccccacgacgccctggcaggccccggcatcccgaggcacgcccggcagatcaacacactcagccacggggaggtggtgtgtgccgtgaccatcagcaaccccacgaggcacgtctacacaggtggcaagggctgcgtgaagatctgggacatcagccagccaggcagcaagagccccatctcccagctggactgcctgaacagggacaattacatccgctcctgcaagctgctccctgatgggcgcacgctcatcgtgggcggcgaggccagcacgctcaccatctgggacctggcctcgcccacgccccgcatcaaggccgagctgacgtcctcggctcccgcctgttatgccctggccattagccctgacgccaaagtctgcttctcctgctgcagcgatgggaacattgctgtctgggacctgcacaaccagaccctggtcaggcagttccagggccacacagatggggccagctgcatagacatctcccatgatggcaccaaactgtggacagggggcctggacaacacggtgcgctcctgggacctgcgggagggccgacagctacagcagcatgacttcacttcccagatcttctcgctgggctactgccccactggggagtggctggctgtgggcatggagagcagcaacgtggaggtgctgcaccacaccaagcctgacaagtaccagctgcacctgcacgagagctgcgtgctctccctcaagttcgcctactgcggcaagtggttcgtgagcactgggaaagataaccttctcaacgcctggaggacgccttatggagccagcatattccagtctaaagaatcctcgtctgtcttgagttgtgacatttcagcggatgacaaatacattgtaacaggctctggtgacaagaaggccacagtttatgaggtcatctactaaacaagaactccagcagggctgtcaaactctgggagaaaccgactcggctctgacagggagacccccaggcgaggggccccgaggatggcggaggatgggccgcaggcagccgagcgttcagggctgcgctccggccggctgagagggcacgtgccccgtcacagtctggactcctgggcctggattgatgtgtctcacagactcggaagggttctgctcctcctcctccccctgaacaatgctggcagttgctacaaatagatttattggaggcttatggctccggttcccccacagacccgctcatgagtctctgtttgttcttcccttttcttttgccctgtccctcaccttgggtcgggggtgctggagtggaccacaatgttgtgctgggggatgggggggtctctctttgccgattgtgcagtgcacaagatttgtgaaaaatgtaaataacagactcctattgcggactgatcagtgggagaggaggccccttcccaccggaaactctgagtgtgtatttcgcctgctgtatttgtaatccactcgtggtggtggcttttttttttttttttttttaaataaacagatgctctcacctgggaagaggagacagggaggggaaccaattgaagaaagaggagaaaagtcttagagtgtggaaaaggcaaccaggttggccgtaaggtgcctgctggaatgcgtgtgcctccacacgggtctgggcatccggactgataaccagccggccagactgagggatggaaggcactgagatgggggcccgtccaggcggacacccgcagaaatggagctttctgtggtctcttgcactctggctgcctcttgccctctctgtgtctctctttcttggtctctccctctctcctcctcagcctggtctttctctttggtgcacacttagttattgttgtgagcaatggaagttcaaaggaactccctctccagctcttctgaatcttgggacacagcctaaaaaggacaaaaagttagaagacagcatagcaactcagctcagggagctaccagagaaaaatagcaactgatgtgggtgctttttttttttttttaatttgaataaaaagaattagaagtgatgtccttttataaaatgccttctcccccttcccgcctacagtctcttcctctccccttagaggggggaaagtgtataaacctacagggttgtgagtctgaaaagaggatccccctcacccccaccctgggcagagcagtgggggttggggggtgggagagggggacacagatcctggcacactgtggatatttcttgcagattgcagtctcttgtggcccaaacaggttaggtagactatcgcctctggcaggtgccaccttttggtaccaacatgttctgaggtgttaggatttgggttgggttttttttgtttgttttttttttccttttggtctttttttttttctccttttaaagaaaagctaaaggccgctgtgagtcctggtggcaggctctccatggatgtagcatatcgaagataatttttatactgcatttttatggattattttgtaatgtgtgattccgtctgctgaggaggtgggaggggctccagggaaagccacccaccttcagtgaggttgctccccagctgagcgcaccgggcatgggatgtggaggctggcgacacaccctgtgcctctccaaggctgggcgcgtggggcgtccagagtctctctgggtctcagatgtccatctgccacctcttgttaaggctctagccagaagggagggtgagggtagaagaaagttattcccgaagaaaaaaagaatgaaaagtcattgtactgaactgtttttatatttttaaaagttactatttaaaggttggtttgattgttgcgtcttaattgcctctccccccagtttgccagtcccgccccccgccccccgggaaaacagccaggccactgttgctgtcacattctggagcctgggccagggccatttcccatcgatgtgagctcttctcatctcacagcattccctgcgctgcttccacccccttctccccttccagatacccagcatcgcagcagggatttcacaatcccatactgtgtcgcctcccatccaagcgccagggagggtggggggtaggagctaagacttcctctggacagatgggcagggcagagttcactgaggtgaaggaagaccacaggttaacaccaaagtattgtacagctgtcaatgcaaaacttttttggaaaaaaattaaacgtaatgaacttgaagcgaaa

SEQ ID NO: 152595 - protein, 184 aa, Artificial Sequence
  derived and/or modified sequence
MDRGEQGLLRTDPVPEEGEDVAATISATETLSEEEQEELRRELAKVEEEIQTLSQVLAAKEKHLAEIKRKLGINSLQELKQNIAKGWQDVTATSAYKKTSETLSQAGQKASAAFSSVGSVITKKLEDVKNSPTFKSFEEKVENLKSKVGGTKPAGGDFGEVLNSAANASATTTEPLPEKTQESL

SEQ ID NO: 152596 - DNA, 555 bp, Artificial Sequence
  derived and/or modified sequence
atggacagaggcgagcagggcctgctgagaaccgaccccgtgcccgaggagggcgaggacgtggccgccaccatcagcgccaccgagaccctgagcgaggaggagcaggaggagctgagaagagagctggccaaggtggaggaggagatccagaccctgagccaggtgctggccgccaaggagaagcacctggccgagatcaagagaaagctgggcatcaacagcctgcaggagctgaagcagaacatcgccaagggctggcaggacgtgaccgccaccagcgcctacaagaagaccagcgagaccctgagccaggccggccagaaggccagcgccgccttcagcagcgtgggcagcgtgatcaccaagaagctggaggacgtgaagaacagccccaccttcaagagcttcgaggagaaggtggagaacctgaagagcaaggtgggcggcaccaagcccgccggcggcgacttcggcgaggtgctgaacagcgccgccaacgccagcgccaccaccaccgagcccctgcccgagaagacccaggagagcctgtag

SEQ ID NO: 152597 - DNA, 555 bp, Artificial Sequence
  derived and/or modified sequence
atgaacagaagccagcccggcctgctgagaaccgaccccgtgcccgaggagggcgaggacgtggccgccaccatcagcgccaccgagaccctgagcgaggaggagcaggaggagctgagaagagagctggccaaggtggaggaggagatccagaccctgagccaggtgctggccgccaaggagaagcacctggccgagatcaagagaaagctgggcatcaacagcctgcaggagctgaagcagaacatcgccaagggctggcaggacgtgaccgccaccagcgcctacaagaagaccagcgagaccctgagccaggccggccagaaggccagcgccgccttcagcagcgtgggcagcgtgatcaccaagaagctggaggacgtgaagaacagccccaccttcaagagcttcgaggagaaggtggagaacctgaagagcaaggtgggcggcaccaagcccgccggcggcgacttcggcgaggtgctgaacagcgccgccaacgccagcgccaccaccaccgagcccctgcccgagaagacccaggagagcctgtag

SEQ ID NO: 152598 - DNA, 555 bp, Artificial Sequence
  derived and/or modified sequence
atggatcggggcgagcagggattgctccgcacagaccccgtccccgaggagggggaagacgtggctgccaccattagcgctaccgaaacgctctcagaggaagagcaagaagaactccggagggaacttgccaaggtcgaagaagagatccaaaccctaagccaagtgctcgcagccaaagagaaacatctcgctgagattaaacgtaagctggggattaatagcctccaggaactcaagcagaatatcgctaaggggtggcaggacgtcacagctacttctgcttataagaagacctctgagactctgagccaggcaggccagaaggcatcagccgccttctcctctgtaggcagcgttatcaccaagaaattggaggacgtgaaaaacagtcctacatttaagagtttcgaggaaaaggtcgagaacctgaagagtaaggtgggcggaaccaagcccgccggaggggattttggtgaagtgcttaactcggcagccaacgcctctgcaaccacaaccgaacctcttcccgagaagacccaggaatcactttag

SEQ ID NO: 152599 - DNA, 555 bp, Artificial Sequence
  derived and/or modified sequence
atgaatcggtcacaaccggggctgctccgaacggaccctgttcccgaggagggtgaggatgtggccgccaccatttcagcaacggagactctgagcgaggaggagcaggaagaacttaggagggagttagccaaggtggaggaagagattcagaccctctctcaggttctagcagcaaaggaaaagcatctcgccgagatcaaacgcaagctgggtattaacagccttcaagagttaaagcaaaacattgccaaagggtggcaggacgtcaccgccacttctgcttataaaaaaacctctgaaaccctgtctcaggcgggccaaaaggcctcggcggccttcagctcggtgggcagcgtcattacaaaaaaactggaggacgtcaagaattcacctactttcaaatcctttgaggagaaggtggagaatctcaaaagtaaggttggcggaaccaagccggccggcggcgactttggggaagtcttgaatagcgctgccaatgcctctgccaccacaacagagcctttgcccgagaaaactcaggagagcctctag

SEQ ID NO: 152600 - DNA, 555 bp, Artificial Sequence
  derived and/or modified sequence
atggacagaggagagcagggcctgctgaggacagatcctgtgcctgaggagggagaagatgtggccgccaccatcagcgccacagagaccctgtctgaggaggagcaggaggagctgcggcgggagctggccaaggtggaggaggagatccagaccctgagccaggtgctggccgccaaggagaagcacctggccgagatcaagaggaagctgggcatcaacagcctgcaggagctgaagcagaacatcgccaagggctggcaggatgtgacagccaccagcgcctacaagaagaccagcgagaccctgagccaggccggccagaaggccagcgctgccttcagctctgtgggcagcgtcatcaccaagaagctggaggatgtgaagaacagccccaccttcaagagctttgaggagaaggtggagaacctgaagagcaaggtgggcggcaccaagccagctggaggagactttggagaggtgctgaacagcgctgccaatgccagcgccaccaccacagagcccctgcctgagaagacccaggagagcctgtag

SEQ ID NO: 152601 - DNA, 3272 bp, Artificial Sequence
  derived and/or modified sequence
gcgggagtcgccggcggaggcgaggaggagctctgcgcggcgcggcgggcgatccgagccgggacgggctgcaggcgggggtgctgcagaggacacgaggcggcgggctggagacatggaccgcggcgagcaaggtctgctgagaacagacccagtccctgaggaaggagaagatgttgctgccacgatcagtgccacagagaccctctcggaagaggagcaggaagagctaagaagagaacttgcaaaggtagaagaagaaatccagactctgtctcaagtgttagcagcaaaagagaagcatctagcagagatcaagcggaaacttggaatcaattctctacaggaactaaaacagaacattgccaaagggtggcaagacgtgacagcaacatctgcttacaagaagacatctgaaaccttatcccaggctggacagaaggcctcagctgctttttcgtctgttggctcagtcatcaccaaaaagctggaagatgtaaaaaactccccaacttttaaatcatttgaagaaaaggtcgaaaacttaaagtctaaagtagggggaaccaagcctgctggtggtgattttggagaagtcttgaattcggctgcaaatgctagtgccaccaccacggagcctcttccagaaaagacacaggagagcctgtgagattcctacctttgttctgctacccactgccagatgctgcaagcgaggtccaagcacatcttgtcaacatgcattgccatgaatttctaccagatgtgcttttatttagctttacatattcctttgaccaaatagtttgtgggttaaacaaaatgaaaatatcttcacctctattcttgggaaacaccctttagtgtacatttatgttcctttatttaggaaacaccattataaaaacacttatagtaaatggggacattcactataatgatctaagaagctacagattgtcatagttgttttcctgctttacaaaattgctccagatctggaatgccagtttgacctttgtcttctataatatttcctttttttcccctctttgaatctctgtatatttgattcttaactaaaattgttctcttaaatattctgaatcctggtaattaaaagtttgggtgtattttctttacctccaaggaaagaactactagctacaaaaaatattttggaataagcattgttttggtataaggtacatattttggttgaagacaccagactgaagtaaacagctgtgcatccaatttattatagttttgtaagtaacaatatgtaatcaaacttctaggtgacttgagagtggaacctcctatatcattatttagcaccgtttgtgacagtaaccatttcagtgtattgtttattataccacttatatcaacttatttttcaccaggttaaaattttaatttctacaaaataacattctgaatcaagcacactgtatgttcagtaggttgaactatgaacactgtcatcaatgttcagttcaaaagcctgaaagtttagatctagaagctggtaaaaatgacaatatcaatcacattaggggaaccattgttgtcttcacttaatccatttagcactatttaaaataagcacaccaagttatatgactaatataacttgaaaattttttatactgaggggttggtgataactcttgaggatgtaatgcattaataaaaatcaactcatcattttctacttgttttcaatgtgttggaaactgtaaaatgatactgtagaacctgtctcctactttgaaaactgaatgtcagggctgagtgaatcaaagtgtctagacatatttgcatagaggccaaggtattctattctaataactgcttactcaacactaccaccttttccttatactgtatatgattatggcctacaatgttgtatttgttatttattaaattgtgattgttttattattgtttatgccaaatgttaactgccaagcttggagtgacctaaagcattttttaaaagcatggctagatttacttcagtataaattatcttatgaaaaccaaattttaaaagccacaggtgttgattgttataaaataacatgctgccattcttgattgctagagtttttgttagtactttggatgcaattaaaactatgtgctatcacatgtgaaaagcttaataaattccatctatcagtagtataggtctcaatatttattatgagaccagtggtctggaaacagcttgttgtaccgaatcaactggagtctatgcttaaaaaaaaaaaatttttttttaaccatccttaaattattgcttaatggtatcatattaacatattctaaataagggctttaaggcacaggctgttgaagcattttctcagaggagtggatctgtagaagtctgtctttctatagaaatattgtgcttactcaagtgttaaattattttttctatgaactagtctacttcttaaaattcaaacatattcttttgatcacattgtttcttgagcatcctgccctgctactaacttttcaacaaggcaaaatggagtaaagtggcaatttctttagatgagtgaaataccctcaagtctcttttctgcccaaaaagggaaaagtgatagaaatgggggtggcaagtggggtgagtggatgaaggtgggtattgggggtggctgtgaaagaaaataatggagaatcacttttctagacatctacctatacttaatctaagaaacaaagtaatctactgtaaagtactctgccccttgaaagaagtattaaaaagagtgaggatggatttagaaaaaaacatgaatttagaaatattcaaaatggtttttgtggcagattcaatattatgaattcacagatatttaaagaatgagaaacatagtaattagtagaaatgccagaaacagttcctggttcctcttgtgtttgacactaagaaaatagcaagagtgtgaaatctcagatacttatgaaatctcacagatgtaaggactcaagtgtagaagaaaatatccccttcttacaaaaagaaatgtcaatttatggagtttgtgggaaatagggcaagaattcttatgcttatgagagccaagtagtcagtggaagagagtagagctcaaaactggattatcaccttagcaacttagaatagtttgaaatagaaaaaaagtatttaatttggatctggatctgttaagatatgcacagtctattttttgtatagtattggaaaataaaaatgctataatttg

SEQ ID NO: 152602 - DNA, 555 bp, Artificial Sequence
  derived and/or modified sequence
atgaacagaagccagcccggcctgctgaggacagatcctgtgcctgaggagggagaagatgtggccgccaccatcagcgccacagagaccctgtctgaggaggagcaggaggagctgcggcgggagctggccaaggtggaggaggagatccagaccctgagccaggtgctggccgccaaggagaagcacctggccgagatcaagaggaagctgggcatcaacagcctgcaggagctgaagcagaacatcgccaagggctggcaggatgtgacagccaccagcgcctacaagaagaccagcgagaccctgagccaggccggccagaaggccagcgctgccttcagctctgtgggcagcgtcatcaccaagaagctggaggatgtgaagaacagccccaccttcaagagctttgaggagaaggtggagaacctgaagagcaaggtgggcggcaccaagccagctggaggagactttggagaggtgctgaacagcgctgccaatgccagcgccaccaccacagagcccctgcctgagaagacccaggagagcctgtag

SEQ ID NO: 152603 - DNA, 555 bp, Artificial Sequence
  derived and/or modified sequence
atggaccggggcgagcagggcctgctgcggaccgaccccgtgcccgaggaaggcgaggacgttgctgccactattagtgctactgagacactctctgaagaggaacaggaagaactgagacgggagctagcaaaagtggaggaggagatccagacccttagtcaagtcctggccgctaaggagaaacatttggccgagatcaaacggaagctaggtatcaacagtctccaggaattgaaacagaatatcgccaaagggtggcaggatgttactgctacaagcgcatacaagaagactagcgaaacactcagccaggctggacaaaaagcatcggccgccttttcctccgttggttctgtcatcaccaagaaactcgaggacgtaaaaaacagccctacctttaaaagctttgaggagaaggtggaaaaccttaagtccaaggtgggcggtacaaagccagctggtggtgacttcggtgaggtcctgaatagcgcagcgaacgcttcagccaccactaccgaaccactacctgagaagactcaggagagtttatag

SEQ ID NO: 152604 - DNA, 555 bp, Artificial Sequence
  derived and/or modified sequence
atgaaccggagccagcccggcctgctgcggaccgaccccgtgcccgaggagggcgaggatgtagccgcaacaattagtgccaccgaaacgctgtctgaggaggaacaggaagagctgcgtagggaactggccaaagtggaagaggaaatccagactcttagccaggtgctagcagccaaggaaaagcatctggccgaaattaagcgtaagctggggataaactccctgcaggagctgaagcagaacatcgctaagggatggcaggacgtcacagcaacaagcgcctataaaaagacatcagagacattatctcaggctggccagaaagcatcagccgcttttagctctgtggggtccgtgatcactaagaagctggaagatgtgaagaacagccccacttttaaaagttttgaagaaaaggttgagaacctcaagtctaaagtgggtggcactaaaccagccgggggagatttcggcgaagtattgaattccgccgcaaatgccagcgctactacaacagaacccctgcctgagaagacacaagagtcactatag

SEQ ID NO: 152605 - DNA, 555 bp, Artificial Sequence
  derived and/or modified sequence
atggataggggagagcaggggttactgcgaacagaccctgtgccagaggaaggggaagatgtcgctgccaccatctccgccaccgagacgctgagcgaggaagagcaggaggagcttaggagagagttagccaaggtggaggaggagatccaaacactgtcccaggtactcgccgcaaaggaaaaacatctcgccgagatcaagcgcaaactggggataaattcactacaggagctgaaacaaaacatcgctaaaggctggcaagatgtgaccgccacctcggcctacaagaagactagcgaaaccttaagtcaggcagggcagaaggcgtccgccgcatttagcagtgtgggcagcgtgattactaagaagctggaggatgtgaagaattcccccacgtttaaaagctttgaggagaaagtagaaaatctcaaatcaaaggtgggcggtaccaaaccagcagggggagatttcggagaggtactgaattccgctgcaaatgcctccgccaccaccaccgaaccccttccagagaaaacccaggaatctctgtag

SEQ ID NO: 152606 - DNA, 2080 bp, Artificial Sequence
  derived and/or modified sequence
atgaacagaagccaaccaggtctgctgagaacagacccagtccctgaggaaggagaagatgttgctgccacgatcagtgccacagagaccctctcggaagaggagcaggaagagctaagaagagaacttgcaaaggtagaagaagaaatccagactctgtctcaagtgttagcagcaaaagagaagcatctagcagagatcaagcggaaacttggaatcaattctctacaggaactaaaacagaacattgccaaagggtggcaagacgtgacagcaacatctgcttacaagaagacatctgaaaccttatcccaggctggacagaaggcctcagctgctttttcgtctgttggctcagtcatcaccaaaaagctggaagatgtaaaaaactccccaacttttaaatcatttgaagaaaaggtcgaaaacttaaagtctaaagtagggggaaccaagcctgctggtggtgattttggagaagtcttgaattcggctgcaaatgctagtgccaccaccacggagcctcttccagaaaagacacaggagagcctgtgagattcctacctttgttctgctacccactgccagatgctgcaagcgaggtccaagcacatcttgtcaacatgcattgccatgaatttctaccagatgtgcttttatttagctttacatattcctttgaccaaatagtttgtgggttaaacaaaatgaaaatatcttcacctctattcttgggaaacaccctttagtgtacatttatgttcctttatttaggaaacaccattataaaaacacttatagtaaatggggacattcactataatgatctaagaagctacagattgtcatagttgttttcctgctttacaaaattgctccagatctggaatgccagtttgacctttgtcttctataatatttcctttttttcccctctttgaatctctgtatatttgattcttaactaaaattgttctcttaaatattctgaatcctggtaattaaaagtttgggtgtattttctttacctccaaggaaagaactactagctacaaaaaatattttggaataagcattgttttggtataaggtacatattttggttgaagacaccagactgaagtaaacagctgtgcatccaatttattatagttttgtaagtaacaatatgtaatcaaacttctaggtgacttgagagtggaacctcctatatcattatttagcaccgtttgtgacagtaaccatttcagtgtattgtttattataccacttatatcaacttatttttcaccaggttaaaattttaatttctacaaaataacattctgaatcaagcacactgtatgttcagtaggttgaactatgaacactgtcatcaatgttcagttcaaaagcctgaaagtttagatctagaagctggtaaaaatgacaatatcaatcacattaggggaaccattgttgtcttcacttaatccatttagcactatttaaaataagcacaccaagttatatgactaatataacttgaaaattttttatactgaggggttggtgataactcttgaggatgtaatgcattaataaaaatcaactcatcattttctacttgttttcaatgtgttggaaactgtaaaatgatactgtagaacctgtctcctactttgaaaactgaatgtcagggctgagtgaatcaaagtgtctagacatatttgcatagaggccaaggtattctattctaataactgcttactcaacactaccaccttttccttatactgtatatgattatggcctacaatgttgtatttgttatttattaaattgtgattgttttattattgtttatgccaaatgttaactgccaagcttggagtgacctaaagcattttttaaaagcatggctagatttacttcagtataaattatcttatgaaaaccaaattttaaaagccacaggtgttgattgttataaaataacatgctgccattcttgattgctagagtttttgttagtactttggatgcaattaaaactatgtgctatcacatgtgaaaagcttaataaattccatctatcagt

SEQ ID NO: 152607 - DNA, 555 bp, Artificial Sequence
  derived and/or modified sequence
atgaatagaagccagcctggcctgctcagaaccgatcccgtaccagaggaaggtgaggatgtagccgctactatctccgcgacggaaactcttagcgaggaagaacaggaggagctacgacgcgagctggctaaggtcgaggaggagatccagaccttaagtcaagtactcgccgcaaaagaaaaacatctcgctgaaattaagcgaaagctcggcatcaatagcttacaggagctgaaacagaatatcgcaaaaggctggcaggacgtgacggcaacaagcgcctacaaaaagacatccgagacgttgtcccaggctggccaaaaggcctctgctgcttttagttccgtcggtagcgttattaccaagaaactggaagatgtgaaaaactccccaactttcaagtctttcgaggaaaaggtggagaatcttaagtcaaaagtggggggtacgaagcctgccggaggagattttggcgaagtattgaactcagccgcaaacgcctccgcaacaacaactgagccactacctgaaaagacacaagagtctctgtag

SEQ ID NO: 152608 - protein, 261 aa, Artificial Sequence
  derived and/or modified sequence
MVVVAAAPNPADGTPKVLLLSGQPASAAGAPAGQALPLMVPAQRGASPEAASGGLPQARKRQRLTHLSPEEKALRRKLKNRVAAQTARDRKKARMSELEQQVVDLEEENQKLLLENQLLREKTHGLVVENQELRQRLGMDALVAEEEAEAKGNEVRPVAGSAESAALRLRAPLQQVQAQLSPLQNISPWILAVLTLQIQSLISCWAFWTTWTQSCSSNALPQSLPAWRSSQRSTQKDPVPYQPPFLCQWGRHQPSWKPLMN

SEQ ID NO: 152609 - protein, 266 aa, Artificial Sequence
  derived and/or modified sequence
MVVVAAAPNPADGTPKVLLLSGQPASAAGAPAGQALPLMVPAQRGASPEAASGGLPQARKRQRLTHLSPEEKALRRKLKNRVAAQTARDRKKARMSELEQQVVDLEEEVKLLKNQKLLLENQLLREKTHGLVVENQELRQRLGMDALVAEEEAEAKGNEVRPVAGSAESAALRLRAPLQQVQAQLSPLQNISPWILAVLTLQIQSLISCWAFWTTWTQSCSSNALPQSLPAWRSSQRSTQKDPVPYQPPFLCQWGRHQPSWKPLMN

SEQ ID NO: 152610 - protein, 211 aa, Artificial Sequence
  derived and/or modified sequence
MRAPVFQALLLCGRRLVVQPLNSDMRKLKNRVAAQTARDRKKARMSELEQQVVDLEEENQKLLLENQLLREKTHGLVVENQELRQRLGMDALVAEEEAEAKGNEVRPVAGSAESAALRLRAPLQQVQAQLSPLQNISPWILAVLTLQIQSLISCWAFWTTWTQSCSSNALPQSLPAWRSSQRSTQKDPVPYQPPFLCQWGRHQPSWKPLMN

SEQ ID NO: 152611 - DNA, 801 bp, Artificial Sequence
  derived and/or modified sequence
atggtggtggtggccgccgcccccaaccccgccgacggcacccccaaggtgctgctgctgagcggccagcccgccagcgccgccggcgcccccgccggccaggccctgcccctgatggtgcccgcccagagaggcgccagccccgaggccgccagcggcggcctgccccaggccagaaagagacagagactgacccacctgagccccgaggagaaggccctgagaagaaagctgaagaacagagtggccgcccagaccgccagagacagaaagaaggccagaatgagcgagctggagcagcaggtggtggacctggaggaggaggtgaagctgctgaagaaccagaagctgctgctggagaaccagctgctgagagagaagacccacggcctggtggtggagaaccaggagctgagacagagactgggcatggacgccctggtggccgaggaggaggccgaggccaagggcaacgaggtgagacccgtggccggcagcgccgagagcgccgccctgagactgagagcccccctgcagcaggtgcaggcccagctgagccccctgcagaacatcagcccctggatcctggccgtgctgaccctgcagatccagagcctgatcagctgctgggccttctggaccacctggacccagagctgcagcagcaacgccctgccccagagcctgcccgcctggagaagcagccagagaagcacccagaaggaccccgtgccctaccagccccccttcctgtgccagtggggcagacaccagcccagctggaagcccctgatgaactag

SEQ ID NO: 152612 - DNA, 636 bp, Artificial Sequence
  derived and/or modified sequence
atgagagcccccgtgttccaggccctgctgctgtgcggcagaagactggtggtgcagcccctgaacagcgacatgagaaagctgaagaacagagtggccgcccagaccgccagagacagaaagaaggccagaatgagcgagctggagcagcaggtggtggacctggaggaggagaaccagaagctgctgctggagaaccagctgctgagagagaagacccacggcctggtggtggagaaccaggagctgagacagagactgggcatggacgccctggtggccgaggaggaggccgaggccaagggcaacgaggtgagacccgtggccggcagcgccgagagcgccgccctgagactgagagcccccctgcagcaggtgcaggcccagctgagccccctgcagaacatcagcccctggatcctggccgtgctgaccctgcagatccagagcctgatcagctgctgggccttctggaccacctggacccagagctgcagcagcaacgccctgccccagagcctgcccgcctggagaagcagccagagaagcacccagaaggaccccgtgccctaccagccccccttcctgtgccagtggggcagacaccagcccagctggaagcccctgatgaactag

SEQ ID NO: 152613 - DNA, 801 bp, Artificial Sequence
  derived and/or modified sequence
atggttgtggtcgcagctgcccccaaccccgccgatggcaccccaaaggtgcttttgctaagtggtcagccggctagcgccgctggtgcgccggctgggcaggccctgccgctgatggttcctgcccagcggggtgcaagccccgaggctgcctccgggggattgcctcaagcccgcaaaagacagagattgacccacctcagcccagaggaaaaggcgctgagacgaaaactcaagaatcgggtcgctgcccaaaccgctcgggatcgaaaaaaagccaggatgtctgagctggaacaacaggtggttgacttggaggaagaagtaaagctgttgaagaatcagaaactgctactagaaaaccagcttctgcgagagaaaacacacggactggtggtggaaaaccaggagctgcgccagaggctcggaatggacgcacttgttgctgaggaggaagctgaggcaaaaggtaacgaggtgcggccagtggccggctcagcagagtcagctgcacttaggctgcgggcgccactgcagcaggtgcaagcccagctttcgcctctacagaacatcagtccttggattctcgcagtgctgactctccagattcagtccctcattagctgttgggctttttggacgacttggacccaaagctgctcatcgaacgccctcccccagagcctgccggcctggaggtcgtcccagcgctccactcagaaagatccagtcccctatcaaccgcccttcctgtgccagtggggtcgccatcagcctagctggaagcctcttatgaattag

SEQ ID NO: 152614 - DNA, 636 bp, Artificial Sequence
  derived and/or modified sequence
atgcgcgcccccgtcttccaagcactgctgctttgtggcagacgcctggtggtccagccattgaactcggacatgaggaaactgaaaaaccgcgttgcagctcaaacggccagggatcggaagaaggcgagaatgtctgaactcgaacaacaagtagtcgatctggaggaggaaaaccagaagctgttgctagagaaccagctcctccgggaaaaaacccacggtttggtggtagagaaccaggaactgcggcagcgtctaggaatggacgccctggttgctgaagaggaggccgaggccaagggaaacgaggtgaggcctgttgctggaagtgctgagtccgccgccctgcgcctgagagcgccactccagcaggtccaggcacagctctcaccactacaaaatatctcgccctggatactggctgtgctcactctccaaatccaatctctaattagttgctgggctttctggactacctggacacaaagctgcagcagcaatgccctgccgcaatccctgccagcctggaggtcatcccagaggtctacccagaaagatccggtgccttaccagccaccattcctatgccagtggggtagacaccagccaagctggaagccattgatgaattag

SEQ ID NO: 152615 - DNA, 801 bp, Artificial Sequence
  derived and/or modified sequence
atggtggtggtggccgccgcccccaacccagcagatggcacccccaaggtgctgctgctgagcggccagcctgccagcgctgctggggccccagctggccaggccctgcccctgatggtgcctgcccagagaggagccagccctgaggccgccagcggcggcctgccccaggccaggaagaggcagaggctgacccacctgagccctgaggagaaggccctgcggaggaagctgaagaacagagtggccgcccagacagcccgggacaggaagaaggccaggatgtctgagctggagcagcaggtggtggacctggaggaggaggtgaagctgctgaagaaccagaagctgctgctggagaaccagctgctgcgggagaagacccacggcctggtggtggagaaccaggagctgcggcagaggctgggcatggatgccctggtggccgaggaggaggccgaggccaagggaaatgaggtgcggcctgtggccggcagcgctgagagcgctgccctgcggctgcgggcccccctgcagcaggtgcaggcccagctgagccccctgcagaacatcagcccctggatcctggccgtgctgaccctgcagatccagagcctcatcagctgctgggccttctggaccacctggacccagagctgcagcagcaatgccctgccccagagcctgcctgcctggaggagcagccagaggagcacccagaaggaccctgtgccctaccagccccccttcctgtgccagtggggccgccaccagcccagctggaagcccctgatgaactag

SEQ ID NO: 152616 - DNA, 636 bp, Artificial Sequence
  derived and/or modified sequence
atgagggcccctgtgttccaggccctgctgctgtgtggccggcggctggtggtgcagcccctgaacagcgacatgaggaagctgaagaacagagtggccgcccagacagcccgggacaggaagaaggccaggatgtctgagctggagcagcaggtggtggacctggaggaggagaaccagaagctgctgctggagaaccagctgctgcgggagaagacccacggcctggtggtggagaaccaggagctgcggcagaggctgggcatggatgccctggtggccgaggaggaggccgaggccaagggaaatgaggtgcggcctgtggccggcagcgctgagagcgctgccctgcggctgcgggcccccctgcagcaggtgcaggcccagctgagccccctgcagaacatcagcccctggatcctggccgtgctgaccctgcagatccagagcctcatcagctgctgggccttctggaccacctggacccagagctgcagcagcaatgccctgccccagagcctgcctgcctggaggagcagccagaggagcacccagaaggaccctgtgccctaccagccccccttcctgtgccagtggggccgccaccagcccagctggaagcccctgatgaactag

SEQ ID NO: 152617 - DNA, 801 bp, Artificial Sequence
  derived and/or modified sequence
atggtggtggtggccgccgcccccaaccccgccgacggcacccccaaagtgctcctgctgtctgggcagcccgcgagcgccgctggcgcccctgctggccaggcgctgcccctgatggtcccagcccagcgaggcgcatctcctgaagcggcctcaggaggactgcctcaagcgcgcaagcgccagcggcttacacatctgtcccccgaagagaaggcccttagaagaaagctgaagaatagggtggccgcgcaaaccgcacgtgaccgcaagaaggctcggatgtcggagctagagcaacaggttgtcgacttggaggaggaggtgaagctacttaagaaccagaaactgctgcttgagaaccaacttttgcgcgaaaagacacatggattagtcgtagagaatcaggaattgcgacagcgattgggcatggacgccctggttgccgaagaggaggctgaggccaaggggaatgaggtgcgccccgttgctggttcagccgaatctgccgcattgcgcctgcgggcgcctcttcaacaagtgcaagctcaactgtccccactgcagaatatctccccttggattctggctgttctcacgcttcagatacagtcgctaatcagttgttgggcattttggactacatggacccaatcctgctctagcaatgccctgccgcagtctctacccgcctggcgtagcagtcagcggtccacacagaaagatcctgttccttatcaaccaccttttctctgtcagtggggccgacaccagccctcgtggaagccattgatgaattag

SEQ ID NO: 152618 - DNA, 636 bp, Artificial Sequence
  derived and/or modified sequence
atgcgggcccccgtgttccaggccctgctgctgtgcggccggcggctggttgtgcaacccctgaattccgacatgcggaagctgaaaaatcgagtggcagcccaaactgccagagacagaaagaaggctagaatgtctgaacttgagcagcaggttgttgacctcgaggaggagaaccagaagctgctgcttgagaaccagctgctcagagaaaaaactcatggactggttgtcgaaaatcaggagctgagacaaagacttggcatggacgccctcgttgcggaagaagaagccgaggcaaaggggaacgaagtcaggcctgttgcaggctctgctgagtcagctgccctgcgcttgcgggccccacttcagcaggttcaagcacagttatcaccactgcagaatatttcaccctggattctggctgtgctaactttgcaaatccagtccctgatatcttgttgggcattttggacgacttggacacaatcctgttcttcaaatgcactgcctcagtcgctgcccgcctggaggagctcccagagatcaactcagaaagacccagtgccatatcagccgccctttctgtgtcagtgggggagacatcagccatcgtggaaacctctgatgaattag

SEQ ID NO: 152619 - DNA, 801 bp, Artificial Sequence
  derived and/or modified sequence
atggtcgtggtcgccgctgcacctaatcccgcagatggcacccctaaagtcctgctgctcagcggccagcctgcctctgccgctggggctcccgcaggccaggcgttgccattgatggtgcctgcgcagcgaggagcatctcccgaggctgctagcggtgggctaccgcaggctcgtaagaggcagcgccttacccacctgagtccggaggaaaaggccctcagacgcaaactgaaaaatagggtcgcggctcagacagcccgtgaccggaagaaagctcggatgtcagagctggaacagcaagttgtggatctcgaggaggaggtgaaactcctcaaaaaccagaagctcttactcgaaaaccagctgctccgtgaaaagacacacgggttggttgtggaaaatcaggaattacgtcagaggcttggaatggacgctctggtggctgaggaagaggctgaggccaaggggaatgaagtacgtccagtcgcaggtagtgccgagagtgccgcactgcggttgcgggcaccactgcaacaagtacaggcacagctgagccctttgcagaatattagtccttggattttggctgtgctgaccttgcagatccagtccctgataagctgctgggctttctggactacatggacacaaagctgtagcagcaacgcacttccccagtctttgcccgcttggcgttctagccagaggtctacacaaaaggacccagtaccctatcagcctccgttcttgtgccagtggggaagacatcagccctcttggaagcccctgatgaactag

SEQ ID NO: 152620 - DNA, 636 bp, Artificial Sequence
  derived and/or modified sequence
atgcgtgctccggtgttccaggctctgctgctgtgtgggaggcggttggtggtgcagccacttaactccgacatgcgtaaattgaagaatcgggtggcagcccaaactgcgagagatcggaagaaggccaggatgagtgagctcgagcagcaggtggttgatctcgaagaagaaaatcagaagctcttgctcgagaaccagctgctgcgggagaagacccatggcttggtggtggagaaccaggaactgcgacagagacttggtatggacgccctggtggccgaagaagaagcggaagctaagggaaacgaagtgaggcccgtagcaggtagtgctgagtccgctgctttacgcctgcgggcaccactacagcaggtgcaggctcagctgtcgcccctgcagaacatctccccatggatcctggccgtattgacactgcagatccagagcctcattagctgctgggccttttggactacatggacccagtcctgctctagcaacgccctccctcagagcttgccagcgtggaggagtagccagagaagtacccagaaagacccagtgccataccagcctccatttctgtgccaatggggacggcaccagcctagctggaagccgcttatgaactag

SEQ ID NO: 152621 - DNA, 1850 bp, Artificial Sequence
  derived and/or modified sequence
agaaaggccgggcgcggcgaggctgggcgctgggcggctgcggcgcgcggtgcgcggtgcgtagtctggagctatggtggtggtggcagccgcgccgaacccggccgacgggacccctaaagttctgcttctgtcggggcagcccgcctccgccgccggagccccggccggccaggccctgccgctcatggtgccagcccagagaggggccagcccggaggcagcgagcggggggctgccccaggcgcgcaagcgacagcgcctcacgcacctgagccccgaggagaaggcgctgaggaggaaactgaaaaacagagtagcagctcagactgccagagatcgaaagaaggctcgaatgagtgagctggaacagcaagtggtagatttagaagaagagaaccaaaaacttttgctagaaaatcagcttttacgagagaaaactcatggccttgtagttgagaaccaggagttaagacagcgcttggggatggatgccctggttgctgaagaggaggcggaagccaaggggaatgaagtgaggccagtggccgggtctgctgagtccgcagcactcagactacgtgcacctctgcagcaggtgcaggcccagttgtcacccctccagaacatctccccatggattctggcggtattgactcttcagattcagagtctgatatcctgttgggcattctggacaacttggacccagtcatgttcttcaaatgcccttccccagagcctgccagcctggaggagctcccagaggtctacccagaaggacccagttccttaccagcctccctttctctgtcagtggggacgtcatcagccaagctggaagccattaatgaactaattcgttttgaccacatatataccaagcccctagtcttagagataccctctgagacagagagccaagctaatgtggtagtgaaaatcgaggaagcacctctcagcccctcagagaatgatcaccctgaattcattgtctcagtgaaggaagaacctgtagaagatgacctcgttccggagctgggtatctcaaatctgctttcatccagccactgcccaaagccatcttcctgcctactggatgcttacagtgactgtggatacgggggttccctttccccattcagtgacatgtcctctctgcttggtgtaaaccattcttgggaggacacttttgccaatgaactctttccccagctgattagtgtctaaggaatgatccaatactgttgcccttttccttgactattacactgcctggaggatagcagagaagcctgtctgtacttcattcaaaaagccaaaatagagagtatacagtcctagagaattcctctatttgttcagatctcatagatgacccccaggtattgtcttttgacatccagcagtccaaggtattgagacatattactggaagtaagaaatattactataattgagaactacagcttttaagattgtacttttatcttaaaagggtggtagttttccctaaaatacttattatgtaagggtcattagacaaatgtcttgaagtagacatggaatttatgaatggttctttatcatttctcttccccctttttggcatcctggcttgcctccagttttaggtcctttagtttgcttctgtaagcaacgggaacacctgctgagggggctctttccctcatgtatacttcaagtaagatcaagaatcttttgtgaaattatagaaatttactatgtaaatgcttgatggaattttttcctgctagtgtagcttctgaaaggtgctttctccatttatttaaaactacccatgcaattaaaaggtacaatgcagcatc

SEQ ID NO: 152622 - DNA, 1824 bp, Artificial Sequence
  derived and/or modified sequence
gcggcgcgcggtgcgcggtgcgtagtctggagctatggtggtggtggcagccgcgccgaacccggccgacgggacccctaaagttctgcttctgtcggggcagcccgcctccgccgccggagccccggccggccaggccctgccgctcatggtgccagcccagagaggggccagcccggaggcagcgagcggggggctgccccaggcgcgcaagcgacagcgcctcacgcacctgagccccgaggagaaggcgctgaggaggaaactgaaaaacagagtagcagctcagactgccagagatcgaaagaaggctcgaatgagtgagctggaacagcaagtggtagatttagaagaagaggtaaaactacttaagaaccaaaaacttttgctagaaaatcagcttttacgagagaaaactcatggccttgtagttgagaaccaggagttaagacagcgcttggggatggatgccctggttgctgaagaggaggcggaagccaaggggaatgaagtgaggccagtggccgggtctgctgagtccgcagcactcagactacgtgcacctctgcagcaggtgcaggcccagttgtcacccctccagaacatctccccatggattctggcggtattgactcttcagattcagagtctgatatcctgttgggcattctggacaacttggacccagtcatgttcttcaaatgcccttccccagagcctgccagcctggaggagctcccagaggtctacccagaaggacccagttccttaccagcctccctttctctgtcagtggggacgtcatcagccaagctggaagccattaatgaactaattcgttttgaccacatatataccaagcccctagtcttagagataccctctgagacagagagccaagctaatgtggtagtgaaaatcgaggaagcacctctcagcccctcagagaatgatcaccctgaattcattgtctcagtgaaggaagaacctgtagaagatgacctcgttccggagctgggtatctcaaatctgctttcatccagccactgcccaaagccatcttcctgcctactggatgcttacagtgactgtggatacgggggttccctttccccattcagtgacatgtcctctctgcttggtgtaaaccattcttgggaggacacttttgccaatgaactctttccccagctgattagtgtctaaggaatgatccaatactgttgcccttttccttgactattacactgcctggaggatagcagagaagcctgtctgtacttcattcaaaaagccaaaatagagagtatacagtcctagagaattcctctatttgttcagatctcatagatgacccccaggtattgtcttttgacatccagcagtccaaggtattgagacatattactggaagtaagaaatattactataattgagaactacagcttttaagattgtacttttatcttaaaagggtggtagttttccctaaaatacttattatgtaagggtcattagacaaatgtcttgaagtagacatggaatttatgaatggttctttatcatttctcttccccctttttggcatcctggcttgcctccagttttaggtcctttagtttgcttctgtaagcaacgggaacacctgctgagggggctctttccctcatgtatacttcaagtaagatcaagaatcttttgtgaaattatagaaatttactatgtaaatgcttgatggaattttttcctgctagtgtagcttctgaaaggtgctttctccatttatttaaaactacccatgcaattaaaaggtacaatgcagca

SEQ ID NO: 152623 - DNA, 786 bp, Artificial Sequence
  derived and/or modified sequence
atggtggtggtggctgccgctccgaatccagccgatggtaccccgaaggtgctgctgctcagcgggcagcccgcgtctgccgcgggggcccccgccggccaggcattgcctttgatggtgccggctcagagaggcgcatctcctgaggccgccagcgggggactgccacaggccagaaagcgtcaaagattaacccatctgtctccagaggagaaggcgctccgccgcaagctaaagaacagagtcgctgctcagaccgctcgggatcggaaaaaggctagaatgtctgaattggagcagcaggtggtagatctcgaagaagagaaccagaaattgctgctggaaaatcagcttctgagagagaagacgcatggactcgtggtggagaatcaagagctgcgccagcgacttggtatggacgccctcgtcgcagaagaagaggccgaggccaagggaaacgaggtacgccctgtggccgggtccgccgagtcggctgccctgagactgagggcccccctgcagcaggtgcaagcccagcttagcccactccagaatatttctccatggatcctggctgtcttgacgctccagattcaaagcctgatatcctgttgggccttttggacgacgtggacccagagttgctcatccaacgctctgccacaaagtctgccagcttggcgcagctcccagcgatctacgcaaaaagacccagtcccttatcagcctcccttcttatgtcagtggggcaggcatcaaccatcctggaaaccactcatgaactag

SEQ ID NO: 152624 - DNA, 786 bp, Artificial Sequence
  derived and/or modified sequence
atggtggtggtggccgccgcccccaacccagcagatggcacccccaaggtgctgctgctgagcggccagcctgccagcgctgctggggccccagctggccaggccctgcccctgatggtgcctgcccagagaggagccagccctgaggccgccagcggcggcctgccccaggccaggaagaggcagaggctgacccacctgagccctgaggagaaggccctgcggaggaagctgaagaacagagtggccgcccagacagcccgggacaggaagaaggccaggatgtctgagctggagcagcaggtggtggacctggaggaggagaaccagaagctgctgctggagaaccagctgctgcgggagaagacccacggcctggtggtggagaaccaggagctgcggcagaggctgggcatggatgccctggtggccgaggaggaggccgaggccaagggaaatgaggtgcggcctgtggccggcagcgctgagagcgctgccctgcggctgcgggcccccctgcagcaggtgcaggcccagctgagccccctgcagaacatcagcccctggatcctggccgtgctgaccctgcagatccagagcctcatcagctgctgggccttctggaccacctggacccagagctgcagcagcaatgccctgccccagagcctgcctgcctggaggagcagccagaggagcacccagaaggaccctgtgccctaccagccccccttcctgtgccagtggggccgccaccagcccagctggaagcccctgatgaactag

SEQ ID NO: 152625 - DNA, 786 bp, Artificial Sequence
  derived and/or modified sequence
atggtggtggtggccgccgcccccaaccccgccgacggcacccccaaggtgctcctactctcagggcagcccgcctccgctgctggcgctccagccggtcaggcacttcccctgatggtccctgcgcagcggggcgcctcccctgaagcagcatctgggggcttgccacaggcaagaaagagacagcgactgacgcatctgagcccagaagagaaggctctccggcgaaagttgaagaacagagtcgctgcccaaacggcccgggatagaaaaaaagcccggatgagcgagcttgagcagcaagttgttgacctggaggaggagaaccaaaaactgctgttagaaaatcagctgctgcgcgagaagacgcatggcttagtcgtcgagaatcaggagctacgacagagattaggaatggatgctctggtggctgaagaagaagccgaagctaagggaaatgaggttcgtccagtggcgggtagtgctgagagcgcagccctccggttgagagcacctcttcagcaggtgcaggcgcaactaagccccctgcagaacattagcccctggatcttagcagtgttgaccctgcagatccagagcctgatctcctgttgggcgttttggaccacgtggacccagtcctgcagtagtaacgctctaccacagtccttgcccgcctggagatccagtcagcggtccacccagaaagatcccgtaccttatcagccccctttcctgtgtcaatggggtaggcaccagcctagctggaaaccgttgatgaattag

SEQ ID NO: 152626 - DNA, 786 bp, Artificial Sequence
  derived and/or modified sequence
atggtggtagtagccgctgctcccaaccctgctgacggaacccctaaggtcctcctgttgtcaggacagccagcatccgctgcaggagcccctgcaggccaggcactcccccttatggtgcctgcacagcgcggtgcttctccagaagcggcttccggaggcctccctcaagcacgcaagaggcagcggctgacccacctcagcccagaggaaaaggccctgcgcagaaagctaaaaaatagagtcgccgcacagaccgctcgggatcggaaaaaggctaggatgagcgagttggaacagcaagtggtggacctcgaagaggagaaccaaaagctcctcctggaaaaccagcttcttcgtgagaagacgcacggcttggtagtagagaatcaagagctgcgccaaaggctgggcatggacgccttggtggccgaggaggaagcggaagctaaaggtaatgaggttaggccagttgccggaagcgcagaaagtgccgcactcagactgcgggctccactccagcaagtgcaagcccaactttcgcccctgcagaatatctccccctggatcttggcagtcctgactctccagattcaatccctaatttcatgctgggccttctggacgacctggactcagagttgtagctcaaatgcactgccccaatccctgcccgcttggaggagttcccagagatctacgcagaaagatcctgttccatatcagccaccattcctgtgccaatgggggcgacaccagcctagctggaagcccttaatgaattag

SEQ ID NO: 152627 - DNA, 786 bp, Artificial Sequence
  derived and/or modified sequence
atggtagttgtggccgccgcccccaaccccgccgatggaacgccaaaggttctgttgctgtcaggccaaccagcatcagccgccggcgctcccgccggacaggccctccccctcatggttcccgcccaaaggggtgcctctcctgaagcggcctcaggcggactgccccaggcaagaaagcggcaaaggctgacccatctctccccagaggagaaagctcttagacgcaaattgaaaaaccgtgttgcagctcaaacagctagggatcggaaaaaggcaagaatgtctgaattagaacagcaagtcgtggatctggaggaagaaaaccaaaagctcctcctggagaaccaactgctgcgcgagaagactcatgggctggtagtggaaaaccaagagttgagacaaaggttaggaatggatgccttagtagcagaagaggaagccgaggctaaaggaaatgaggttcgccccgttgcaggctcagctgaatcagcagcattgcgcttgcgcgcaccattgcagcaggtccaggcacagctgtctccgctccaaaacataagcccctggatcctcgccgttttgactctgcagatccaatcgttgatcagctgctgggcattttggaccacctggacccagtcctgttcctcaaatgctcttcctcagtcactgcctgcttggcgctctagccagaggtccacgcagaaggaccccgtcccatatcagccccctttcctctgtcagtgggggcgacaccagccaagctggaaaccccttatgaattag

SEQ ID NO: 152628 - DNA, 786 bp, Artificial Sequence
  derived and/or modified sequence
atggtagttgtggccgccgcccccaaccccgccgatggaacgccaaaggttctgttgctgtcaggccaaccagcatcagccgccggcgctcccgccggacaggccctccccctcatggttcccgcccaaaggggtgcctctcctgaagcggcctcaggcggactgccccaggcaagaaagcggcaaaggctgacccatctctccccagaggagaaagctcttagacgcaaattgaaaaaccgtgttgcagctcaaacagctagggatcggaaaaaggcaagaatgtctgaattagaacagcaagttgtggatctggaagaagagaatcagaagctgctcctggagaaccaattgttacgcgaaaaaactcatggactggttgtcgagaatcaagagttaagacagcgacttggaatggacgccttggtggccgaggaagaggccgaggccaagggaaacgaagtcagacccgttgccggatccgctgaatccgccgccctgaggctcagagcgcctctacagcaagtgcaggcccagctcagtccactgcaaaacatcagcccttggatcctagcggtcttaaccctgcaaatccagagtctgattagctgttgggctttctggaccacctggactcaaagctgcagcagcaatgctctacctcagtctctcccggcatggcgttcaagtcaacgcagtacccaaaaagaccccgttccttaccaacctcctttcctttgccagtgggggcgtcatcaaccatcatggaaaccgctgatgaattag

SEQ ID NO: 152629 - DNA, 786 bp, Artificial Sequence
  derived and/or modified sequence
atggtggtggtggccgccgcccccaaccccgccgacggcacccccaaggtgctgctgctgagcggccagcccgccagcgccgccggcgcccccgccggccaggccctgcccctgatggtgcccgcccagagaggcgccagccccgaggccgccagcggcggcctgccccaggccagaaagagacagagactgacccacctgagccccgaggagaaggccctgagaagaaagctgaagaacagagtggccgcccagaccgccagagacagaaagaaggccagaatgagcgagctggagcagcaggtggtggacctggaggaggagaaccagaagctgctgctggagaaccagctgctgagagagaagacccacggcctggtggtggagaaccaggagctgagacagagactgggcatggacgccctggtggccgaggaggaggccgaggccaagggcaacgaggtgagacccgtggccggcagcgccgagagcgccgccctgagactgagagcccccctgcagcaggtgcaggcccagctgagccccctgcagaacatcagcccctggatcctggccgtgctgaccctgcagatccagagcctgatcagctgctgggccttctggaccacctggacccagagctgcagcagcaacgccctgccccagagcctgcccgcctggagaagcagccagagaagcacccagaaggaccccgtgccctaccagccccccttcctgtgccagtggggcagacaccagcccagctggaagcccctgatgaactag

SEQ ID NO: 152630 - protein, 630 aa, Artificial Sequence
  derived and/or modified sequence
MAELCPLAEELSCSICLEPFKEPVTTPCGHNFCGSCLNETWAVQGSPYLCPQCRAVYQARPQLHKNTVLCNVVEQFLQADLAREPPADVWTPPARASAPSPNAQVACDHCLKEAAVKTCLVCMASFCQEHLQPHFDSPAFQDHPLQPPVRDLLRRKCSQHNRLREFFCPEHSECICHICLVEHKTCSPASLSQASADLEATLRHKLTVMYSQINGASRALDDVRNRQQDVRMTANRKVEQLQQEYTEMKALLDASETTSTRKIKEEEKRVNSKFDTIYQILLKKKSEIQTLKEEIEQSLTKRDEFEFLEKASKLRGISTKPVYIPEVELNHKLIKGIHQSTIDLKNELKQCIGRLQEPTPSSGDPGEHDPASTHKSTRPVKKVSKEEKKSKKPPPVPALPSKLPTFGAPEQLVDLKQAGLEAAAKATSSHPNSTSLKAKVLETFLAKSRPELLEYYIKVILDYNTAHNKVALSECYTVASVAEMPQNYRPHPQRFTYCSQVLGLHCYKKGIHYWEVELQKNNFCGVGICYGSMNRQGPESRLGRNSASWCVEWFNTKISAWHNNVEKTLPSTKATRVGVLLNCDHGFVIFFAVADKVHLMYKFRVDFTEALYPAFWVFSAGATLSICSPK

SEQ ID NO: 152631 - DNA, 5744 bp, Artificial Sequence
  derived and/or modified sequence
gtttcctcggcggcctcggagcgcgggtgcagcagttgtgtcccgacccctgggagcgccatggcagagctgtgccccctggccgaggagctgtcgtgctccatctgcctggagcccttcaaggagccggtcaccactccgtgcggccacaacttctgcgggtcgtgcctgaatgagacgtgggcagtccagggctcgccatacctgtgcccgcagtgccgcgccgtctaccaggcgcgaccgcagctgcacaagaacacggtgctgtgcaacgtggtggagcagttcctgcaggccgacctggcccgggagccacccgccgacgtctggacgccgcccgcccgcgcctctgcacccagcccgaatgcccaggtggcctgcgaccactgcctgaaggaggccgccgtgaagacgtgcttggtgtgcatggcctccttctgtcaggagcacctgcagccgcacttcgacagccccgccttccaggaccacccgctgcagccgcccgttcgcgacctgttgcgccgcaaatgttcccagcacaatcggctgcgggaatttttctgccccgagcacagcgagtgcatctgccacatctgcctggtggagcataagacctgctctcccgcgtccctgagccaggccagcgccgacctggaggccaccctgaggcacaaactaactgtcatgtacagtcagatcaacggggcgtcgagagcactggatgatgtgagaaacaggcagcaggatgtgcggatgactgcaaacagaaaggtggagcagctacaacaagaatacacggaaatgaaggctctcttggacgcctcagagaccacctcgacaaggaagataaaggaagaggagaagagggtcaacagcaagtttgacaccatttatcagattctcctcaagaagaagagtgagatccagaccttgaaggaggagattgaacagagcctgaccaagagggatgagttcgagtttctggagaaagcatcaaaactgcgaggaatctcaacaaagccagtctacatccccgaggtggaactgaaccacaagctgataaaaggcatccaccagagcaccatagacctcaaaaacgagctgaagcagtgcatcgggcggctccaggagcccacccccagttcaggtgaccctggagagcatgacccagcgtccacacacaaatccacacgccctgtgaagaaggtctccaaagaggaaaagaaatccaagaaacctccccctgtccctgccttacccagcaagcttcccacgtttggagccccggaacagttagtggatttaaaacaagctggcttggaggctgcagccaaagccaccagctcacatccgaactcaacatctctcaaggccaaggtgctggagaccttcctggccaagtccagacctgagctcctggagtattacattaaagtcatcctggactacaacaccgcccacaacaaagtggctctgtcagagtgctatacagtagcttctgtggctgagatgcctcagaactaccggccgcatccccagaggttcacatactgctctcaggtgctgggcctgcactgctacaagaaggggatccactactgggaggtggagctgcagaagaacaacttctgtggggtaggcatctgctacggaagcatgaaccggcagggcccagaaagcaggctcggccgcaacagcgcctcctggtgcgtggagtggttcaacaccaagatctctgcctggcacaataacgtggagaaaaccctgccctccaccaaggccacgcgggtgggcgtgcttctcaactgtgaccacggctttgtcatcttcttcgctgttgccgacaaggtccacctgatgtataagttcagggtggactttactgaggctttgtacccggctttctgggtattttctgctggtgccacactctccatctgctcccccaagtaggcaggctgtaggcacttgggctgactgcctgcagaagtcccaagaccctagtgaaaatacagcaggcagaactctccttggataattccccaagaggtcccaaggattgggagcatgggaggggagctggcgggagggtgggaggtgggatttagccaggaaaggggtgagagtgattgtgttgtgggcgaggaggcgtttccaccccctggtgcctatcagggcagggtgacctactccccattgttctggaaatctccaggctgctgggcagctgggcagagctctgggaagtgaagtcatgagtgcccgattcctcttagagaaaatccatagctactgtaggttctgtcttgggccacttggatctgaaggctgcccctttgctctctggggtagccttcagatcttggtgttttgaattcttactatagatgtttttaaagttccaaagtcattgagtttcaatgttacataaactccattacccgcatgttggggcttgatctcctggttattatctgtgcttgaggaaacacccacagcagtctctacccagaacagtttcctaaagaggcataccctcttcctccactggaaaatagtgcgttcccttcctaccctgcacacccatcgcccccacattgatggttttcaaacagcaaacttttcagctaaagcttcaaaccatgattggaatcagcctgtgttggatttgtgattcagggtcatggtgaccctgatccagtttgggtggaaatccttcctaagtatcataagaagcatcttggcagagatgctttggtggcagccatgagctttgctggaggccttgcttcccatagccttggctgtggggcaaggaactctgccaggcgagggggatgctgccctggatcaacagaagcctggtgggtttgctcgtgttagagtgtcctgccttcttactgacaactcttctcggtgatagcctctcttccctggattgtgacatatggaatgacagtgcaggtaccaccgaggctagcacagtcaagcctccagctaagctggatccctgaagcctgctatcatgcagacaggctatgcggctgcctcggaccatgctaggccacttgctggggtgtcaacctaccaccaaaggggtcttttagcaaacctcatggggaacaggaacattcctgttcatccctggccacaggctgcagacccagcactggcccttgcgtgagtcagagcctggggctggccctagccccttctactgacttcctcatttaagccaattatataagctcacattgatcagggagggagggaaagagctaaagagggtcacacaagtggctattttccctgcagtgtttctgtgtggtgaaaataacccagtccactaaggggcgggagtgaatggatggctggattttccccaagctccttatagcctaatgttgtcaggatgtgagtatgaggaatttagcctcttatagtgaaatgagtccaactctgggctttgcttagaggagagctcctgtcaggcttcctataatatgaaaagaagtcaccattggggaactagagaccccagaccttttcatatggatatttgagaatgtaatgcatctcaggcctcgtgctggaactctagggcactctaggcaggctcagaacacttgatattcctgacagctacacacctgacatgcaggtacatacctgatcggtgtcatctcctaacaaggattttcagttcctcgggagagcaataatctttgtaggaaagacatccctgcaataggtgatatgtggtccttagaagttttattcctttactacttggaagaaaagttctttggtgattcttctctgcttttgaagatgatcaaaagcatcttcattgattttctgaaacgaaagccttgtctgaaaccaattaatacttgggaaacagctgggcttggaggagtagaatgccagagataaatccatggctcctgctctggctctcttctgcagaaatgagggcaacagtgaggccacttccctggcaaatgtgcagctcaggatagggaagcataagaccctctgtttaaaagagagtcaagtaggtaaccaaagccaagctctgtgcaaggtgctttggagttgtaaattgaggagtgcatccttgctgtcttgaaccattctgtttgcaatggtgagaccttacataacctagccttgcagggccgccacacaaccctggagtcctagagttggaggaacctttgtatccatctgacttctcattttgcagaatatgatgagaaagtagaggatcgctctgttcaccactcttgctattccattagtggggagatgcctgctagcatgtgtgaggggaacactctgatacactgggaagtatcggaaattcccagaaacacaaacataaaataactctcctagacccaggtactggggactgtctcagtccgtgtggcatgataaataaaaggttaggatcaagtctttgtatttttcaagatgtggtagctgattattcctgttttaagtactctgaaattgatctgtgatcaataatactaatatgttatcttttaccgtattctgcctctcactattgattttaattagttaggagtatttgagctgttatttcttgagcttaatatttttttagagttaactctttaaggagataatcatggctgtagacaaggccagggctggctgacgtgccttagaaggtttgaatgcaataaagcggtgtttggcgttctcctgcattgtagtgcgggtacaaaatgctatttgttcgtcatactgttgtcagcagatgagccgcccactacagacggctactgcccagggacctgcccaggccccacccaagggctcccaagggttgagatttctgcagacctatagccagcacacttagtcctgccctatatagagttcctcttcgggaagcttttgataaggaattctcagaccgataggatgtctgtctgggctttgctgcgggacagtctaactgtgggggctaggggaaagcaggagagtatcgatcaaagagtaagccacacacggataatcagttactagggatggaggtgtgagggttcattatattattcattttactgttgtatatgtttgaaaatgtctataataaaaagctttaaaaaaaaaaaagaaacaaaaatagttcaggccagcaatgggccctccatgttcagtggattttatccttgtttcaattggggtaggagttccaggaggtgtggattggaggttgtctaaagaattgaactggcctttgtccctgcttcctgggagggagactttcagtccttgacatttccagggtaataggagtgtctttgttatttgtgaggccatgggatcacacctgagcttatgctaaaaggtgggatgactcagagctggggctggtcaccagacagactgaccatgtgattagaggtttgaggctttgagtcagcctgacctatggggcgggggactggaggctgagtttaatcatctggccagtgctttaatcagtacatcatgaaaccctaataaaaactctggacactaaagctcagcatagcttcctgggtggtgaagctgtggctatgccggcagggcagtgtgccctaattccacgaagagggggcatgggagcactgtgctcaagacccttccagacctttccctgtgtcttccttggcttgtggagctgatttgtatcctttataataaaactaatcataagtata

SEQ ID NO: 152632 - DNA, 1893 bp, Artificial Sequence
  derived and/or modified sequence
atggccgagctgtgccccctggccgaggagctgagctgcagcatctgcctggagcccttcaaggagcccgtgaccaccccctgcggccacaacttctgcggcagctgcctgaacgagacctgggccgtgcagggcagcccctacctgtgcccccagtgcagagccgtgtaccaggccagaccccagctgcacaagaacaccgtgctgtgcaacgtggtggagcagttcctgcaggccgacctggccagagagccccccgccgacgtgtggaccccccccgccagagccagcgcccccagccccaacgcccaggtggcctgcgaccactgcctgaaggaggccgccgtgaagacctgcctggtgtgcatggccagcttctgccaggagcacctgcagccccacttcgacagccccgccttccaggaccaccccctgcagccccccgtgagagacctgctgagaagaaagtgcagccagcacaacagactgagagagttcttctgccccgagcacagcgagtgcatctgccacatctgcctggtggagcacaagacctgcagccccgccagcctgagccaggccagcgccgacctggaggccaccctgagacacaagctgaccgtgatgtacagccagatcaacggcgccagcagagccctggacgacgtgagaaacagacagcaggacgtgagaatgaccgccaacagaaaggtggagcagctgcagcaggagtacaccgagatgaaggccctgctggacgccagcgagaccaccagcaccagaaagatcaaggaggaggagaagagagtgaacagcaagttcgacaccatctaccagatcctgctgaagaagaagagcgagatccagaccctgaaggaggagatcgagcagagcctgaccaagagagacgagttcgagttcctggagaaggccagcaagctgagaggcatcagcaccaagcccgtgtacatccccgaggtggagctgaaccacaagctgatcaagggcatccaccagagcaccatcgacctgaagaacgagctgaagcagtgcatcggcagactgcaggagcccacccccagcagcggcgaccccggcgagcacgaccccgccagcacccacaagagcaccagacccgtgaagaaggtgagcaaggaggagaagaagagcaagaagcccccccccgtgcccgccctgcccagcaagctgcccaccttcggcgcccccgagcagctggtggacctgaagcaggccggcctggaggccgccgccaaggccaccagcagccaccccaacagcaccagcctgaaggccaaggtgctggagaccttcctggccaagagcagacccgagctgctggagtactacatcaaggtgatcctggactacaacaccgcccacaacaaggtggccctgagcgagtgctacaccgtggccagcgtggccgagatgccccagaactacagaccccacccccagagattcacctactgcagccaggtgctgggcctgcactgctacaagaagggcatccactactgggaggtggagctgcagaagaacaacttctgcggcgtgggcatctgctacggcagcatgaacagacagggccccgagagcagactgggcagaaacagcgccagctggtgcgtggagtggttcaacaccaagatcagcgcctggcacaacaacgtggagaagaccctgcccagcaccaaggccaccagagtgggcgtgctgctgaactgcgaccacggcttcgtgatcttcttcgccgtggccgacaaggtgcacctgatgtacaagttcagagtggacttcaccgaggccctgtaccccgccttctgggtgttcagcgccggcgccaccctgagcatctgcagccccaagtag

SEQ ID NO: 152633 - DNA, 1893 bp, Artificial Sequence
  derived and/or modified sequence
atggcagaactatgtcccctcgcagaggagctctcatgctccatatgtctggagcctttcaaggagccagtaactacaccatgcggacataatttttgcggttcctgtctcaatgaaacgtgggcagttcaaggctccccttatctgtgcccacagtgccgggctgtgtaccaggctcgccctcagttgcataagaatacagtcctgtgcaatgtagtggaacagtttctgcaggcagatcttgcgcgcgagccgccggcagatgtctggacccctcccgcaagagcctctgccccatctcccaatgcgcaggtggcatgtgaccattgtctgaaggaggcagcagttaaaacatgcctggtatgcatggcttcattctgccaggagcacctacagccacacttcgactccccagccttccaggatcaccccctgcaaccccccgtgagagacttgctgaggcggaaatgtagccagcacaaccggttgagagagttcttctgccctgaacatagtgaatgtatttgccacatttgcctggttgagcataagacttgctcacccgccagtctgtctcaggccagtgccgatctagaggccacgctgcgccacaagttgacagtcatgtactcgcaaattaacggagcctctagagccctggacgacgtgcggaatagacagcaggacgtccgcatgaccgccaataggaaagttgagcagctccagcaggagtacactgaaatgaaagctctgctggatgcctccgagaccacgtctacaagaaagatcaaggaggaggagaagcgggtgaatagtaagttcgatactatctaccagatcctccttaagaaaaagtcagagatccagacattgaaggaggagattgagcagtcccttaccaagagggacgaattcgagtttctcgagaaggcctccaagctcaggggtatttccaccaaacccgtatacattcctgaggtggagctgaatcataaattaatcaaaggcatccatcagtctaccatcgatctaaaaaatgaactcaagcaatgtatcggccgcctccaagaacccacgccgagctctggcgatccaggtgaacacgaccctgctagtacacacaagagtaccagacccgtcaaaaaggtgtcgaaggaagagaagaagtcaaagaagcctccccccgtccctgccttgccctctaagctccccacatttggggcacctgagcagttggtagacctgaaacaagccgggctagaggcggctgccaaggccacgtcctcacatccaaattccacaagcctaaaagctaaagttctagaaacatttttagccaagtcaaggccggagctgctcgaatattacatcaaggtcattctagattacaatacagcccacaacaaggtagctcttagcgagtgctataccgtcgcttccgttgctgaaatgccccagaattataggcctcaccctcagaggttcacatactgttctcaggtcctgggcctgcactgttacaaaaaagggatacattactgggaggttgaactccagaaaaataacttctgtggcgtggggatctgctacggatctatgaacagacagggtccagagtcaaggctcgggcggaacagcgctagttggtgtgtggaatggtttaatacgaaaatttccgcctggcataacaacgtggaaaagacattaccgtctactaaagccacgcgcgttggtgtgctgttgaattgcgaccacggattcgtgattttttttgctgtggctgacaaagtgcatctgatgtacaaattcagggtggacttcacggaagctttgtatcccgctttctgggtgttcagcgccggagcaacgttgagcatctgctcccccaagtag

SEQ ID NO: 152634 - DNA, 1893 bp, Artificial Sequence
  derived and/or modified sequence
atggctgagctttgtccgctcgcagaggagctatcatgctccatctgcctggagcccttcaaggaaccagtaacgacgccctgtggtcataacttttgcggttcctgcttgaacgagacttgggccgtgcagggttccccttacttgtgtccccaatgccgggccgtttaccaagcccggcctcaattgcacaagaacaccgtgctgtgcaatgtagtggaacaatttctccaggccgatctggcacgcgagccaccagcagacgtgtggacccctccagcccgagccagtgcgccttcccctaacgcacaggtcgcttgcgaccactgtctcaaggaggccgcagtgaagacatgtctggtgtgtatggcctctttctgtcaagaacatctgcaacctcatttcgattcccctgcatttcaggatcacccgctgcagccccccgtgagagatttgcttcggaggaaatgttctcaacacaaccgtcttcgggaattcttttgccccgagcactcagaatgcatttgccacatctgtctggtggaacacaaaacctgttcccccgcttcgctcagccaggcgagcgccgatctggaggcgacactgaggcataaactgaccgtaatgtactctcaaattaatggtgcctctcgtgccctagacgacgtacgtaaccggcagcaggacgtgcgaatgactgccaacaggaaagtcgagcagcttcagcaagagtacaccgaaatgaaagccttactagatgccagtgaaaccacctctaccagaaagatcaaggaggaggaaaaaagggtgaactcaaagttcgacactatatatcagatcctgctgaagaagaagagtgagatccaaactctaaaggaggagattgaacagtccctgactaagcgggacgagttcgaatttctagagaaggcatctaaactgagagggatcagcacaaagccagtgtatattcccgaggtggaacttaatcacaagctgataaagggcatccaccagtccactatcgacttaaagaacgagctgaaacagtgcattggtcgcctacaggaaccgactccgagttctggcgaccccggggagcacgaccccgctagtacacataagtcgacccgacccgtcaaaaaggtgtctaaagaagaaaaaaagagcaaaaagccccctccagtgcccgccttgccttctaagttacccaccttcggggcgccagagcagctcgtggatctgaagcaggccggcttagaggccgctgctaaggcaacttctagccaccccaactctacctcccttaaggccaaagtgctggagacctttctcgctaagagtcgtcccgagctcctggaatattatataaaagtcatccttgattacaataccgctcataataaagtagcgctaagtgaatgttataccgtggctagcgttgctgaaatgcctcagaattatcgcccccacccccagcggtttacgtactgttcgcaggtgctgggcctgcattgctacaaaaagggcattcattattgggaagtagagctccaaaagaataatttttgtggggttgggatctgctatggaagtatgaacaggcaggggccagaaagcagactggggaggaacagcgcatcctggtgcgtggagtggttcaatacaaaaatcagcgcatggcacaataatgtggaaaaaacactgccaagcactaaggccactcgtgtgggagtgctgctgaattgcgaccatggcttcgtaatcttttttgctgtcgcggataaagtccacctcatgtataagtttcgtgttgactttacagaggcactgtaccccgcattctgggtattttctgccggggcaactttaagcatatgttctccaaaatag

SEQ ID NO: 152635 - DNA, 1893 bp, Artificial Sequence
  derived and/or modified sequence
atggccgagctgtgccccctggccgaggagctgagctgcagcatctgcctggagcccttcaaggagcctgtgaccaccccctgtggccacaacttctgtggcagctgcctgaatgagacctgggccgtgcagggcagcccctacctgtgcccccagtgcagagctgtgtaccaggcccggccccagctgcacaagaacacagtgctgtgcaatgtggtggagcagttcctgcaggccgacctggcccgggagcccccagcagatgtgtggaccccaccagcccgggccagcgcccccagccccaatgcccaggtggcctgtgaccactgcctgaaggaggccgctgtgaagacctgcctggtgtgcatggccagcttctgccaggagcacctgcagccccactttgacagccctgccttccaggaccaccccctgcagccccctgtgcgggacctgctgcggaggaagtgcagccagcacaaccggctgcgggagttcttctgcccagagcacagcgagtgcatctgccacatctgcctggtggagcacaagacctgcagccctgccagcctgagccaggccagcgctgacctggaggccaccctgcggcacaagctgactgtgatgtacagccagatcaacggggccagccgggccctggatgatgtgaggaaccggcagcaggatgtgaggatgacagccaacaggaaggtggagcagctgcagcaggagtacacagagatgaaggccctgctggatgccagcgagaccaccagcaccaggaagatcaaggaggaggagaagagggtgaacagcaagtttgacaccatctaccagatcctgctgaagaagaagtctgagatccagaccctgaaggaggagattgagcagagcctgaccaagagagatgaatttgagttcctggagaaggccagcaagctgcggggcatcagcaccaagcctgtgtacatccctgaggtggagctgaaccacaagctgatcaagggcatccaccagagcaccatcgacctgaagaatgagctgaagcagtgcatcggccgcctgcaggagcccacccccagcagcggggaccctggagaacatgaccctgccagcacccacaagagcaccaggcctgtgaagaaggtgtccaaggaggagaagaagagcaagaagcccccacctgtgcctgccctgcccagcaagctgcccaccttcggggcccctgagcagctggtggacctgaagcaggccggcctggaggccgccgccaaggccaccagcagccaccccaacagcaccagcctgaaggccaaggtgctggagaccttcctggccaagagcaggcctgagctgctggagtactacatcaaggtgatcctggactacaacacagcccacaacaaggtggccctgtctgagtgctacacagtggcctctgtggccgagatgccccagaactaccggccccacccccagcgcttcacctactgcagccaggtgctgggcctgcactgctacaagaagggcatccactactgggaggtggagctgcagaagaacaacttctgtggggtgggcatctgctacggctccatgaaccggcagggccctgagagccggctgggcaggaacagcgcctcctggtgtgtggagtggttcaacaccaagatcagcgcctggcacaacaacgtggagaagaccctgcccagcaccaaggccaccagggtgggcgtgctgctgaactgtgaccacggctttgtgatcttctttgctgtggccgacaaggtgcacctgatgtacaagttccgggtggacttcacagaggccctgtacccagccttctgggtgttttctgctggggccaccctgagcatctgcagccccaagtag

SEQ ID NO: 152636 - DNA, 1893 bp, Artificial Sequence
  derived and/or modified sequence
atggccgagctgtgccccctggccgaggagctgagctgcagcatctgtttggaaccctttaaggagccagtgacgacaccttgtgggcataacttctgtggcagctgtttgaacgaaacctgggccgtgcaaggctcaccatacctctgcccgcagtgtcgggctgtctatcaggcacggccgcaacttcacaaaaataccgttctatgtaacgtcgtcgaacagttcctgcaggccgatttggctagggagcctcctgccgatgtgtggactcctccggcgagagccagtgcgccttcccctaatgcccaggtggcctgcgaccactgtctgaaagaggcggcagtgaaaacttgtcttgtatgcatggcctctttttgccaagaacacctgcagccccactttgactccccagcctttcaggatcatcccttacagccccccgtccgtgacttactgagaagaaagtgttcacagcacaatagactaagggagtttttctgcccagagcactcagaatgtatatgccacatttgcctagtcgaacacaaaacctgcagtcccgcctctctaagtcaggccagcgcagacttggaggcaaccctcagacataaattaacagtgatgtattcccagatcaacggagcatctagggcgctggacgacgtgagaaatagacagcaggacgttcgtatgacggctaatcgaaaggtggagcagcttcaacaggagtatacagagatgaaagccttacttgacgccagtgagacgacgagcactcgaaagattaaagaggaagaaaagcgtgtgaacagcaagtttgatacaatctaccagattctgctgaagaagaaatccgaaatccagaccctcaaggaagagatcgagcagtcacttactaaaagagatgaatttgaattcttggagaaggcgagtaagttaaggggaatctctaccaagcctgtgtatattccagaggtggagctgaaccacaaacttataaaaggtatccatcagagcacaatcgacctgaagaatgagttgaaacagtgcataggacgtctgcaagagcccactcctagctctggggatccaggcgaacatgatcccgctagtactcacaagagtacccggcctgtgaaaaaggtgtctaaagaagagaagaaatctaaaaagccccccccggtcccagcccttcctagtaaactgcctactttcggagctcctgaacagttggtggacctgaagcaggccggactggaggccgcagcgaaggctaccagctctcacccgaatagcactagcttaaaagctaaagtgctagaaaccttcctcgctaaatctcgacccgaacttctggaatactatattaaagttattctcgactacaacacagcccacaataaggtcgccctgtcagagtgttacaccgttgcatcagttgccgaaatgcctcagaactaccgaccacatccccagagatttacttattgttcccaagtgctcggtctgcattgttataaaaaagggattcactattgggaggtcgagctgcagaaaaacaatttctgtggtgttgggatctgctacggctctatgaataggcaggggcctgagagtaggctgggaagaaactcagccagttggtgcgtcgagtggttcaatacaaaaatctcagcatggcacaataacgtggagaaaaccctgccaagcaccaaggctacccgggtgggagtactcctcaactgtgatcacggatttgtgatcttcttcgcggtcgccgacaaggtgcacctcatgtataagtttcgcgtggactttacagaggctttatatcccgccttttgggtgttttctgccggggctactctgagcatttgcagtccgaagtag

SEQ ID NO: 152637 - DNA, 1893 bp, Artificial Sequence
  derived and/or modified sequence
atggccgagctgtgccccctggccgaggagctgagctgcagcatctgcttggaaccttttaaggaacctgttactaccccctgcggccacaacttctgtggcagttgcttgaacgagacctgggctgtgcagggcagcccatatctctgtcctcaatgccgggctgtttaccaggccaggccacaattacacaagaatacagtgctgtgtaacgtagtggagcagttcctgcaggctgatctggctagggaaccccccgctgacgtgtggaccccgcccgcccgcgcatccgccccgagccctaacgctcaggtggcctgtgatcactgtctgaaggaagccgctgtaaagacgtgtctggtctgcatggctagcttctgccaggaacacttgcagcctcacttcgattcacccgcctttcaagatcaccccttgcaacccccggtgcgcgaccttcttaggcgcaagtgcagccagcacaatcggttacgcgaattcttctgccctgagcacagcgagtgtatctgccatatttgcctggtcgagcataagacctgttcacctgcgtctctcagtcaggcttccgcagacttggaagccacattgcggcataaactcaccgtgatgtacagtcaaattaatggcgcctcacgggcattggacgatgtgaggaatcgtcagcaggatgtgagaatgacagcaaatcgaaaagtggaacagttgcagcaggaatatactgaaatgaaagcgctcttggatgcgagcgagactacttccacaagaaaaataaaagaagaagagaagagggtcaactcaaagttcgataccatttaccagatcctcctcaagaaaaagtctgaaatccaaaccctgaaggaggaaattgagcaaagcctcacaaaacgcgacgagttcgagttcctggaaaaggctagcaagttaagggggatctctaccaagcccgtgtatattcccgaagtagagctcaaccataagctgattaaaggtatccaccagagcacaattgacctaaaaaatgagctcaaacaatgcataggcagactgcaggagccaacaccgtcttcgggcgaccccggtgagcatgatccagctagcacccacaaatctacacgtccagtaaagaaggtgagtaaagaggagaagaaaagtaagaagcctccccccgtgcctgctctacctagcaagttacctactttcggcgcacccgagcagcttgttgacttgaagcaggcaggtttagaggcagccgctaaggcaacctctagccatcctaattccacctctcttaaagctaaggtactggagacctttttggctaagtcaaggcctgaattactggaatactacatcaaggtcattctggattataacaccgcccataataaggttgctcttagcgagtgttacaccgtggcctcagtcgcagagatgccacagaactatagaccacacccacaacgctttacgtactgcagtcaggtgctgggcttacattgctataagaaaggaatccattactgggaagtggaactacagaaaaataatttttgcggagtcggaatctgttacggttcaatgaatcgacagggacccgaaagtagactcggcaggaacagtgcatcctggtgtgtggaatggtttaacacaaaaattagcgcatggcataataatgtggagaaaacattgccatctacgaaggcaacacgcgtcggagtcctgctgaattgtgaccatggatttgtaatattcttcgctgtggcggacaaggtacatctgatgtacaaatttagagtagattttacagaagccctctacccggctttttgggtattctccgcaggcgcgacactctcaatctgttcccctaagtag

SEQ ID NO: 152638 - DNA, 1893 bp, Artificial Sequence
  derived and/or modified sequence
atggccgagttatgccctcttgccgaggagctgtcttgtagcatctgcctggagccgttcaaggagcccgtgaccaccccatgtggacacaacttttgtgggtcctgcctaaacgaaacttgggctgtgcagggatctccttatctttgtccacagtgccgagctgtgtaccaggcacgcccacagctgcataaaaacacagtattgtgcaatgtggtggagcagtttctccaggccgatctggctagggaacctcctgcagatgtgtggacccctccagcacgagcctctgccccatcaccgaatgcacaggtagcctgtgatcattgtctgaaggaagcggcagtgaagacctgcctcgtgtgcatggcctcattttgccaagagcaccttcagccccacttcgattctcccgctttccaggaccacccgctacaaccgcctgttcgcgacttactgcgcaggaaatgttcccagcataaccgcctgagagaattcttttgtcccgagcactcggagtgtatctgccacatttgtctagtcgaacataagacctgctcacccgcaagtctgagccaggctagtgccgacctggaagccaccttgaggcataagctgacggtaatgtacagtcagatcaatggcgcatctcgggctctcgacgatgtgaggaatcggcagcaggatgtccgcatgaccgctaaccgcaaagtcgagcagttacagcaagaatacacagaaatgaaggctttgttggacgcctcggagacaactagtaccaggaagatcaaggaggaagaaaaaagagtcaattctaagtttgatacaatctaccagattctcttaaagaagaagagcgaaattcagactttaaaagaagaaatagaacagtctcttacaaaacgagacgaatttgagttccttgaaaaggccagcaagctgagaggaatttcaacaaaaccggtgtatatacccgaagtggaactgaatcacaaattaatcaagggcattcaccagagtaccatcgatctcaagaacgagctgaagcaatgtatcggtcggctgcaggagcccaccccctctagcggggaccccggtgaacacgatccagcctcgacccataagagcaccaggccagtaaaaaaagtctcaaaagaggagaagaaatcaaaaaagcctcctcccgtgccggctcttccttccaaactccctaccttcggtgccccagagcaacttgttgacctgaagcaggccggactggaggctgcggctaaagctacgagtagtcatccgaacagcactagcctgaaagctaaggtcctcgaaacgtttctcgccaaaagcagaccagaactgctggaatattacattaaggtgatcctggattataacactgcccacaataaagttgctttgtccgagtgttatacagtagcatccgtagctgaaatgccccagaattaccgtcctcatccacagagatttacatactgctcacaagtcctggggctccattgttacaagaaaggtatacattattgggaggttgagctgcagaagaacaatttttgtggtgtgggcatttgttacgggagcatgaatagacagggccctgagagcaggctgggacgtaatagcgctagttggtgtgtggaatggtttaatacgaagatatctgcctggcacaataatgtggagaaaactctgccttccaccaaggcaactagggtcggcgtgcttttgaattgcgatcacgggtttgtcatatttttcgctgtcgctgacaaggtccacttgatgtataagttccgagtcgattttactgaggctctgtaccctgccttttgggtcttttcggccggtgccaccctgtccatttgcagcccgaaatag

SEQ ID NO: 152639 - DNA, 1893 bp, Artificial Sequence
  derived and/or modified sequence
atggcagaattatgtcctctagccgaggagcttagttgtagtatctgtctggaacccttcaaggagccagtgactacgccttgtggccataacttttgcgggtcctgtctgaatgagacatgggctgtgcagggatctccatacttgtgtccccaatgccgggctgtttatcaggctcgaccccagctccacaagaatactgtgctctgcaacgtggttgagcagttcctgcaggctgatctcgctcgggaaccgcctgctgacgtgtggaccccacctgccagagccagcgccccatcacccaacgctcaggtagcctgcgaccactgtcttaaggaagccgctgtgaagacatgcttggtgtgcatggcttccttttgccaggaacacctgcagcctcactttgatagccctgcctttcaggaccatccactacaaccgcctgtgcgtgatctgctgcgccgaaaatgttcccagcataatcggctgcgagagtttttttgtccagagcatagcgaatgtatctgccacatatgcctcgtcgaacacaaaacttgttctccagcatctttaagccaggcttctgcagacttggaggccacactccgccacaagctcaccgtaatgtactcccagatcaatggggctagtagggcgttggacgacgtgcgcaatcggcagcaagatgtccggatgacggcaaatcgcaaggttgagcagttgcagcaggagtatacagagatgaaggccctgctggacgctagcgaaacaacttccactaggaaaatcaaagaggaggagaagagggtgaattccaagttcgatacaatctatcagatactgttgaaaaaaaaatcggaaatccagactttgaaggaagagatagagcaaagtctcacaaaaagagacgagttcgaatttttggaaaaggcttcaaaattacgcggaatctccacaaagccggtgtacattcccgaagtagagttgaatcacaaactaatcaaaggaatacatcaaagcaccattgatctcaagaatgaacttaagcagtgcatcggacgcctgcaagaacccacaccttcaagtggcgatcctggtgagcacgaccccgcatcaacccacaagagcactagacccgtgaagaaggttagcaaggaggaaaagaagtctaagaaacctccacccgtacctgctctcccctccaaattgcctacttttggggcaccagagcaacttgttgacctgaagcaggcagggctcgaggctgccgcaaaggcaaccagcagtcatccaaattccacctcactgaaagccaaagttctggaaacattcctggccaagagcaggcccgagctgctggaatactacatcaaagtcattcttgattacaacacagcgcataacaaagtcgcattatctgaatgttatactgtggcaagtgtggccgaaatgcctcagaattacagacctcatcctcagagatttacttactgcagccaggttctgggtctgcactgttacaagaagggtatccattactgggaggttgagctgcagaagaacaatttctgtggtgtcggtatctgctacggtagtatgaataggcagggaccggagagcaggcttggtaggaacagtgctagttggtgtgtggaatggtttaataccaaaatttcggcctggcacaacaacgttgagaagacactcccctctaccaaagcaacgcgagtcggcgtcctgttaaattgcgaccatgggtttgtaattttctttgcggtggccgataaagtacacctgatgtataaattccgagttgacttcacagaggccctgtatccggctttctgggttttttccgcaggggctacactctctatttgctctcccaagtag

SEQ ID NO: 152640 - DNA, 2294 bp, Artificial Sequence
  derived and/or modified sequence
cgcgggtgcagcagttgtgtcccgacccctgggagcgccatggcagagctgtgccccctggccgaggagctgtcgtgctccatctgcctggagcccttcaaggagccggtcaccactccgtgcggccacaacttctgcgggtcgtgcctgaatgagacgtgggcagtccagggctcgccatacctgtgcccgcagtgccgcgccgtctaccaggcgcgaccgcagctgcacaagaacacggtgctgtgcaacgtggtggagcagttcctgcaggccgacctggcccgggagccacccgccgacgtctggacgccgcccgcccgcgcctctgcacccagcccgaatgcccaggtggcctgcgaccactgcctgaaggaggccgccgtgaagacgtgcttggtgtgcatggcctccttctgtcaggagcacctgcagccgcacttcgacagccccgccttccaggaccacccgctgcagccgcccgttcgcgacctgttgcgccgcaaatgttcccagcacaatcggctgcgggaatttttctgccccgagcacagcgagtgcatctgccacatctgcctggtggagcataagacctgctctcccgcgtccctgagccaggccagcgccgacctggaggccaccctgaggcacaaactaactgtcatgtacagtcagatcaacggggcgtcgagagcactggatgatgtgagaaacaggcagcaggatgtgcggatgactgcaaacagaaaggtggagcagctacaacaagaatacacggaaatgaaggctctcttggacgcctcagagaccacctcgacaaggaagataaaggaagaggagaagagggtcaacagcaagtttgacaccatttatcagattctcctcaagaagaagagtgagatccagaccttgaaggaggagattgaacagagcctgaccaagagggatgagttcgagtttctggagaaagcatcaaaactgcgaggaatctcaacaaagccagtctacatccccgaggtggaactgaaccacaagctgataaaaggcatccaccagagcaccatagacctcaaaaacgagctgaagcagtgcatcgggcggctccaggagcccacccccagttcaggtgaccctggagagcatgacccagcgtccacacacaaatccacacgccctgtgaagaaggtctccaaagaggaaaagaaatccaagaaacctccccctgtccctgccttacccagcaagcttcccacgtttggagccccggaacagttagtggatttaaaacaagctggcttggaggctgcagccaaagccaccagctcacatccgaactcaacatctctcaaggccaaggtgctggagaccttcctggccaagtccagacctgagctcctggagtattacattaaagtcatcctggactacaacaccgcccacaacaaagtggctctgtcagagtgctatacagtagcttctgtggctgagatgcctcagaactaccggccgcatccccagaggttcacatactgctctcaggtgctgggcctgcactgctacaagaaggggatccactactgggaggtggagctgcagaagaacaacttctgtggggtaggcatctgctacggaagcatgaaccggcagggcccagaaagcaggctcggccgcaacagcgcctcctggtgcgtggagtggttcaacaccaagatctctgcctggcacaataacgtggagaaaaccctgccctccaccaaggccacgcgggtgggcgtgcttctcaactgtgaccacggctttgtcatcttcttcgctgttgccgacaaggtccacctgatgtataagttcagggtggactttactgaggctttgtacccggctttctgggtattttctgctggtgccacactctccatctgctcccccaagtaggcaggctgtaggcacttgggctgactgcctgcagaagtcccaagaccctagtgaaaatacagcaggcagaactctccttggataattccccaagaggtcccaaggattgggagcatgggaggggagctggcgggagggtgggaggtgggatttagccaggaaaggggtgagagtgattgtgttgtgggcgaggaggcgtttccaccccctggtgcctatcagggcagggtgacctactccccattgttctggaaatctccaggctgctgggcagctgggcagagctctgggaagtgaagtcatgagtgcccgattcctcttagagaaaatccatagccttcagatcttggtgttttgaattc

SEQ ID NO: 152641 - protein, 441 aa, Artificial Sequence
  derived and/or modified sequence
MVPPKLHVLFCLCGCLAVVYPFDWQYINPVAHMKSSAWVNKIQVLMAAASFGQTKIPRGNGPYSVGCTDLMFDHTNKGTFLRLYYPSQDNDRLDTLWIPNKEYFWGLSKFLGTHWLMGNILRLLFGSMTTPANWNSPLRPGEKYPLVVFSHGLGAFRTLYSAIGIDLASHGFIVAAVEHRDRSASATYYFKDQSAAEIGDKSWLYLRTLKQEEETHIRNEQVRQRAKECSQALSLILDIDHGKPVKNALDLKFDMEQLKDSIDREKIAVIGHSFGGATVIQTLSEDQRFRCGIALDAWMFPLGDEVYSRIPQPLFFINSEYFQYPANIIKMKKCYSPDKERKMITIRGSVHQNFADFTFATGKIIGHMLKLKGDIDSNVAIDLSNKASLAFLQKHLGLHKDFDQWDCLIEGDDENLIPGTNINTTNQHIMLQNSSGIEKYN

SEQ ID NO: 152642 - protein, 219 aa, Artificial Sequence
  derived and/or modified sequence
MAAASFGQTKIPRGNGPYSVGCTDLMFDHTNKGTFLRLYYPSQDNDRLDTLWIPNKEYFWGLSKFLGTHWLMGNILRLLFGSMTTPANWNSPLRPGEKYPLVVFSHGLGAFRTLYSAIGIDLASHGFIVAAVEHRDRSASATYYFKDQSAAEIGDKSWLYLRTLKQEEETHIRNEQVRQRAKECSQALSLILDIDHGKPVKNALDLKFDMEQLKVSYKK

SEQ ID NO: 152643 - DNA, 1326 bp, Artificial Sequence
  derived and/or modified sequence
atggtcccccccaaactacatgtcctgttttgcctgtgtgggtgtcttgctgtggtgtacccgtttgattggcaatatataaaccctgtagcgcacatgaagagcagtgcctgggtgaataaaattcaggtgttgatggctgcagcaagctttggccagaccaagatacccagaggaaatgggccctactctgttgggtgcacagacttaatgttcgatcataccaacaaaggcactttccttaggctctactatcccagccaagacaacgatagactcgacactctctggataccgaacaaagagtacttttggggactgtccaaatttctgggcacccattggctgatgggcaatatcctgagacttctgtttgggtcgatgacaacgcccgctaactggaattcccccctgcggccgggggagaaataccccctcgtcgtgttcagccatggcctcggtgcgttccgcactctctactcagctattggaatcgacttagcctcacacgggtttatcgtggcagcagttgagcatcgggacagaagtgcctctgctacctactattttaaggatcagagcgcagcggagataggtgacaaatcctggctttacctccgcacgcttaaacaggaagaagagactcacatacgtaatgaacaggttcgccaacgagccaaggagtgttcgcaagcgttgagcctaatccttgacatcgaccacgggaaaccagtgaagaatgctctcgatcttaagttcgacatggaacaactcaaagattctattgaccgggaaaaaatcgctgtgatcggacactcttttggcggagcgacggtgattcagactctttcagaagaccagagatttagatgcggcatcgcactcgacgcctggatgtttccactaggcgatgaggtatactctcgaatacctcagccattattcttcatcaacagtgaatatttccagtaccctgccaacattatcaagatgaaaaaatgctacagtcccgataaggaacgcaaaatgattactatccgcgggagtgtgcaccagaatttcgccgattttaccttcgccacagggaaaattataggacacatgctcaaacttaaaggagacatcgatagtaacgtggcaattgacctttcaaacaaggcttcactggcgtttctgcagaagcaccttggcctgcataaagactttgaccagtgggactgcctgatcgagggagacgatgaaaatctgattcccggcactaacattaataccacaaaccagcatattatgcttcaaaactctagcgggatcgagaaatacaattag

SEQ ID NO: 152644 - DNA, 1326 bp, Artificial Sequence
  derived and/or modified sequence
atggtgcctccgaagcttcacgtcctcttttgcttatgtggttgcctagccgtcgtatacccatttgactggcagtatatcaatcccgtcgcccacatgaaatccagcgcatgggttaataagatccaggttctgatggctgcagcgtcctttggccagactaaaatcccgcgtgggaatgggccatactcggtgggatgtactgacctgatgttcgatcacactaataagggcacattcctgcggctctactacccctcccaagacaatgatagattagacaccctctggattccaaacaaggaatatttttgggggctttccaaattcctggggacacactggctcatgggaaatattctgagacttctatttggttctatgaccactcctgccaactggaattctcctttgcggccgggcgagaaatacccgctagtggtgtttagtcacggactcggtgccttccgaacactctactcagccatcggcatcgacctggcgagtcatggtttcattgtggctgccgtggaacatcgagaccggagtgctagcgctacttactatttcaaggaccagagcgcagccgagatcggcgacaaaagctggctgtacctgagaaccttaaaacaggaggaggagacacacatcagaaacgaacaggtccgccaaagggctaaggaatgtagccaggccttgtccctgattctggatattgatcatgggaagcctgtcaagaatgctctggacctgaagtttgatatggaacagctgaaggactccatcgacagagagaagattgctgtcatcggccactctttcggaggcgctaccgttattcagactcttagcgaagatcagagatttcgttgtgggattgcacttgacgcctggatgttcccacttggcgacgaggtttattcacggataccccagcctctctttttcatcaatagtgaatatttccagtatcctgccaacatcataaaaatgaagaagtgctacagtcctgacaaagaaaggaagatgattactatcaggggcagcgtccatcagaattttgccgatttcacatttgcgacagggaagattattgggcatatgttgaagctgaagggtgatatcgatagcaacgttgccatcgatctctctaataaagcaagcttggcgttcctccagaaacacttgggtctgcacaaggatttcgatcagtgggactgcttgatagagggggatgacgaaaatctgataccgggtaccaatatcaacacaactaaccagcatattatgctgcagaatagcagcggtatcgaaaagtataactag

SEQ ID NO: 152645 - DNA, 1326 bp, Artificial Sequence
  derived and/or modified sequence
atggtgccccccaagctgcacgtgctcttctgcctgtgtggctgcctggccgtggtgtacccctttgactggcagtacatcaaccctgtggcccacatgaagagcagcgcctgggtgaacaagatccaggtgctgatggccgccgccagctttggccagaccaagatccccagaggaaatggcccctacagcgtgggctgcacagacctgatgtttgaccacaccaacaagggcaccttcctgcggctgtactaccccagccaggacaatgaccggctggacaccctgtggatccccaacaaggagtacttctggggcctgagcaagttcctgggcacccactggctgatgggcaacatcctgcggctgctgtttggctccatgaccaccccagccaactggaacagccccctgcggcctggagagaagtaccccctggtggtgttcagccacggcctgggcgccttccgcaccctgtacagcgccatcggcatcgacctggccagccacggcttcatcgtggccgctgtggagcaccgggacagaagtgccagcgccacctactacttcaaggaccagagcgctgctgagatcggggacaagtcctggctgtacctgcggaccctgaagcaggaggaggagacccacatcagaaatgagcaggtgcggcagagggccaaggagtgcagccaggccctgagcctcatcctggacatcgaccacggcaagcctgtgaagaatgccctggacctgaagtttgacatggagcagctgaaggacagcattgaccgggagaagattgctgtgattggccacagctttggaggagccaccgtcatccagaccctgtctgaggaccagcgcttccgctgtggcatcgccctggatgcctggatgttccccctgggagatgaggtgtacagccgcatcccccagcccctcttcttcatcaacagcgagtacttccagtacccagccaacatcatcaagatgaagaagtgctacagcccagacaaggagaggaagatgatcaccatccggggctctgtgcaccagaactttgctgacttcacctttgccaccgggaagatcatcggccacatgctgaagctgaagggggacatcgacagcaatgtggccatcgacctgagcaacaaggccagcctggccttcctgcagaagcacctgggcctgcacaaggactttgaccagtgggactgcctgattgaaggagatgatgagaacctgatccctggcaccaacatcaacaccaccaaccagcacatcatgctgcagaacagcagcggcatcgagaagtacaactag

SEQ ID NO: 152646 - DNA, 1326 bp, Artificial Sequence
  derived and/or modified sequence
atggtgccccccaagctgcacgtgctgttctgcctgtgcggctgcctggcggtcgtctatccttttgactggcagtacatcaacccagtcgcccatatgaagagcagcgcatgggtgaacaagatccaagtactcatggcggcggcatcattcggccagaccaagattcctcggggaaacggaccgtattctgttgggtgcacagatttgatgtttgatcacactaacaagggcactttcctcagactgtactacccgtcccaggataacgacagactcgatacgttgtggatccccaacaaggagtacttttggggcctctcaaaattcttgggtacgcattggctgatgggaaatatactgagattgctgttcggtagtatgacaacacccgcaaactggaattccccgcttcggccaggcgagaaatatcccctggtcgtgttttcacacggcctgggcgctttccgcactctgtacagcgccataggcatcgatctcgcctcccacggattcatagtggccgcggtagagcaccgggacaggtccgcctctgcaacctactattttaaggatcagagcgcagcagagattggcgacaaatcatggttgtacttgcggacattgaagcaggaagaggagacgcacatccggaatgaacaggtgcggcagcgggccaaagagtgttcccaagccctctctctgattttggacatcgaccatgggaagcccgtcaaaaatgccctcgacttgaagtttgatatggagcagttgaaggacagcattgaccgggaaaagatcgccgtgatcgggcattcctttggtggggccacagtcattcagactctgtcagaagaccagagattccgctgcgggatagctttggacgcgtggatgtttccactgggagacgaggtgtatagtaggatcccccagcccctcttcttcatcaattctgagtattttcagtaccccgctaatatcattaagatgaagaaatgttactcccctgacaaagaaaggaagatgatcaccatacgaggcagtgtgcaccagaactttgctgattttacctttgcaactgggaagatcataggccacatgctcaagttaaagggcgatatcgacagcaatgtggcaatcgatctcagcaacaaagccagcctagcatttttgcagaagcatttggggctccataaggacttcgaccagtgggactgcctgattgaaggcgacgacgagaatctgatcccaggaactaatatcaatacaacaaatcagcatataatgctccagaactcctccgggatcgagaaatacaactag

SEQ ID NO: 152647 - DNA, 1326 bp, Artificial Sequence
  derived and/or modified sequence
atggtgccccccaagctgcacgtgctgttctgcctgtgcggctgcttggcagtagtttatccttttgactggcaatacatcaaccctgtagcccacatgaagtcatcagcttgggtgaacaagatccaggtgttgatggctgctgcaagcttcggccagacaaagattccgagaggaaacggcccttactccgtgggctgcacagatcttatgttcgatcacaccaacaaagggaccttcctgaggttgtactacccttcccaggacaacgacaggctcgataccctgtggatccccaacaaagagtatttctggggtctcagcaagttcttaggtacccattggctgatggggaacattctgcggctgctgttcggatcaatgacaactcccgctaactggaactcgcctctacgacccggtgagaagtacccactggtcgtattcagccatgggctgggagcgtttcgtaccctatactcagcaataggcatcgatctggcttctcatggcttcatcgtagccgcggtcgagcaccgagaccggagtgcttccgccacctattacttcaaggaccaaagcgcagccgaaattggagacaagagctggctgtaccttcggacgctcaaacaagaagaggaaactcacatccgcaatgaacaggtcagacagagggcgaaagaatgctcccaggcactgtcgcttattctggacattgaccatggaaaacccgtgaagaacgccttagatctcaagttcgatatggaacagctgaaagattccatcgacagagaaaaaattgccgtgattggccactcgtttggtggcgccacagttattcagactctgtcagaggaccaacgctttcgatgcggcattgcactggacgcctggatgtttccgctgggcgatgaggtttacagcagaatcccacagcctctgtttttcattaattccgagtatttccaataccctgccaatataatcaaaatgaagaaatgctactcacctgacaaagagcgcaagatgatcacaattcgcggttcagtgcaccagaattttgcagactttacctttgcaacgggcaaaataataggacacatgttgaagttaaaaggcgatatcgactctaatgtcgccatcgatctgtccaacaaagcctctttggcctttttgcaaaagcaccttgggcttcataaagatttcgatcaatgggattgccttattgagggtgacgacgagaacttgatccctggcacaaatattaacactacaaatcagcatatcatgctgcaaaactcatccggtatcgagaagtataactag

SEQ ID NO: 152648 - DNA, 1882 bp, Artificial Sequence
  derived and/or modified sequence
gccagagctgctcggcccgcagccagggggacagcggctggtcggaggctcgcagtgctgtcggcgagaagcagtcgggtttggagcgcttgggtcgcgttggtgcgcggtggaacgcgcccagggaccccagttcccgcgagcagctccgcgccgcgcctgagagactaagctgaaactgctgctcagctcccaagatggtgccacccaaattgcatgtgcttttctgcctctgcggctgcctggctgtggtttatccttttgactggcaatacataaatcctgttgcccatatgaaatcatcagcatgggtcaacaaaatacaagtactgatggctgctgcaagctttggccaaactaaaatcccccggggaaatgggccttattccgttggttgtacagacttaatgtttgatcacactaataagggcaccttcttgcgtttatattatccatcccaagataatgatcgccttgacaccctttggatcccaaataaagaatatttttggggtcttagcaaatttcttggaacacactggcttatgggcaacattttgaggttactctttggttcaatgacaactcctgcaaactggaattcccctctgaggcctggtgaaaaatatccacttgttgttttttctcatggtcttggggcattcaggacactttattctgctattggcattgacctggcatctcatgggtttatagttgctgctgtagaacacagagatagatctgcatctgcaacttactatttcaaggaccaatctgctgcagaaataggggacaagtcttggctctaccttagaaccctgaaacaagaggaggagacacatatacgaaatgagcaggtacggcaaagagcaaaagaatgttcccaagctctcagtctgattcttgacattgatcatggaaagccagtgaagaatgcattagatttaaagtttgatatggaacaactgaaggactctattgatagggaaaaaatagcagtaattggacattcttttggtggagcaacggttattcagactcttagtgaagatcagagattcagatgtggtattgccctggatgcatggatgtttccactgggtgatgaagtatattccagaattcctcagcccctcttttttatcaactctgaatatttccaatatcctgctaatatcataaaaatgaaaaaatgctactcacctgataaagaaagaaagatgattacaatcaggggttcagtccaccagaattttgctgacttcacttttgcaactggcaaaataattggacacatgctcaaattaaagggagacatagattcaaatgtagctattgatcttagcaacaaagcttcattagcattcttacaaaagcatttaggacttcataaagattttgatcagtgggactgcttgattgaaggagatgatgagaatcttattccagggaccaacattaacacaaccaatcaacacatcatgttacagaactcttcaggaatagagaaatacaattaggattaaaataggttttttaaaagtcttgtttcaaaactgtctaaaattatgtgtgtgtgtgtgtgtgtgtgtgtgtgtgtgagagagagagagagagagagagagagagagagagagaattttaatgtattttcccaaaggactcatattttaaaatgtaggctatactgtaatcgtgattgaagcttggactaagaattttttccctttagatgtaaagaaagaatacagtatacaatattcatatcagcctaaattttaattttaaagatgattccttttcagtgtcgaagttaaaaactgtttttacattactttgacagacaagtagattaaaacaggcaaaatcccagtgaaaa

SEQ ID NO: 152649 - DNA, 1747 bp, Artificial Sequence
  derived and/or modified sequence
ggaaaaccggcctgactggggggtgaattcagcagggagtaaatctgatcggcatcaggtctgcggaaaggagctggtgagcacgacaccacccaggcattgcctggctctctccgcggcgggctaagttaaccgcgggtccaggagactaagctgaaactgctgctcagctcccaagatggtgccacccaaattgcatgtgcttttctgcctctgcggctgcctggctgtggtttatccttttgactggcaatacataaatcctgttgcccatatgaaatcatcagcatgggtcaacaaaatacaagtactgatggctgctgcaagctttggccaaactaaaatcccccggggaaatgggccttattccgttggttgtacagacttaatgtttgatcacactaataagggcaccttcttgcgtttatattatccatcccaagataatgatcgccttgacaccctttggatcccaaataaagaatatttttggggtcttagcaaatttcttggaacacactggcttatgggcaacattttgaggttactctttggttcaatgacaactcctgcaaactggaattcccctctgaggcctggtgaaaaatatccacttgttgttttttctcatggtcttggggcattcaggacactttattctgctattggcattgacctggcatctcatgggtttatagttgctgctgtagaacacagagatagatctgcatctgcaacttactatttcaaggaccaatctgctgcagaaataggggacaagtcttggctctaccttagaaccctgaaacaagaggaggagacacatatacgaaatgagcaggtacggcaaagagcaaaagaatgttcccaagctctcagtctgattcttgacattgatcatggaaagccagtgaagaatgcattagatttaaagtttgatatggaacaactgaaggactctattgatagggaaaaaatagcagtaattggacattcttttggtggagcaacggttattcagactcttagtgaagatcagagattcagatgtggtattgccctggatgcatggatgtttccactgggtgatgaagtatattccagaattcctcagcccctcttttttatcaactctgaatatttccaatatcctgctaatatcataaaaatgaaaaaatgctactcacctgataaagaaagaaagatgattacaatcaggggttcagtccaccagaattttgctgacttcacttttgcaactggcaaaataattggacacatgctcaaattaaagggagacatagattcaaatgtagctattgatcttagcaacaaagcttcattagcattcttacaaaagcatttaggacttcataaagattttgatcagtgggactgcttgattgaaggagatgatgagaatcttattccagggaccaacattaacacaaccaatcaacacatcatgttacagaactcttcaggaatagagaaatacaattaggattaaaataggttttttaaaagtcttgtttcaaaactgtctaaaattatgtgtgtgtgtgtgtgtgtgtgtgtgtgtgtgagagagagagagagagagagagagagagagagagagaattttaatgtattttcccaaaggactcatattttaaaatgtaggctatactgtaatcgtgattgaagcttggactaagaattttttccctttagatgtaaagaaagaatacagtatacaatattc

SEQ ID NO: 152650 - DNA, 1326 bp, Artificial Sequence
  derived and/or modified sequence
atggtccctccgaagctgcacgttctcttttgtttatgcggatgcctcgctgtagtctacccttttgactggcagtacataaacccagtggcgcatatgaaatcaagcgcctgggtgaacaagatacaggtgttaatggcagcggcatccttcggccagacaaagatccccagaggaaatgggccttactctgttggctgtacggatctgatgtttgaccataccaataagggaacctttcttagactttactacccctcccaggataatgataggctggacaccttatggattcctaacaaagagtacttctggggcctatccaagtttctcggcactcactggctgatggggaacatcctgcgtctcttgttcggctctatgactaccccagctaattggaacagtcctctgcggcctggtgagaaataccccctcgtggtcttctcccacggccttggagcctttcgaaccctctattcagccattggaattgatttagcctcccacgggtttattgtagcagccgtcgaacatagagatcgctcagcatcagcaacctactattttaaagatcaaagtgctgctgaaataggcgacaagagttggctatatttgagaaccctgaagcaggaggaagaaacccatatacgcaacgaacaagtacgacagcgcgcaaaggagtgcagtcaagccctgagccttattttggatatcgaccacggcaaacctgtgaaaaacgccctcgatctgaagtttgacatggaacaactgaaagactcaatcgacagagaaaagattgctgttattgggcacagttttgggggtgccacggtgatccaaacactcagcgaggatcagcggtttcggtgtggtattgccttggatgcctggatgttccccctcggggacgaggtctatagcagaatacctcagcccctgttttttatcaacagcgagtattttcaataccccgcaaacattatcaagatgaagaagtgttactcgcccgataaggaaaggaaaatgatcaccatccggggaagcgtgcaccagaacttcgccgactttacattcgccaccggcaagattatcggccacatgttaaagctgaagggtgacattgactcaaatgtggcaatagacttgagtaacaaagcttccttagccttcctgcagaaacaccttggcctgcataaggattttgaccagtgggactgtttgatagagggcgacgatgagaatctgataccgggtaccaacataaataccactaaccaacacattatgttacagaatagcagcggaattgaaaaatacaactag

SEQ ID NO: 152651 - DNA, 1326 bp, Artificial Sequence
  derived and/or modified sequence
atggtgcccccaaagctacacgtgctgttctgcctgtgtggatgccttgcagtggtgtatccttttgactggcagtatatcaatcccgtggcccacatgaagtcctccgcctgggttaacaaaatacaggtcctcatggctgcagccagcttcggacagacaaaaatcccccgaggtaatggcccatattctgtcggttgtacagacctcatgtttgatcataccaataaggggacatttctgcgactgtactacccatcacaagacaatgatagactagacaccctgtggatcccaaataaggagtacttttggggtttgtctaaatttttagggacacattggctgatgggcaacatcctgaggctgctctttggaagcatgaccaccccagcaaattggaattcaccgctgcgtccaggtgagaaataccccttagtagtgtttagtcatggactgggcgctttcaggaccctctatagtgccatcggaatcgacttggcctctcatggtttcattgtggcagctgtggagcatcgcgataggtcagctagtgccacatactatttcaaagaccagagcgctgccgaaatcggtgacaagtcatggctttacctaagaaccctgaagcaggaggaggaaacccatattaggaacgagcaagtgaggcagagagcaaaagagtgtagccaggctctgtccctgatcctggacatcgaccatggtaaaccagtcaaaaatgccctggatctcaaatttgatatggagcagttgaaagattccattgacagagagaagatcgcagtgatcgggcacagttttggcggagctaccgttatccagactctgagtgaggaccagcgttttaggtgcggaatagcgcttgacgcgtggatgttccctctgggcgatgaggtctacagcaggattccacagccgctatttttcattaactccgagtatttccagtatccggctaacataattaaaatgaaaaagtgttactccccagacaaagaaagaaaaatgatcacaataagaggatctgtgcaccaaaacttcgctgacttcacgtttgccaccggcaaaatcattggccacatgctgaaacttaagggcgatatcgactcaaacgtggccatcgatctatcgaacaaagcttctctcgcctttctgcaaaaacacctgggcttgcacaaagattttgaccagtgggattgcttaatcgaaggggacgatgagaacctcatccccggaacaaatatcaatacaactaatcaacatataatgctgcagaattcaagcggaatcgaaaaatacaactag

SEQ ID NO: 152652 - DNA, 1326 bp, Artificial Sequence
  derived and/or modified sequence
atggtgccccccaagctgcacgtgctgttctgcctgtgcggctgcctggccgtggtgtaccccttcgactggcagtacatcaaccccgtggcccacatgaagagcagcgcctgggtgaacaagatccaggtgctgatggccgccgccagcttcggccagaccaagatccccagaggcaacggcccctacagcgtgggctgcaccgacctgatgttcgaccacaccaacaagggcaccttcctgagactgtactaccccagccaggacaacgacagactggacaccctgtggatccccaacaaggagtacttctggggcctgagcaagttcctgggcacccactggctgatgggcaacatcctgagactgctgttcggcagcatgaccacccccgccaactggaacagccccctgagacccggcgagaagtaccccctggtggtgttcagccacggcctgggcgccttcagaaccctgtacagcgccatcggcatcgacctggccagccacggcttcatcgtggccgccgtggagcacagagacagaagcgccagcgccacctactacttcaaggaccagagcgccgccgagatcggcgacaagagctggctgtacctgagaaccctgaagcaggaggaggagacccacatcagaaacgagcaggtgagacagagagccaaggagtgcagccaggccctgagcctgatcctggacatcgaccacggcaagcccgtgaagaacgccctggacctgaagttcgacatggagcagctgaaggacagcatcgacagagagaagatcgccgtgatcggccacagcttcggcggcgccaccgtgatccagaccctgagcgaggaccagagattcagatgcggcatcgccctggacgcctggatgttccccctgggcgacgaggtgtacagcagaatcccccagcccctgttcttcatcaacagcgagtacttccagtaccccgccaacatcatcaagatgaagaagtgctacagccccgacaaggagagaaagatgatcaccatcagaggcagcgtgcaccagaacttcgccgacttcaccttcgccaccggcaagatcatcggccacatgctgaagctgaagggcgacatcgacagcaacgtggccatcgacctgagcaacaaggccagcctggccttcctgcagaagcacctgggcctgcacaaggacttcgaccagtgggactgcctgatcgagggcgacgacgagaacctgatccccggcaccaacatcaacaccaccaaccagcacatcatgctgcagaacagcagcggcatcgagaagtacaactag

SEQ ID NO: 152653 - protein, 2090 aa, Artificial Sequence
  derived and/or modified sequence
MGDEMDAMIPEREMKDFQFRALKKVRIFDSPEELPKERSSLLAVSNKYGLVFAGGASGLQIFPTKNLLIQNKPGDDPNKIVDKVQGLLVPMKFPIHHLALSCDNLTLSACMMSSEYGSIIAFFDVRTFSNEAKQQKRPFAYHKLLKDAGGMVIDMKWNPTVPSMVAVCLADGSIAVLQVTETVKVCATLPSTVAVTSVCWSPKGKQLAVGKQNGTVVQYLPTLQEKKVIPCPPFYESDHPVRVLDVLWIGTYVFAIVYAAADGTLETSPDVVMALLPKKEEKHPEIFVNFMEPCYGSCTERQHHYYLSYIEEWDLVLAASAASTEVSILARQSDQINWESWLLEDSSRAELPVTDKSDDSLPMGVVVDYTNQVEITISDEKTLPPAPVLMLLSTDGVLCPFYMINQNPGVKSLIKTPERLSLEGERQPKSPGSTPTTPTSSQAPQKLDASAAAAPASLPPSSPAAPIATFSLLPAGGAPTVFSFGSSSLKSSATVTGEPPSYSSGSDSSKAAPGPGPSTFSFVPPSKASLAPTPAASPVAPSAASFSFGSSGFKPTLESTPVPSVSAPNIAMKPSFPPSTSAVKVNLSEKFTAAATSTPVSSSQSAPPMSPFSSASKPAASGPLSHPTPLSAPPSSVPLKSSVLPSPSGRSAQGSSSPVPSMVQKSPRITPPAAKPGSPQAKSLQPAVAEKQGHQWKDSDPVMAGIGEEIAHFQKELEELKARTSKACFQVGTSEEMKMLRTESDDLHTFLLEIKETTESLHGDISSLKTTLLEGFAGVEEAREQNERNRDSGYLHLLYKRPLDPKSEAQLQEIRRLHQYVKFAVQDVNDVLDLEWDQHLEQKKKQRHLLVPERETLFNTLANNREIINQQRKRLNHLVDSLQQLRLYKQTSLWSLSSAVPSQSSIHSFDSDLESLCNALLKTTIESHTKSLPKVPAKLSPMKQAQLRNFLAKRKTPPVRSTAPASLSRSAFLSQRYYEDLDEVSSTSSVSQSLESEDARTSCKDDEAVVQAPRHAPVVRTPSIQPSLLPHAAPFAKSHLVHGSSPGVMGTSVATSASKIIPQGADSTMLATKTVKHGAPSPSHPISAPQAAAAAALRRQMASQAPAVNTLTESTLKNVPQVVNVQELKNNPATPSTAMGSSVPYSTAKTPHPVLTPVAANQAKQGSLINSLKPSGPTPASGQLSSGDKASGTAKIETAVTSTPSASGQFSKPFSFSPSGTGFNFGIITPTPSSNFTAAQGATPSTKESSQPDAFSSGGGSKPSYEAIPESSPPSGITSASNTTPGEPAASSSRPVAPSGTALSTTSSKLETPPSKLGELLFPSSLAGETLGSFSGLRVGQADDSTKPTNKASSTSLTSTQPTKTSGVPSGFNFTAPPVLGKHTEPPVTSSATTTSVAPPAATSTSSTAVFGSLPVTSAGSSGVISFGGTSLSAGKTSFSFGSQQTNSTVPPSAPPPTTAATPLPTSFPTLSFGSLLSSATTPSLPMSAGRSTEEATSSALPEKPGDSEVSASAASLLEEQQSAQLPQAPPQTSDSVKKEPVLAQPAVSNSGTAASSTSLVALSAEATPATTGVPDARTEAVPPASSFSVPGQTAVTAAAISSAGPVAVETSSTPIASSTTSIVAPGPSAEAAAFGTVTSGSSVFAQPPAASSSSAFNQLTNNTATAPSATPVFGQVAASTAPSLFGQQTGSTASTAAATPQVSSSGFSSPAFGTTAPGVFGQTTFGQASVFGQSASSAASVFSFSQPGFSSVPAFGQPASSTPTSTSGSVFGAASSTSSSSSFSFGQSSPNTGGGLFGQSNAPAFGQSPGFGQGGSVFGGTSAATTTAATSGFSFCQASGFGSSNTGSVFGQAASTGGIVFGQQSSSSSGSVFGSGNTGRGGGFFSGLGGKPSQDAANKNPFSSASGGFGSTATSNTSNLFGNSGAKTFGGFASSSFGEQKPTGTFSSGGGSVASQGFGFSSPNKTGGFGAAPVFGSPPTFGGSPGFGGVPAFGSAPAFTSPLGSTGGKVFGEGTAAASAGGFGFGSSSNTTSFGTLASQNAPTFGSLSQQTSGFGTQSSGFSGFGSGTGGFSFGSNNSSVQGFGGWRS

SEQ ID NO: 152654 - DNA, 6273 bp, Artificial Sequence
  derived and/or modified sequence
atgggtgatgaaatggacgctatgatccccgagagggagatgaaggacttccagtttcgagcgttaaagaaagttagaatctttgacagccccgaggagctacccaaggagcgtagctccctgctggctgtcagtaataaatacggactggtgtttgccgggggcgcctcaggattgcaaatatttccgaccaaaaatttgctgatccagaacaagcccggggacgatccgaacaaaattgtagataaggttcagggtctcctagtgccaatgaaattccccattcatcacctcgcactcagttgtgataatctcaccctgtcagcttgcatgatgagctcagagtatggaagcatcatcgcgttcttcgacgtcaggacattctcaaacgaggctaagcagcaaaagcgcccattcgcatatcataagttactaaaggatgctggcggaatggttatagacatgaagtggaatcctactgtgccaagcatggtcgccgtgtgtctcgcagatggtagtatcgcagttctgcaggtgaccgagacagtcaaagtctgcgctacactcccaagcacagtcgcagtcacatctgtgtgctggtctccaaaaggaaagcagctggctgtagggaagcagaatgggaccgtggtgcagtacctgccaaccttgcaagaaaaaaaggtgatcccgtgcccgccgttttacgaaagcgaccatccagtcagagtgctcgacgtgctgtggatcggcacatacgtgttcgcaattgtgtatgctgcagctgacggaacactagaaacgtcccccgacgtcgtgatggcgctcttacccaaaaaggaagagaagcatccagaaatcttcgtgaactttatggagccatgctacgggtcttgcactgaacggcaacaccattattatttatcatatatagaggaatgggacctggtactcgccgcctcagctgcatctactgaggtgagcatcttggcgagacagtctgatcagatcaactgggaatcctggctgttggaggattctagccgggccgaactccctgtgacggacaagtcggacgactccctccccatgggcgtggttgtcgattacacgaaccaggtcgaaatcactatctcagacgagaagaccctgccaccagcccccgtcttgatgttgctcagcacagatggcgttttatgtcccttttacatgattaatcaaaacccaggcgtgaaaagtttgattaagacccccgagaggctgagtctggagggcgaaaggcagcccaagagcccaggaagcactcctacaaccccaacctcgtcacaagcccctcagaaactggacgcatccgctgccgccgcgccagctagcctcccaccctcttcaccagccgctccaatagccactttcagtctacttcccgccggaggcgcccccacagtgttcagttttggctcaagcagcctgaaaagctctgcgacggtgactggggaacccccctcttacagcagcgggtccgacagcagtaaagcagccccaggtcccggcccctctacatttagcttcgttcctccatctaaggcctctcttgctccaaccccagccgccagcccagttgctccttccgccgcatcattctctttcgggagctctgggttcaagcctacactagaatctacacctgtccctagtgtgagcgccccaaatattgcaatgaaaccctcgtttcccccaagcacaagcgcagttaaggtcaacttgtccgagaagtttacagctgccgccacaagtacaccagtttcaagctcacagtctgcccccccaatgtctcctttttcatccgcatcaaaacctgctgcatctgggcctctctctcatccaaccccgttatctgcacccccgtctagcgtgccactgaaatcttccgtacttcccagtccttcaggtaggagcgctcaaggttcatccagtcccgtcccttcaatggtgcagaagtccccgaggattacaccccccgccgctaagcccggaagtccccaggcgaagtcactgcaacccgccgttgcggaaaaacagggacatcagtggaaggatagtgacccagttatggctggcataggtgaggagatcgcccacttccaaaaggagctggaggaactcaaggctaggacgtccaaggcatgcttccaggtggggacgagcgaggagatgaagatgctacggaccgagtcagatgatctgcacacatttcttcttgagatcaaggagacaactgaaagcctccacggagacatttcttccttaaagaccactctcttggaggggtttgctggggtcgaggaagctagggaacaaaacgaaaggaaccgggatagcggctatctccacctgttatacaagcgcccactggatcctaaaagtgaggcccagcttcaggaaatccgccgactgcatcagtacgtcaaatttgccgtccaggacgttaatgacgtgcttgatctagaatgggatcagcatttagaacagaagaaaaagcagcgacacctgctggtgccagaaagggagacactttttaacacccttgctaacaatcgggagatcatcaaccagcaacgcaaacgtcttaatcacttggttgattcgttgcagcagctgcgattgtataagcagacctccctctggtcactctcaagcgcggttcccagccaatcaagtatccactcctttgatagcgacctggaaagtctgtgtaatgccctcctcaagacaaccattgagagtcataccaagagcctgcctaaagtgcccgcaaagttgtccccaatgaaacaggcccagctgaggaatttcctggctaaacgtaagactccccctgtacggtccaccgcccctgcctctctgtcacgtagcgcatttttatcccagaggtattacgaggatttagacgaggtgagcagtactagttccgtgagccagtctctggaatcggaggatgctcgtacatcctgtaaggatgacgaggcagtggttcaagccccacgacatgccccagtggtcaggactccgagcatacagccctctcttttgccacatgcggcccccttcgccaagtcgcacttagttcatgggtcctcccccggcgtaatgggtacttctgtggcaaccagcgcctctaagatcataccccaaggtgccgactcaaccatgctggctactaagactgtgaaacatggcgcaccatcaccatcccatcccatctccgcaccccaggctgccgctgcagctgcacttcgaagacagatggccagccaggctcccgcggtgaataccctgacggagtccaccctcaagaacgtgcctcaggtggttaacgtgcaggagctgaaaaacaatcccgccactcccagcacagctatgggtagcagtgtcccatactccaccgcgaaaaccccacacccagtactgaccccggtcgccgcaaatcaggcgaagcaagggagcctcataaactccttaaaaccaagcggtccaacccctgcctcagggcaactttctagcggagacaaggcttctggaacagccaagatcgaaaccgccgtgacctccacccccagcgcaagcgggcagttttctaaacctttttcattcagcccaagtggcacaggatttaatttcggcattataacacccactcccagctctaacttcactgccgcccagggagccaccccttccacgaaggagtcgagccaacccgacgcattcagctctgggggcgggtcaaaaccctcgtacgaagctattccagagtcaagtccgccgtctggaatcacatcagcttccaatacaactccaggcgagcccgccgctagctcatcaaggcctgtggccccttcagggactgcactgtcgactacatcgagtaagctggagacaccacccagcaaactgggcgagttgctctttccgagctccctcgccggggagaccctgggctctttctctgggctaagggtgggccaggcagatgactccactaagcctacaaacaaggcttctagtacctcactcacgagcacacaacctactaaaactagcggcgttccctccggtttcaatttcacagccccccccgtgcttggaaaacacacggaaccgcctgttacgtcctcagccacaacaacctcagtggcgcctccagccgcaacaagcacctccagtacggcggtgttcggcagtcttccagtaacatcggccggttcttccggggtcatcagtttcggcggcacaagtctcagtgcaggaaagacaagcttctccttcggctcacaacagactaattccacagtcccgcccagtgcccccccccccacaacagcagccacaccgctgcctacaagttttcctacgctcagtttcggttcgctactttctagcgctacaaccccctctctgcctatgagcgcagggagatcaacggaagaggccacaagctctgctttacccgagaagcctggagattctgaggtgagcgcttctgccgcatcgcttctcgaggagcagcagagtgcacaacttccacaagcccctccccagacttctgatagtgtgaagaaggaacctgttctggctcagcccgccgtgtccaatagcgggacagctgcatcttctacatctctggtggcactgtccgccgaggccacaccggcaacgactggcgtgccggacgctcgaaccgaggctgttccgcccgccagcagcttcagtgtgcctgggcagactgcggttacggcagccgcaatttcaagtgctggaccggttgctgttgagacatctagcacccctatcgcaagttccacgacatctatagtggcccccggacctagtgcggaagcagcagctttcgggaccgtgaccagcggaagctccgtattcgcccagcctccagccgctagctctagctcagccttcaatcagcttaccaacaacactgccaccgcaccgagcgcgactcctgtgttcggtcaggtcgccgcgtccaccgcaccaagtctgttcggccagcagaccggatctactgccagtacagccgctgcaaccccacaggtaagttcttctggattctctagcccagcatttggaactaccgcaccgggagtatttgggcagacgacatttggccaagcatctgtttttgggcagagcgcttcgtctgccgcctccgtcttttcattttcacagccgggattttcttcagttccagctttcggacagccagcctctagcactcccacaagtacttccgggagtgtgtttggggctgcatcctcgacctctagttctagtagcttctcattcggacagagttccccaaacacgggcggagggctcttcggccaatcaaatgccccagccttcggacagtccccaggcttcggccagggggggagcgtctttggtggtacctctgctgctacgacaacagccgcaacatctggcttttcgttctgtcaggcctccgggtttggttccagcaataccggctctgtcttcggccaggccgctagcaccggtggtatcgtgtttggccagcagtccagttcttctagtggatccgtgtttggctctggaaacacaggccgaggcgggggattcttctcaggactcggcggcaaaccttctcaagatgcagctaacaaaaatcctttcagcagcgcatctggtgggttcggctccacagctaccagtaatactagcaacctgttcgggaactcaggggccaaaacatttggaggtttcgcctctagcagttttggtgaacagaaacctaccggaacctttagtagtggcgggggtagcgtcgcgagtcaggggtttggcttcagctctcccaataagacagggggtttcggcgccgctccagtctttggcagccctccgacatttggcgggtcccccggcttcggcggagtgcccgcattcgggagtgcccccgcctttacctccccactcggatccaccggcggcaaggtatttggtgagggcactgctgcggccagtgccggaggtttcgggtttggcagcagcagcaataccacctcatttggcaccctggctagccagaatgccccaacctttgggagcctgtcccaacagacatcaggttttggcacgcagtctagtggcttctcgggatttggctcaggaactggtggctttagtttcggctcaaataattcctctgtacaaggattcggtgggtggcgctcctag

SEQ ID NO: 152655 - DNA, 4560 bp, Artificial Sequence
  derived and/or modified sequence
atgaaaccaagcttccctcccagcacctccgcagtcaaggtgaacctatcagagaaatttaccgctgccgcaacctctacccccgttagcagcagccaaagtgcacctcccatgagccccttttccagtgccagcaagccggccgcctctggtcctctaagccatcctactccactgagtgcgcctcctagttcggtcccgctaaaaagttccgtgctgccgtctccttctgggagaagcgctcagggtagttctagccccgtgccttcgatggtgcagaagtcccctcgcattactcctcccgcagcaaagcctggctcccctcaggccaaatctcttcaacctgccgtggctgagaaacaggggcaccagtggaaggactctgatcccgtgatggcaggcatcggagaggaaatcgcgcactttcagaaggaattggaggaattgaaggcacgtacctcgaaagcctgcttccaggtcggcaccagcgaggagatgaaaatgcttcgaactgaatccgatgatctgcacacttttctattggagattaaggagaccactgaatctctgcatggagacatttcatcactgaagactacactgttggaaggctttgccggggttgaagaagcaagagaacagaacgaacgtaaccgcgacagtggttacttacacttgctgtataagcgccccctagatcccaagtctgaagctcagctgcaggagatcagacgtctgcatcagtacgttaagtttgctgttcaggacgtgaatgatgtgctcgatctggaatgggaccagcacctagagcagaagaagaagcagaggcatctactggtccccgagagagagacactgttcaacacgctggccaataaccgcgagatcattaatcagcagcggaagcggctgaatcacttagttgactctcttcagcagttgcgtttgtacaaacagacatcactctggagcctgtcttccgccgtaccatcgcagagctctatccattccttcgactccgacttggagtcactctgcaacgccctgctcaaaacaaccatagagagccacacgaagagcttgcccaaagtacccgcaaaactgagccccatgaagcaggcgcaattacgtaattttttggccaaacggaagacgcctccggtaagatcgactgccccagctagtttatccagatcagccttcctctcccagcgatattacgaggacctagacgaggtaagtagtacatcttctgtgtcccagtccctggagtcggaggatgccagaacatcatgtaaagatgatgaggcggtggtacaagctccgcgccatgcccctgtggtccggacacctagcattcagccatctttgttacctcatgccgcaccttttgccaagtcccacctcgtccacggatcctctcccggcgtgatgggtaccagtgtcgcaaccagcgcttcgaagattattcctcagggcgccgatagtactatgctggcaacgaagacagtcaagcatggggcccctagtccatcccaccccatttctgctccacaggctgcagctgctgctgccctccggaggcagatggcctcccaggcccctgcggtcaacacattgaccgagagcactctgaagaacgtgccgcaagttgtaaacgtccaggaactcaaaaacaaccccgccaccccttctacagcaatgggcagtagcgttccatattctactgctaagactccacatcccgttctaacccctgtggcggctaatcaagctaaacaggggtcacttattaatagtctgaagcccagcggaccaactccggcttctggccaactgtcttctggtgacaaggcttcgggcaccgccaagattgaaacagctgtgacaagcactccaagcgcttctggccagttttccaagccattttccttttctccctccgggacaggatttaactttgggatcataactcccaccccctcgtctaatttcacagctgcccagggcgcaaccccaagcaccaaggagagcagccaaccagacgcatttagctccggagggggatctaaacccagctacgaggcgatccccgagtcttccccacccagtggaatcaccagtgcgagcaataccacccccggggagccagctgcttcctctagtcggccagtggcaccatctggtaccgccctgagcaccacaagtagcaaactggagacaccgccatcaaagctcggagaactcctctttcctagtagtctcgcaggcgagacattggggtctttctcgggcctccgcgttggccaagcagatgactctactaaacccaccaacaaagccagtagcacctctcttacaagtactcagcccacaaaaacaagcggagtaccctctgggtttaattttacagctccacctgtcctcggcaagcataccgagcctccagttacgtcttctgccaccacaacttcagtggcgcccccggccgccacgagcacctctagcacggccgtcttcggatccttacctgtgacgagcgccggctcttctggagttatcagctttgggggcacctccttgtctgccggaaagacatcttttagttttggatcacagcaaacaaactctacagtgcccccctccgcaccccccccaacaacggcagctactccactccctactagtttccctaccctctctttcggttctctactcagctcagcgacaactccttctctcccaatgtccgccggcagatcaactgaagaggccaccagctctgcactcccagaaaaacccggagacagcgaggtaagcgcatcagctgcaagccttctggaagagcaacagtccgcccagctgccccaggctccccctcaaacaagcgacagtgtcaaaaaggaaccagtgctggcccaaccagcagtctccaactcaggcacagctgcatcttccacttccctagtcgccctttctgcagaagccacgcctgctaccacaggggtgcccgacgcaaggacagaagcagtgcctccagccagcagcttcagcgtgcctgggcaaactgcggtgacagctgctgccatatcaagcgccggcccagtggctgtggagacatcaagtacccctatcgcatcctccacaacctccatcgtggccccgggaccctcagccgaggcagctgcattcgggacagttacctccgggtcgtccgttttcgctcagccaccagccgcttcctcctcctcagcattcaaccagctgacaaacaatactgcaactgcgccatcagccacacccgttttcggccaggtggctgcttcaactgccccttcattattcggccagcagaccggctctaccgcttcaacagcagctgctactccacaggtgagcagtagcggcttcagtagccctgcttttgggaccaccgctcctggtgtgtttggccagaccacatttggacaggcctctgtattcgggcagtcggcatcatccgccgcgagtgtgttcagtttcagccagcccgggttcagcagtgtaccagctttcggacagcccgcctctagcacacctacctccacctcaggctccgtgttcggggcggcgtcctccacttcttctagttcctccttttcctttggtcagtctagtcccaacaccggcggcggcttatttgggcagtcaaatgcacctgcgttcggccagagtccaggattcgggcaaggagggagcgtttttggggggacttccgccgcgacaacgactgctgctacaagtggcttcagcttctgtcaggcctccggcttcggatcctccaacaccggctctgttttcggtcaggccgcttcaactgggggcatcgttttcgggcagcagtcctcttcaagttccggaagtgtttttggctctgggaacactggcagaggaggcggcttcttctcaggactgggagggaaaccctcacaggatgcggccaacaaaaaccctttctcaagtgcctctggcggattcgggagcactgcaacatcaaacacttccaacttgttcgggaattccggagcaaagacttttggcggattcgcctcctcatcatttggcgaacagaaacccaccggcactttttcttccggcggaggatccgtggcatcgcagggatttggcttctccagcccgaataagaccgggggattcggggccgctcccgtgtttggctctccgcccactttcggcggcagccctggtttcggtggggtgcccgccttcgggagcgcccccgcgtttacgtctccacttgggtctactggggggaaagtgtttggagagggaaccgccgctgcttccgccggcggctttggctttggatcttcctctaacacaacaagttttggtaccctggcgtcccagaacgctccaacttttgggtcattgtcacagcagactagtggatttggaacccagtcatctggcttttctggtttcggatccggcaccggtgggttctcttttggatccaataactcctccgtgcaggggttcggagggtggcgctcctag

SEQ ID NO: 152656 - DNA, 6273 bp, Artificial Sequence
  derived and/or modified sequence
atgggagatgagatggatgccatgatccctgagcgggagatgaaggacttccagttccgggccctgaagaaggtgcgcatctttgacagccctgaggagctgcccaaggagaggagcagcctgctggccgtgagcaacaagtatggcctggtgtttgctggaggagccagcggcctgcagatcttccccaccaagaacctgctgatccagaacaagccaggagatgaccccaacaagatcgtggacaaggtgcagggcctgctggtgcccatgaagttccccatccaccacctggccctgagctgtgacaacctgaccctgagcgcctgcatgatgagcagtgaatatggcagcatcatcgccttctttgatgtgaggaccttcagcaatgaggccaagcagcagaagaggccctttgcctaccacaagctgctgaaggatgctgggggcatggtgattgacatgaagtggaaccccaccgtgcccagcatggtggccgtgtgcctggctgatggcagcattgctgtgctgcaggtgacagagaccgtgaaggtgtgtgccaccctgcccagcacagtggccgtgacctctgtgtgctggagccccaagggcaagcagctggccgtgggcaagcagaatggaacagtggtgcagtacctgcccaccctgcaggagaagaaggtgatcccctgcccccccttctatgaaagtgaccaccctgtgcgggtgctggatgtgctgtggattggcacctacgtgtttgccatcgtgtatgctgctgctgatggcaccctggagaccagcccagatgtggtgatggccctgctgcccaagaaggaggagaagcaccctgagatctttgtgaacttcatggagccctgctacggcagctgcacagagcggcagcaccactactacctgagctacatcgaggagtgggacctggtgctggccgccagcgctgccagcacagaggtgtccatcctggcccggcagagcgaccagatcaactgggagagctggctgctggaggacagcagcagagctgagctgcctgtgacagacaagagtgatgacagcctgcccatgggcgtggtggtggactacaccaaccaggtggagatcaccatcagtgatgagaagaccctgcccccagcccctgtgctgatgctgctgagcacagatggagtgctgtgccccttctacatgatcaaccagaaccctggggtgaagagcctcatcaagaccccagagcggctgagcctggagggggagcggcagcccaagagccctggcagcacccccaccacccccaccagcagccaggccccccagaagctggatgccagcgctgctgctgccccagccagcctgccccccagcagccctgctgcccccatcgccaccttcagcctgctgcctgctggaggagcccccaccgtcttctcctttggcagcagcagcctgaagagcagcgccaccgtgactggagagcccccatcctacagcagcggcagtgacagcagcaaggccgcccctggccctggccccagcaccttctcctttgtgccccccagcaaggccagcctggcccccaccccagctgccagccctgtggcccccagcgctgccagcttctcctttggcagcagcggcttcaagcccaccctggagagcacccctgtgcccagcgtgtctgcccccaacatcgccatgaagcccagcttcccccccagcaccagcgctgtgaaggtgaacctgtctgagaagttcaccgctgctgccaccagcacccctgtgagcagcagccagagcgccccacccatgagccccttcagcagcgccagcaagccagctgccagcggccccctgagccaccccacccccctgagcgccccacccagctctgtgcccctgaagagctctgtgctgcccagccccagcggccgcagcgcccagggcagcagcagccctgtgcccagcatggtgcagaagagcccccgcatcaccccacctgctgccaagccaggcagcccccaggccaagagcctgcagcctgctgtggccgagaagcagggccaccagtggaaggacagcgaccctgtgatggccggcatcggggaggagatcgcccacttccagaaggagctggaggagctgaaggcccggaccagcaaggcctgcttccaggtgggcaccagcgaggagatgaagatgctgaggacagaaagtgatgacctgcacaccttcctgctggagatcaaggagaccacagagagcctgcacggggacatcagcagcctgaagaccaccctgctggagggctttgctggggtggaggaggcccgggagcagaatgaaagaaacagagacagcggctacctgcacctgctgtacaagaggcccctggaccccaagtctgaggcccagctgcaggagatccggcggctgcaccagtatgtgaagtttgctgtgcaggatgtgaatgatgtgctggacctggagtgggaccagcacctggagcagaagaagaagcagaggcacctgctggtgcctgagcgggagaccctcttcaacaccctggccaacaaccgggagatcatcaaccagcagaggaagaggctgaaccacctggtggacagcctgcagcagctgcggctgtacaagcagaccagcctgtggagcctgagcagcgctgtgcccagccagagcagcatccacagctttgacagcgacctggagagcctgtgcaatgccctgctgaagaccaccatcgagagccacaccaagagcctgcccaaggtgcctgccaagctgagccccatgaagcaggcccagctgaggaacttcctggccaagaggaagaccccacctgtgcgcagcacagccccagccagcctgagccgcagcgccttcctgagccagcgctactatgaggacctggatgaggtgagcagcaccagctctgtgtcccagagcctggagagtgaagatgcccggaccagctgcaaggatgatgaggccgtggtgcaggcccccaggcatgcccctgtggtgaggacccccagcatccagcccagcctgctgccccacgccgccccctttgccaagagccacctggtgcacggcagcagccctggggtgatgggcacctctgtggccaccagcgccagcaagatcatcccccagggcgctgacagcaccatgctggccaccaagacagtgaagcatggagcccccagccccagccaccccatcagcgccccccaggccgctgctgctgctgccctgcggcggcagatggccagccaggccccagctgtgaacaccctgacagagagcaccctgaagaatgtgccccaggtggtgaatgtgcaggagctgaagaacaacccagccacccccagcacagccatgggcagctctgtgccctacagcacagccaagaccccccaccctgtgctgacccctgtggccgccaaccaggccaagcagggcagcctcatcaacagcctgaagcccagcggccccaccccagccagcggccagctgagcagcggggacaaggccagcggcacagccaagattgaaacagctgtgaccagcaccccatctgccagcggccagttcagcaagcccttctccttcagccccagcggcaccggcttcaactttggcatcatcacccccacccccagcagcaacttcaccgctgcccagggcgccacccccagcaccaaggagagcagccagccagatgccttcagcagcggcggcggcagcaagcccagctatgaggccatccctgagagcagccccccatctggcatcaccagcgccagcaacaccaccccaggagagcctgctgccagcagcagcaggcctgtggcccccagcggcacagccctgagcaccaccagcagcaagctggagaccccacccagcaagctgggggagctgctcttccccagcagcctggccggggagaccctgggcagcttcagcggcctgcgggtgggccaggctgatgacagcaccaagcccaccaacaaggccagcagcaccagcctgaccagcacccagcccaccaagaccagcggcgtgcccagcggcttcaacttcaccgcccctcctgtgctgggcaagcacacagagccccctgtgaccagcagcgccaccaccacctctgtggcccctcctgctgccaccagcaccagcagcacagctgtgtttggcagcctgcctgtgaccagcgctggcagcagcggggtcatcagctttggaggcaccagcctgtctgctgggaagaccagcttctcctttggcagccagcagaccaacagcacagtgcccccatctgcccccccacccaccacagctgccacccccctgcccaccagcttccccaccctgagctttggcagcctgctgagcagcgccaccacccccagcctgcccatgtctgctggccgcagcacagaggaggccaccagcagcgccctgcctgagaagccaggggacagcgaggtgtctgccagcgctgccagcctgctggaggagcagcagagcgcccagctgccccaggccccaccccagaccagtgacagcgtgaagaaggagcctgtgctggcccagcctgctgtgagcaacagcggcacagctgccagcagcaccagcctggtggccctgtctgctgaggccaccccagccaccaccggggtgcctgatgccaggacagaagctgtgcccccagccagcagcttctctgtgcccggccagacagctgtgacagctgctgccatcagcagcgctggccctgtggccgtggagaccagcagcacccccatcgccagcagcaccaccagcatcgtggcccctggccccagcgctgaggccgccgcctttggaacagtgaccagcggcagctctgtgtttgcccagcccccagctgccagcagcagcagcgccttcaaccagctgaccaacaacacagccacagcccccagcgccacccctgtgtttggccaggtggccgccagcacagcccccagcctgtttggccagcagacaggcagcacagccagcacagctgctgccaccccccaggtgagcagcagcggcttcagcagccctgccttcggcaccacagcccctggggtgtttggccagaccaccttcggccaggcctctgtgtttggccagagcgccagcagcgctgcctctgtgttctccttcagccagcccggcttcagctctgtgcctgccttcggccagcctgccagcagcacccccaccagcaccagcggctctgtgtttggagctgccagcagcaccagcagcagcagcagcttctcctttggccagagcagccccaacacaggaggcggcctgtttggccagagcaatgccccagccttcggccagagccctggcttcggccagggcggctctgtgtttggaggcaccagcgctgccaccaccacagctgccaccagcggcttctccttctgccaggccagcggcttcggcagcagcaacacaggctctgtgtttggccaggccgccagcactggaggcatcgtgtttggccagcagagcagcagcagcagcggctctgtgtttggcagcggcaacacaggccggggcggcggcttcttcagcggcctgggcggcaagcccagccaggatgctgccaacaagaaccccttcagcagcgccagcggcggcttcggcagcacagccaccagcaacaccagcaacctgtttggaaattctggggccaagaccttcggcggctttgccagcagcagctttggagagcagaagcccaccggcaccttcagcagcggcggcggctctgtggccagccagggcttcggcttcagcagccccaacaagacaggaggctttggagctgcccctgtgtttggcagcccccccaccttcggcggcagccctggctttggaggagtgcctgccttcggcagcgccccagccttcaccagccccctgggcagcactggaggcaaggtgtttggagagggcacagctgctgccagcgctgggggcttcggcttcggcagcagcagcaacaccaccagctttggcaccctggccagccagaatgcccccaccttcggcagcctgagccagcagaccagcggcttcggcacccagagcagcggcttcagcggcttcggcagcggcaccggcggcttctcctttggcagcaacaacagctctgtgcagggctttggaggctggaggagctag

SEQ ID NO: 152657 - DNA, 4560 bp, Artificial Sequence
  derived and/or modified sequence
atgaagcccagcttcccccccagcaccagcgctgtgaaggtgaacctgtctgagaagttcaccgctgctgccaccagcacccctgtgagcagcagccagagcgccccacccatgagccccttcagcagcgccagcaagccagctgccagcggccccctgagccaccccacccccctgagcgccccacccagctctgtgcccctgaagagctctgtgctgcccagccccagcggccgcagcgcccagggcagcagcagccctgtgcccagcatggtgcagaagagcccccgcatcaccccacctgctgccaagccaggcagcccccaggccaagagcctgcagcctgctgtggccgagaagcagggccaccagtggaaggacagcgaccctgtgatggccggcattggagaggagatcgcccacttccagaaggagctggaggagctgaaggcccggaccagcaaggcctgcttccaggtgggcaccagcgaggagatgaagatgctgaggacagaaagtgatgacctgcacaccttcctgctggagatcaaggagaccacagagagcctgcatggagacatcagcagcctgaagaccaccctgctggagggctttgctggggtggaggaggcccgggagcagaatgaaagaaacagagattctggctacctgcacctgctgtacaagaggcccctggaccccaagtctgaggcccagctgcaggagatccggcggctgcaccagtatgtgaagtttgctgtgcaggatgtgaatgatgtgctggacctggagtgggaccagcacctggagcagaagaagaagcagaggcacctgctggtgcctgagcgggagaccctcttcaacaccctggccaacaaccgggagatcatcaaccagcagaggaagaggctgaaccacctggtggacagcctgcagcagctgcggctgtacaagcagaccagcctgtggagcctgagcagcgctgtgcccagccagagcagcatccacagctttgacagcgacctggagagcctgtgcaatgccctgctgaagaccaccatcgagagccacaccaagagcctgcccaaggtgcctgccaagctgagccccatgaagcaggcccagctgaggaacttcctggccaagaggaagaccccacctgtgcgcagcacagccccagccagcctgagccgcagcgccttcctgagccagcgctactatgaggacctggatgaggtgagcagcaccagctctgtgtcccagagcctggagagtgaagatgcccggaccagctgcaaggatgatgaagctgtggtgcaggcccccaggcatgcccctgtggtgaggacccccagcatccagcccagcctgctgccccatgctgccccctttgccaagagccacctggtgcacggcagcagccctggggtgatgggcacctctgtggccaccagcgccagcaagatcatcccccagggcgctgacagcaccatgctggccaccaagacagtgaagcacggggcccccagccccagccaccccatcagcgccccccaggccgctgctgctgctgccctgcggcggcagatggccagccaggccccagctgtgaacaccctgacagagagcaccctgaagaatgtgccccaggtggtgaatgtgcaggagctgaagaacaacccagccacccccagcacagccatgggcagctctgtgccctacagcacagccaagaccccccaccctgtgctgacccctgtggccgccaaccaggccaagcagggcagcctcatcaacagcctgaagcccagcggccccaccccagccagcggccagctgagcagcggggacaaggccagcggcacagccaagattgaaacagctgtgaccagcacccccagcgccagcggccagttcagcaagcccttctccttcagccccagcggcaccggcttcaactttggcatcatcacccccacccccagcagcaacttcaccgctgcccagggcgccacccccagcaccaaggagagcagccagccagatgccttcagcagcggcggcggcagcaagcccagctatgaggccatccctgagagcagcccccccagcggcatcaccagcgccagcaacaccaccccaggagagcctgctgccagcagcagcaggcctgtggcccccagcggcacagccctgagcaccaccagcagcaagctggagaccccacccagcaagctgggggagctgctcttccccagcagcctggccggggagaccctgggcagcttcagcggcctgcgggtgggccaggctgatgacagcaccaagcccaccaacaaggccagcagcaccagcctgaccagcacccagcccaccaagaccagcggcgtgcccagcggcttcaacttcaccgcccctcctgtgctgggcaagcacacagagccccctgtgaccagcagcgccaccaccacctctgtggcccccccagctgccaccagcaccagcagcacagctgtgtttggcagcctgcctgtgaccagcgctggcagcagtggagtcatcagctttggaggcaccagcctgtctgctgggaagaccagcttctcctttggcagccagcagaccaacagcacagtgccccccagcgcccccccacccaccacagctgccacccccctgcccaccagcttccccaccctgagctttggcagcctgctgagcagcgccaccacccccagcctgcccatgtctgctggccgcagcacagaggaggccaccagcagcgccctgcctgagaagccaggggacagcgaggtgtctgccagcgctgccagcctgctggaggagcagcagagcgcccagctgccccaggccccaccccagaccagtgacagcgtgaagaaggagcctgtgctggcccagcctgctgtgagcaacagcggcacagctgccagcagcaccagcctggtggccctgtctgctgaggccaccccagccaccactggagtgcctgatgccaggacagaggccgtgcccccagccagcagcttctctgtgcccggccagacagctgtgacagctgctgccatcagcagcgctggccctgtggccgtggagaccagcagcacccccatcgccagcagcaccaccagcatcgtggcccctggccccagcgctgaggccgccgccttcggcaccgtgaccagcggcagctctgtgtttgcccagcccccagctgccagcagcagcagcgccttcaaccagctgaccaacaacacagccacagcccccagcgccacccctgtgtttggccaggtggccgccagcacagcccccagcctgtttggccagcagacaggcagcacagccagcacagctgctgccaccccccaggtgagcagcagcggcttcagcagccctgccttcggcaccacagcccctggggtgtttggccagaccaccttcggccaggcctctgtgtttggccagagcgccagcagcgctgccagcgtcttctccttcagccagcccggcttcagctctgtgcctgccttcggccagcctgccagcagcacccccaccagcaccagcggctctgtgtttggagctgccagcagcaccagcagcagcagcagcttctcctttggccagagcagccccaacacaggaggcggcctgtttggccagagcaatgccccagccttcggccagagccctggcttcggccagggcggctctgtgtttggaggcaccagcgctgccaccaccacagctgccaccagcggcttctccttctgccaggccagcggcttcggcagcagcaacacaggctctgtgtttggccaggccgccagcactggaggcatcgtgtttggccagcagagcagcagcagcagcggctctgtgtttggaagtggcaacacaggccggggcggcggcttcttcagcggcctgggcggcaagcccagccaggatgctgccaacaagaaccccttcagcagcgccagcggcggcttcggcagcacagccaccagcaacaccagcaacctgtttggaaacagcggggccaagacctttggaggctttgccagcagcagctttggagagcagaagcccaccggcaccttcagcagcggcggcggctctgtggccagccagggcttcggcttcagcagccccaacaagacaggaggctttggagctgcccctgtgtttggcagcccccccacctttggaggcagccctggctttggaggagtgcctgcctttggaagtgccccagccttcaccagccccctgggcagcactggaggcaaggtgtttggagagggcacagctgctgccagcgctgggggctttggatttggcagcagcagcaacaccaccagctttggcaccctggccagccagaatgcccccaccttcggcagcctgagccagcagaccagcggcttcggcacccagagcagcggcttcagcggctttggaagtggcactggaggcttctcctttggcagcaacaacagctctgtgcagggctttggaggctggaggagctag

SEQ ID NO: 152658 - DNA, 6273 bp, Artificial Sequence
  derived and/or modified sequence
atgggcgacgagatggacgccatgatccccgagcgggagatgaaggacttccagtttcgggccctcaagaaagtgcgcatttttgactccccggaggagttgccaaaggagcgatcatccctgctggccgtgtccaacaagtatgggctggtgttcgctggcggggcttccgggctgcagattttccctaccaagaatcttcttatacagaacaagccaggagatgatcccaacaagatcgtcgataaagtccaaggccttttggttcccatgaaattccctatccaccacctagccttatcctgtgacaacctaactctgagcgcatgcatgatgagcagcgagtatgggagcatcatcgctttcttcgatgtccggactttttcaaacgaggcaaaacagcagaagagacccttcgcttatcacaagttgcttaaagacgcaggtggtatggttatagacatgaaatggaaccctacagtgcctagcatggtggctgtttgccttgccgatggcagtatagccgtgctacaagtgaccgaaactgttaaggtgtgcgctacactgccaagcaccgtggcagtgacaagtgtgtgctggtcacctaagggaaaacagctcgctgttggcaagcagaacggcactgtggtgcagtacctcccaaccttacaggaaaagaaagtgattccgtgcccccctttctatgaatctgaccaccccgtgcgcgtgctggatgtcctctggataggtacctacgtattcgcaatcgtgtacgcagcagctgacggcacactagagacatctcccgatgtggtgatggccctccttcccaagaaggaggagaagcaccccgagatcttcgtaaatttcatggagccgtgttacgggtcatgcacagagcgacagcatcactactacttgagttatattgaagaatgggacctagtgttagccgcgagcgctgccagtacggaggtgtccatcctcgccaggcagtccgaccaaatcaactgggaaagctggttgcttgaagacagttcccgagccgaactgcccgtcactgataaaagtgacgatagcctgccaatgggagtggtcgtagattacacaaaccaagtggagattacaatctccgacgagaagaccctgccccccgcaccagtcctgatgctcttaagcactgatggagtgctatgtccattctacatgattaaccagaaccccggggtgaagagcttgatcaagacgccagaacggctcagccttgagggtgaaagacagcctaagtcaccaggatccacaccaacaacacctacctccagccaagccccccagaaactggatgcctcagctgcagcagctccggcatccctgcctccctcatcccccgctgcgcccatcgcgactttcagtcttctgcctgcagggggggcccccactgtgttttcatttggatccagctcactaaagtcaagtgctacagtgacaggcgagcccccttcctacagttccggctcagactcctcaaaggccgctcctgggccaggccccagcacgttttccttcgtccccccatctaaagccagtctggctcccaccccggctgcctcccccgtggccccgagcgccgcaagctttagctttgggtcaagtggcttcaaacctaccctggagtctaccccagtgcctagtgtttccgcccctaacatagccatgaagccaagtttccctccctccacctcagccgtcaaagttaatttgagcgagaagttcaccgccgctgctacatcaacccccgtgagcagctcccagtctgccccacctatgagcccattctcatcagcaagcaagccagctgcctctgggcctttgagccatcctacccccctgtctgcacctcccagcagtgtgccactaaagtcatccgtcctccccagcccaagcgggcggagcgcccagggtagcagttccccagttcccagcatggttcagaagtctcctcggatcactccaccggccgcgaaacccggctcaccccaggcaaagtcccttcaacccgctgtggccgaaaagcagggacatcagtggaaggacagcgaccctgtgatggctggaatcggcgaggagatagcgcactttcagaaggagttagaagagctaaaggcacgcacctctaaagcttgcttccaggtcggtacgagcgaagaaatgaaaatgctgcgcaccgaatccgacgacctgcataccttcctgttggagatcaaggagaccacagaatccctgcacggcgacatctccagcctgaaaacaaccctcctggaaggtttcgcaggggtggaggaagcccgagaacagaatgagagaaaccgggatagcggctatctgcacctcctgtataagcgccccctggatccgaaatcggaggctcagcttcaggagataaggagactgcaccagtacgtcaagtttgccgtgcaggatgtcaacgacgtgctggatctagaatgggatcaacatctggaacagaagaaaaagcagaggcacctgctcgttccggaacgcgaaacacttttcaatactcttgctaacaatcgggagattatcaatcagcagagaaaacgtctcaaccacctagtagactccctgcagcagctgagattgtataagcagacttccttatggtcactgagttctgctgtccctagccagtcgagtatccacagcttcgattctgatcttgagtcattgtgtaacgcccttttaaaaacgaccatagaatctcatacaaaaagcttgccgaaagtcccagccaagctttctccaatgaaacaggctcaactaaggaatttcctggctaaacggaaaacccctccggtcaggtcaactgcaccggcatcactgtcacgctccgcattcttatcccagcggtattacgaggatttagacgaggtgtcctctacgagttccgtgtcgcagtcccttgaaagcgaggatgctagaacctcttgcaaagatgatgaggccgtggtccaagcccctcgccatgcgcccgttgttaggacaccctctatccagcccagcctgctccctcacgccgcgcctttcgcaaaatcacacctggtccatggttcaagtcccggcgttatgggcacatcagtcgctacctcagcttctaaaattattccccagggtgctgactctacaatgctggcaacaaagaccgttaagcacggagcccccagcccctcacacccaattagtgcgcctcaggcagcagcagcggccgcactccggaggcagatggccagtcaggccccagcggttaatactctgactgagtccactttgaaaaatgtgccgcaggtggttaacgtgcaggaacttaaaaacaatcctgcaaccccgagcaccgcaatgggctcaagcgtgccgtacagtaccgccaaaactccgcatccggtgctcacccccgtggctgctaaccaggccaagcagggctcccttatcaatagcctaaaacctagcgggcctacccccgcatcgggacagctctccagcggtgataaagcgagtgggactgcgaagattgagaccgcagtcacctcgactccctcagcatccggccagtttagcaagccatttagtttctccccttctggcacaggctttaatttcggcattatcacgcccacccctagttccaacttcacggctgctcagggtgcaaccccctccactaaggagagctctcagccagacgccttttcctctggcgggggatccaaaccctcatatgaggctattccagaatcctctcctccctccggtattacttctgcttctaacaccacccccggcgaacctgccgcaagcagctcgaggcccgttgcaccttctggcacggctctttcgacaaccagcagcaagctcgagacccccccatctaaactcggcgaactgctcttcccaagctcattagcaggtgaaacactgggtagcttcagcggcctccgggtcggacaggcggatgacagcaccaaaccaacgaataaggccagttccacttcgctaaccagcacacagccaacaaagacatcaggggttccgagcggctttaatttcaccgccccacctgtgttaggaaaacacaccgagcccccggtaacatctagcgccacaacaacaagtgtcgccccccctgccgcaacttctacttccagcacagcggtttttggatcgctgcccgttacaagcgctgggtccagcggagttatcagtttcggcggtacaagtctgagtgcaggcaagacctcattttctttcgggtctcagcaaactaattctacagttcctccctctgcaccgccaccaacgacggcagccacgcccttacccacatcctttcccaccctgtccttcggcagcttactctcaagcgccaccaccccaagtctgccaatgtccgctgggagatctaccgaagaagctacttctagtgctttgcccgaaaaacctggagatagcgaagtgtcagctagtgctgcttccctgctggaagagcaacaatccgcacagctgccgcaggcaccacctcagacgtcagactcggtgaagaaggaaccagtgctagcacaaccagctgtttcaaattcaggcactgcggcatcatctacaagtctcgtggcactcagcgccgaggcaacccctgccactaccggagttcctgatgcacgcaccgaggctgtgcccccggcctcaagtttctctgtgcctggacagacagccgtgactgccgccgcaatctcatccgccggcccagtggctgtcgagacatcaagcaccccgatagccagcagtactactagcattgttgctcctggaccgtcagccgaggccgccgcctttgggaccgtgacatctgggtccagtgtgtttgcacaaccacctgcagcgtccagctccagcgcatttaaccaactcaccaacaacacagcaacagccccgtctgccacaccagtcttcggtcaggtagccgcttcaactgccccctctctgtttggtcagcagaccggatcaacagctagcaccgccgcagcaaccccccaagtttcctcatccggtttttcctcacctgccttcggcaccacggctcctggcgttttcggacagacaacttttggtcaggctagtgtgttcggacagagcgcttcttcagccgcgtcagtgttttcattctcccagcccgggttttcaagcgtgcctgccttcggccaacccgctagctccacacccacaagcacctcgggcagcgtgttcggagccgcgagtagtacttccagctcctcttcatttagctttggtcaatccagcccaaatactggggggggtctgttcggtcaaagtaacgctccagctttcgggcagagtcctggcttcggacagggagggtccgtctttggggggacttctgccgcaactaccacagcagccactagcggcttcagtttttgtcaggcatcggggttcgggtcatcaaatacgggatcagtatttggccaggcagcctccaccggcggcatcgtgttcgggcagcagtcaagttcttcctctggcagcgttttcggaagcggaaacactggccgtgggggcggctttttcagcggtctggggggcaaaccgtctcaggacgccgctaataagaaccccttctcttcggcaagtgggggatttggcagcaccgcaacatccaacacctcgaacttattcggtaattctggtgctaagacattcggggggttcgcctcatcctcatttggcgaacagaagcccacagggaccttttcttccggagggggttcagtggcttctcagggattcggcttcagctcacccaataaaactggagggtttggcgcggcgccagtttttggaagtccccccactttcgggggtagcccaggttttggcggcgtgcccgcctttggatctgcaccagcctttacctctccactgggttccacagggggcaaagtctttggcgaggggaccgccgcagccagtgcagggggttttggttttggcagctcaagcaacacaacctctttcgggacgttagcttcacagaacgcccctacattcggcagcctatctcagcagacatccgggtttggcacccagtcctctgggttctctggtttcgggagtggcacggggggcttctcgttcggcagtaataacagcagcgtccagggctttgggggatggcgaagctag

SEQ ID NO: 152659 - DNA, 4560 bp, Artificial Sequence
  derived and/or modified sequence
atgaagcccagcttcccccccagcaccagcgccgtgaaggtgaacctttctgagaagttcaccgcagctgctacttcgacaccagttagctcctctcagtccgcccctcctatgagtccattcagttctgcatctaagccggccgcctctggaccactttcccatcctacccccttatcggcgcccccctcctctgttccactcaagagtagcgtgctcccatctccatccggcaggtctgcacagggatcgtcaagtccggttccctccatggtccaaaaaagtccccgtatcacccctcccgcagcgaaacctgggtcccctcaggcaaaaagcttacagcccgccgtcgcagaaaaacagggtcaccagtggaaggactccgacccggttatggccgggatcggtgaagaaatcgcacactttcaaaaggagctggaggaattgaaggctaggacatcaaaagcttgcttccaagttggcacctcagaagaaatgaaaatgctgagaacagagagtgatgatctccataccttcctcctggagatcaaggaaaccaccgagtcccttcacggtgacatttcttctctgaagactactctgctggaaggcttcgcaggggtggaggaggcgcgggagcagaatgagcgcaatagagactctgggtacctgcatctactttataaacgaccactggatcctaaatcagaagcccagttgcaggagattcggcggctccatcaatacgtcaagttcgctgttcaggatgtcaacgacgttctcgacttagaatgggaccagcatttagagcagaagaagaaacaacgacacctgctcgttcccgagcgagagaccctgttcaacacacttgcaaataatcgggaaattatcaaccagcagcgcaaaaggctcaatcacctcgttgactcactccagcagctcagactctacaagcagacctccctgtggtccttgagttccgctgttccttcccagagctcaatccactcattcgacagcgatttggaatctctgtgtaatgctctgctcaaaacaacaattgagtcacacaccaaatctttacctaaggtgcccgccaagctttcgcctatgaaacaggcccaattgaggaactttctggccaaaagaaaaacacctccggtgcggtctaccgccccagctagtctgagccgaagtgctttcctctctcaacggtactatgaggatctcgatgaggtgagttctactagtagtgtctcccagagtctcgagagcgaggatgcccgtacctcctgcaaggacgacgaagctgtggtgcaagcaccccgccatgcaccagtcgttcgcacaccctctattcaaccctcccttctaccccacgcagcgcctttcgcaaaatcccatcttgtccacggctcctcacccggcgttatgggcacatcggtggccacaagtgcttctaagatcattccacagggagcagactccacaatgcttgcaaccaaaacagttaaacacggggctcccagcccatcccatcctatctccgccccccaggctgctgccgccgccgccttacgaagacagatggcaagccaggcaccggccgtgaataccctcactgagagcactctcaagaacgttccccaggtggttaatgtccaggagctcaagaataaccctgctactcccagtaccgcgatgggctcaagcgtaccatacagcaccgccaaaaccccccaccccgttctcacccctgtcgccgcaaatcaggctaaacagggttcactgataaattctctaaaacccagcggtccgacccctgcttcaggacagctatcaagtggagacaaagctagcggaacagccaagattgaaactgcagtaacaagcactccatcggcctcagggcaattttcaaagcctttcagtttttccccctccggcactggcttcaacttcgggattattactcccacaccaagctctaatttcactgccgcacaaggcgcaaccccttctaccaaggagtcatcccaacccgatgcgttcagcagcggcgggggctccaagccctcctacgaagcaatcccagaatcctctcctccttcagggattactagtgcctctaatacaactcctggagagcctgccgcctcttctagcagaccagtggctccttcaggtacagcactaagcaccaccagctctaaactggaaaccccccctagtaagttgggagagcttctgtttccgtcgtctcttgccggcgagaccctgggatcttttagcggtctcagggtgggtcaagccgacgactctaccaagccaaccaacaaagcctctagtacgagcctgacttctactcagccaaccaagacgtccggagtaccgagtgggtttaatttcacggctccccctgtgctggggaagcatacagaacctcctgtgacctctagtgcaaccacaacatctgtagcccctcccgctgctacaagcacctcttccactgcagtcttcgggagcctgcctgtgacgtctgcaggatcgtccggggtcatcagcttcggcggtacctcactgagcgctggtaagactagcttcagttttggatcacagcagaccaactccactgtgccacccagcgcaccgccccctaccaccgccgcaaccccgcttcctacaagttttcctacactgagctttggtagcctgctcagttccgcaactaccccctcactgccgatgtctgctggaaggagtaccgaagaggctacctcttccgccttgcccgagaagcctggcgattctgaggtgtctgccagcgctgcgagccttctggaggaacagcagtcagcccagctgccacaagctccgccacaaacatccgactccgttaagaaggagcctgtgctggctcagcctgctgtctctaacagtgggactgccgctagtagcacctcccttgtggcgctcagtgcagaggctaccccagccacgacaggagtccctgatgcgaggacagaggccgttccccccgcgagttctttctctgtgcccggccaaactgctgtaaccgccgctgctatatcaagcgctgggccggttgctgtggaaacctcctcaacaccaattgcttcgtcaactacaagcattgttgctccaggcccatcagccgaggccgccgcctttggaacagtcacaagcggatcttcagtgttcgcacaacctccagccgctagtagctcatctgcgtttaatcagcttacaaataataccgcgacagcacccagtgctaccccagtttttgggcaggtggcggccagcacggcaccttcacttttcggccagcagacgggttccactgcctccactgccgcggcgacaccacaagtgtctagcagcgggtttagctcacctgcctttggcaccacagcccccggcgtgtttggccaaacaacttttgggcaggcttccgttttcgggcagagcgcatcatctgccgcctcggtttttagcttctcccaacctggcttctcttccgtgccagcgttcggtcagcctgcctcatcgaccccgacaagtacttccgggagtgtgttcggcgccgccagctccacctctagcagttcctccttctcctttggccaatcatcaccaaataccggagggggcctatttggccagagcaatgctccagcctttggacaaagtccaggttttgggcagggcggaagtgtttttggtggcactagcgcagccacaaccacggccgcaacatcagggttttccttttgccaagcttctggcttcgggagtagcaatactggaagtgtttttgggcaggcagcgtccaccggagggatcgtgttcggccagcagtctagctcatctagtggatctgtgtttggctcaggaaacacagggcgtggcggcgggttttttagcggactcgggggcaaaccctcacaggacgccgctaataagaatcctttttcttccgctagcggcggatttgggtccactgcaacctccaatacgtcaaatctgttcggcaattcaggcgcaaagacctttggcggatttgccagctcgtcctttggcgaacagaagcctactggcactttcagctccggcggtgggtctgtggcttcacagggtttcggcttctcatcaccaaacaagaccggcggcttcggcgctgctccagtgtttggtagtccaccaacgtttggtgggtcaccgggattcggcggggtccctgcgttcggaagcgccccagcttttactagtccactcgggagcactggagggaaggtgtttggggagggaaccgcggccgcttctgctggaggtttcgggtttggctcttcatccaataccaccagcttcggtaccctcgctagccagaacgctcctaccttcgggagcttatcccagcagaccagcggctttggtacccagagctcaggcttttccgggtttggcagcggtacaggagggttctcattcgggtcaaataacagcagcgtgcaaggatttggcggttggcgcagctag

SEQ ID NO: 152660 - DNA, 7600 bp, Artificial Sequence
  derived and/or modified sequence
cgtcaccaaagcgcgccggaaatgcgaggtcaactgcgcgccgctggcgctgaggggaggaagtttgctgtcgagcggcctgggttccgtgggcaaggccgtgggaggcagcgttggctgcttcgacacactgagggcggcgcgatgggagacgagatggatgccatgattcccgagcgggagatgaaggattttcagtttagagcgctaaagaaggtgagaatctttgactcccctgaggaattgcccaaggaacgctcgagtctgcttgctgtgtccaacaaatatggtctggtcttcgctggtggagccagtggcttgcagatttttcctactaaaaatcttcttattcaaaataaacccggagatgatcccaacaaaatagttgataaagtccaaggcttgctagttcctatgaaattcccaatccatcacctggccttgagctgtgataacctcacactctctgcgtgcatgatgtccagtgaatatggttccattattgctttttttgatgttcgcacattctcaaatgaggctaaacagcaaaaacgcccatttgcctatcataagcttttgaaagatgcaggaggcatggtgattgatatgaagtggaaccccactgtcccctccatggtggcagtttgtctggctgatggtagtattgctgtcctgcaagtcacggaaacagtgaaagtatgtgcaactcttccttccacggtagcagtaacctctgtgtgctggagccccaaaggaaagcagctggcagtgggaaaacagaatggaactgtggtccagtatcttcctactttgcaggaaaaaaaagtcattccttgtcctccgttttatgagtcagatcatcctgtcagagttctggatgtgctgtggattggtacctacgtcttcgccatagtgtatgctgctgcagatgggaccctggaaacgtctccagatgtggtgatggctctactaccgaaaaaagaagaaaagcacccagagatatttgtgaactttatggagccctgttatggcagctgcacggagagacagcatcattactacctcagttacattgaggaatgggatttagtgctggcagcatctgcggcttcaacagaagttagtatccttgctcgacaaagtgatcagattaattgggaatcttggctactggaggattctagtcgagctgaattgcctgtgacagacaagagtgatgactccttgcccatgggagttgtcgtagactatacaaaccaagtggaaatcaccatcagtgatgaaaagactcttcctcctgctccagttctcatgttactttcaacagatggtgtgctttgtccattttatatgattaatcaaaatcctggggttaagtctctcatcaaaacaccagagcgactttcattagaaggagagcgacagcccaagtcaccaggaagtactcccactaccccaacctcctctcaagccccacagaaactggatgcttctgcagctgcagcccctgcctctctgccaccttcatcacctgctgctcccattgccactttttctttgcttcctgctggtggagcccccactgtgttctcctttggttcttcatctttgaagtcatctgctacggtcactggggagcccccttcatattccagtggctccgacagctccaaagcagccccaggccctggcccatcaaccttctcttttgttcccccttctaaagcctccctagcccccacccctgcagcgtctcctgtggctccatcagctgcttcattctcctttggatcatctggttttaagcctaccctggaaagcacaccagtgccaagtgtgtctgctccaaatatagcaatgaagccctccttcccaccctcaacctctgctgtcaaagtcaaccttagtgaaaagtttactgctgcagctacctctactcctgttagtagctcccagagcgcacccccgatgtcgccattctcttctgcctccaagccagctgcttctggaccactcagccaccccacacctctctcagcaccacctagttccgtgccattgaagtcctcagtcttgccctcaccatcaggacgatctgctcagggcagttcaagcccagtgccctcaatggtacagaaatcacccaggataacccctccagcggcaaagccaggctctccccaggcaaagtcacttcagcctgctgttgcagaaaagcagggacatcagtggaaagattcagatcctgtaatggctggaattggggaggagattgcacactttcagaaggagttggaagagttaaaagcccgaacttccaaagcctgtttccaagtgggcacttctgaggagatgaagatgctgcgaacagaatcagatgacttgcatacctttcttttggagattaaagagaccacagagtcgcttcatggagatataagtagcctgaaaacaactttacttgagggctttgctggtgttgaggaagccagagaacaaaatgaaagaaatcgtgactctggttatctgcatttgctttataaaagaccactggatcccaagagtgaagctcagcttcaggaaattcggcgccttcatcagtatgtgaaatttgctgtccaagatgtgaatgatgttctagacttggagtgggatcagcatctggaacaaaagaaaaaacaaaggcacctgcttgtgccagagcgagagacactgtttaacaccctagccaacaatcgggaaatcatcaaccaacagaggaagaggctgaatcacctggtggatagtcttcagcagctccgcctttacaaacagacttccctgtggagcctgtcctcggctgttccttcccagagcagcattcacagttttgacagtgacctggaaagcctgtgcaatgctttgttgaaaaccaccatagaatctcacaccaaatccttgcccaaagtaccagccaaactgtcccccatgaaacaggcacaactgagaaacttcttggccaagaggaagaccccaccagtgagatccactgctccagccagcctgtctcgatcagcctttctgtctcagagatattatgaagacttggatgaagtcagctcaacgtcatctgtctcccagtctctggagagtgaagatgcacggacgtcctgtaaagatgacgaggcagtggttcaggcccctcggcacgcccccgtggttcgcactccttccatccagcccagtctcttgccccatgcagcaccttttgctaaatctcacctggttcatggttcttcacctggtgtgatgggaacttcagtggctacatctgctagcaaaattattcctcaaggggccgatagcacaatgcttgccacgaaaaccgtgaaacatggtgcacctagtccttcccaccccatctcagccccgcaggcagctgccgcagcagcactcaggcggcagatggccagtcaggcaccagctgtaaacactttgactgaatcaacgttgaagaatgtccctcaagtggtaaatgtgcaggaattgaagaataaccctgcaaccccttctacagccatgggttcttcagtgccctactccacagccaaaacacctcacccagtgttgaccccagtggctgctaaccaagccaagcaggggtctctaataaattcccttaagccatctgggcctacaccagcatccggtcagttatcatctggtgacaaagcttcagggacagccaagatagaaacagctgtgacttcaaccccatctgcttctgggcagttcagcaagcctttctcattttctccatcagggactggctttaattttgggataatcacaccaacaccgtcttctaatttcactgctgcacaaggggcaacaccctccactaaagagtcaagccagccggacgcattctcatctggtgggggaagcaaaccttcttatgaggccattcctgaaagctcacctccctcaggaatcacatccgcatcaaacaccaccccaggagaacctgccgcatctagcagcagacctgtggcaccttctggaactgctctttccaccacctctagtaagctggaaaccccaccgtccaagctgggagagcttctgtttccaagttctttggctggagagactctgggaagtttttcaggactgcgggttggccaagcagatgattctacaaaaccaaccaataaggcttcatccacaagcctaactagtacccagccaaccaagacgtcaggcgtgccctcagggtttaattttactgcccccccggtgttagggaagcacacggagccccctgtgacatcctctgcaaccaccacctcagtagcaccaccagcagccaccagcacttcctcaactgccgtttttggcagtctgccagtcaccagtgcaggatcctctggggtcatcagttttggtgggacatctctaagtgctggcaagactagtttttcatttggaagccaacagaccaatagcacagtgcccccatctgccccaccaccaactacagctgccactccccttccaacatcattccccacattgtcatttggtagcctcctgagttcagcaactaccccctccctgcctatgtccgctggcagaagcacagaagaggccacttcatcagctttgcctgagaagccaggtgacagtgaggtctcagcatcagcagcctcacttctagaggagcaacagtcagcccagcttccccaggctcctccgcaaacttctgactctgttaaaaaagaacctgttcttgcccagcctgcagtcagcaactctggcactgcagcatctagtactagtcttgtagcactttctgcagaggctaccccagccaccacgggggtccctgatgccaggacggaggcagtaccacctgcttcctccttttctgtgcctgggcagactgctgtcacagcagctgctatctcaagtgcaggccctgtggccgtcgaaacatcaagtacccccatagcctccagcaccacgtccattgttgctcccggcccatctgcagaggcagcagcatttggtaccgtcacttctggctcatccgtctttgctcagcctcctgctgccagttctagctcagctttcaaccagctcaccaacaacacagccactgccccctctgccacgcccgtgtttgggcaagtggcagccagcaccgcaccaagtctgtttgggcagcagactggtagcacagccagcacagcagctgccacaccacaggtcagcagctcagggtttagcagcccagcttttggtaccacagccccaggggtctttggacagacaaccttcgggcaggcctcagtctttgggcagtcggcgagcagtgctgcaagtgtcttttccttcagtcagcctgggttcagttccgtgcctgccttcggtcagcctgcttcctccactcccacatccaccagtggaagtgtctttggtgccgcctcaagtaccagtagctccagttccttctcatttggacagtcttctcccaacacaggaggggggctgtttggccaaagcaacgctcctgcttttgggcagagtcctggctttggacagggaggctctgtctttggtggtacctcagctgccaccacaacagcagcaacctctgggttcagcttttgccaagcttcaggttttgggtctagtaatactggttctgtgtttggtcaagcagccagtactggtggaatagtctttggccagcaatcatcctcttccagtggtagcgtgtttgggtctggaaacactggaagagggggaggtttcttcagtggccttggaggaaaacccagtcaggatgcagccaacaaaaacccattcagctcggccagtgggggctttggatccacagctacctcaaatacctctaacctatttggaaacagtggggccaagacatttggtggatttgccagctcgtcgtttggagagcagaaacccactggcactttcagctctggaggaggaagtgtggcatcccaaggctttgggttttcctctccaaacaaaacaggtggcttcggtgctgctccagtgtttggcagccctcctacttttgggggatcccctgggtttggaggggtgccagcattcggttcagccccagcctttacaagccctctgggctcgacgggaggcaaagtgttcggagagggcactgcagctgccagcgcaggaggattcgggtttgggagcagcagcaacaccacatccttcggcacgctcgcgagtcagaatgcccccactttcggatcactgtcccaacagacttctggttttgggacccagagtagcggattctctggttttggatcaggcacaggagggttcagctttgggtcaaataactcgtctgtccagggttttggtggctggcgaagctgagggcgtgtcagcaggcctttcgatccctgggaccaaccgcatcctcagcttcttccccgagaaatgctggagcaggctgttcagaccgacgttgccatcaaaacacatacacccagaaagaaacaacagaaaccaaaactcacaaggcgcatgattacttgttttatatttcatgttgggttttccctcccactattaaacagtctgtttccgtacagaacgtatgtgggttttttcagatcacagccaagaagattgccccgtttctgtggctctgagaagccagcagagcctccatcagccagaacactgtgtcttcaaggatggcatcagaagtcaccagcgtcgggtgttgataaacagcatcgaatgtgccgtggtctcacttggacctagcgccctccacatagggaagaggttgaatgctggtgggtcatctttttgaggctgaaacttggttatctcctctccttgttcttttagccattgtgtatcaggaccatccaaggacgcactctgcgattgagtggaggcagaggaagccactcatgccagcagcagttgagtttcagaagcagccatagcgcttttcagtacagtacaatagtagccagcgtgaggcaggacagtgctgcgccttagccggccttggctctcatctccatgtggctcttgggtgccatgtgtcctactccagagaggagggggccggtcacttgagaagacagcctttatattctgtatgtggcagtgacattggtagccacacctacccagtgtctactaaccacagtgcagatagcccttgggtagacccaggaagtgtgaagacagacactgctgttgccagacaacactagcagaacgatgctggatttgacaacagtgtttgctaggacggcccagagctcatcactgcagttttattagagtgcttctttatctttaatgcagtatctttgaggcctgtaacatcctagatagttgccatcaaacaaggaccgtctcgcattgaaaacagatgtaagaatttctctttcaggcccagaatctgacagtgctttggcttgggtcatgagcagcggggagttgggaagagatttttttttttagagttttacatattggcaggttgtatttttttaatgttttaataaaagtttgacatgacattaattcatca

SEQ ID NO: 152661 - DNA, 5021 bp, Artificial Sequence
  derived and/or modified sequence
gtgccaggcactgtggtagtcatcgcggcagccctacgaagtagtcgttaacgtagaggagtaagttgaggctcggaaagtaatttccctaaagtcacatttgacgcggggctgaaagccagcatcatttaagacctttgcgtctcctgtggctccatcagctgcttcattctcctttggatcatctggttttaagcctaccctggaaagcacaccagtgccaagtgtgtctgctccaaatatagcaatgaagccctccttcccaccctcaacctctgctgtcaaagtcaaccttagtgaaaagtttactgctgcagctacctctactcctgttagtagctcccagagcgcacccccgatgtcgccattctcttctgcctccaagccagctgcttctggaccactcagccaccccacacctctctcagcaccacctagttccgtgccattgaagtcctcagtcttgccctcaccatcaggacgatctgctcagggcagttcaagcccagtgccctcaatggtacagaaatcacccaggataacccctccagcggcaaagccaggctctccccaggcaaagtcacttcagcctgctgttgcagaaaagcagggacatcagtggaaagattcagatcctgtaatggctggaattggggaggagattgcacactttcagaaggagttggaagagttaaaagcccgaacttccaaagcctgtttccaagtgggcacttctgaggagatgaagatgctgcgaacagaatcagatgacttgcatacctttcttttggagattaaagagaccacagagtcgcttcatggagatataagtagcctgaaaacaactttacttgagggctttgctggtgttgaggaagccagagaacaaaatgaaagaaatcgtgactctggttatctgcatttgctttataaaagaccactggatcccaagagtgaagctcagcttcaggaaattcggcgccttcatcagtatgtgaaatttgctgtccaagatgtgaatgatgttctagacttggagtgggatcagcatctggaacaaaagaaaaaacaaaggcacctgcttgtgccagagcgagagacactgtttaacaccctagccaacaatcgggaaatcatcaaccaacagaggaagaggctgaatcacctggtggatagtcttcagcagctccgcctttacaaacagacttccctgtggagcctgtcctcggctgttccttcccagagcagcattcacagttttgacagtgacctggaaagcctgtgcaatgctttgttgaaaaccaccatagaatctcacaccaaatccttgcccaaagtaccagccaaactgtcccccatgaaacaggcacaactgagaaacttcttggccaagaggaagaccccaccagtgagatccactgctccagccagcctgtctcgatcagcctttctgtctcagagatattatgaagacttggatgaagtcagctcaacgtcatctgtctcccagtctctggagagtgaagatgcacggacgtcctgtaaagatgacgaggcagtggttcaggcccctcggcacgcccccgtggttcgcactccttccatccagcccagtctcttgccccatgcagcaccttttgctaaatctcacctggttcatggttcttcacctggtgtgatgggaacttcagtggctacatctgctagcaaaattattcctcaaggggccgatagcacaatgcttgccacgaaaaccgtgaaacatggtgcacctagtccttcccaccccatctcagccccgcaggcagctgccgcagcagcactcaggcggcagatggccagtcaggcaccagctgtaaacactttgactgaatcaacgttgaagaatgtccctcaagtggtaaatgtgcaggaattgaagaataaccctgcaaccccttctacagccatgggttcttcagtgccctactccacagccaaaacacctcacccagtgttgaccccagtggctgctaaccaagccaagcaggggtctctaataaattcccttaagccatctgggcctacaccagcatccggtcagttatcatctggtgacaaagcttcagggacagccaagatagaaacagctgtgacttcaaccccatctgcttctgggcagttcagcaagcctttctcattttctccatcagggactggctttaattttgggataatcacaccaacaccgtcttctaatttcactgctgcacaaggggcaacaccctccactaaagagtcaagccagccggacgcattctcatctggtgggggaagcaaaccttcttatgaggccattcctgaaagctcacctccctcaggaatcacatccgcatcaaacaccaccccaggagaacctgccgcatctagcagcagacctgtggcaccttctggaactgctctttccaccacctctagtaagctggaaaccccaccgtccaagctgggagagcttctgtttccaagttctttggctggagagactctgggaagtttttcaggactgcgggttggccaagcagatgattctacaaaaccaaccaataaggcttcatccacaagcctaactagtacccagccaaccaagacgtcaggcgtgccctcagggtttaattttactgcccccccggtgttagggaagcacacggagccccctgtgacatcctctgcaaccaccacctcagtagcaccaccagcagccaccagcacttcctcaactgccgtttttggcagtctgccagtcaccagtgcaggatcctctggggtcatcagttttggtgggacatctctaagtgctggcaagactagtttttcatttggaagccaacagaccaatagcacagtgcccccatctgccccaccaccaactacagctgccactccccttccaacatcattccccacattgtcatttggtagcctcctgagttcagcaactaccccctccctgcctatgtccgctggcagaagcacagaagaggccacttcatcagctttgcctgagaagccaggtgacagtgaggtctcagcatcagcagcctcacttctagaggagcaacagtcagcccagcttccccaggctcctccgcaaacttctgactctgttaaaaaagaacctgttcttgcccagcctgcagtcagcaactctggcactgcagcatctagtactagtcttgtagcactttctgcagaggctaccccagccaccacgggggtccctgatgccaggacggaggcagtaccacctgcttcctccttttctgtgcctgggcagactgctgtcacagcagctgctatctcaagtgcaggccctgtggccgtcgaaacatcaagtacccccatagcctccagcaccacgtccattgttgctcccggcccatctgcagaggcagcagcatttggtaccgtcacttctggctcatccgtctttgctcagcctcctgctgccagttctagctcagctttcaaccagctcaccaacaacacagccactgccccctctgccacgcccgtgtttgggcaagtggcagccagcaccgcaccaagtctgtttgggcagcagactggtagcacagccagcacagcagctgccacaccacaggtcagcagctcagggtttagcagcccagcttttggtaccacagccccaggggtctttggacagacaaccttcgggcaggcctcagtctttgggcagtcggcgagcagtgctgcaagtgtcttttccttcagtcagcctgggttcagttccgtgcctgccttcggtcagcctgcttcctccactcccacatccaccagtggaagtgtctttggtgccgcctcaagtaccagtagctccagttccttctcatttggacagtcttctcccaacacaggaggggggctgtttggccaaagcaacgctcctgcttttgggcagagtcctggctttggacagggaggctctgtctttggtggtacctcagctgccaccacaacagcagcaacctctgggttcagcttttgccaagcttcaggttttgggtctagtaatactggttctgtgtttggtcaagcagccagtactggtggaatagtctttggccagcaatcatcctcttccagtggtagcgtgtttgggtctggaaacactggaagagggggaggtttcttcagtggccttggaggaaaacccagtcaggatgcagccaacaaaaacccattcagctcggccagtgggggctttggatccacagctacctcaaatacctctaacctatttggaaacagtggggccaagacatttggtggatttgccagctcgtcgtttggagagcagaaacccactggcactttcagctctggaggaggaagtgtggcatcccaaggctttgggttttcctctccaaacaaaacaggtggcttcggtgctgctccagtgtttggcagccctcctacttttgggggatcccctgggtttggaggggtgccagcattcggttcagccccagcctttacaagccctctgggctcgacgggaggcaaagtgttcggagagggcactgcagctgccagcgcaggaggattcgggtttgggagcagcagcaacaccacatccttcggcacgctcgcgagtcagaatgcccccactttcggatcactgtcccaacagacttctggttttgggacccagagtagcggattctctggttttggatcaggcacaggagggttcagctttgggtcaaataactcgtctgtccagggttttggtggctggcgaagctgagggcgtgtcagcaggcctttcgatccctgggaccaaccgcatcctcagcttcttccccgagaaatgctggagcaggctgttcagaccgacgttgccatcaaaacacatacacccagaaagaaacaacagaaaccaaaactcacaaggcgcatgattacttgttttatatttcatgttgggttttccctcccactattaaacagtctgtttccgt

SEQ ID NO: 152662 - DNA, 6272 bp, Artificial Sequence
  derived and/or modified sequence
atgggggacgagatggacgccatgatccccgagagggagatgaaagacttccagttccgtgcacttaaaaaagtgaggatattcgactcacctgaagagctcccaaaggaaagaagctcactcttagccgtatccaacaagtacggactggttttcgccggtggagcctccgggctccaaatttttcccacgaagaacctgctgattcagaataaacccggtgacgatcctaacaagatcgtcgacaaagtgcaggggcttctggtgccgatgaagtttcctatccaccatctggccctgtcatgtgacaatctgacattatccgcttgcatgatgagttccgaatacgggtcaatcatcgcgttcttcgatgtgcggacttttagcaacgaagctaaacagcagaagcggccattcgcatatcacaaattattgaaggatgccggaggcatggtgatcgacatgaaatggaaccctacggtgccgtctatggttgcggtgtgtctggcagatgggtccattgctgtcctgcaggtgaccgaaacagtgaaagtgtgtgcgacactgcctagcaccgtggctgtgacctctgtgtgctggtcacccaaaggaaagcagctcgccgtaggcaaacagaatggtactgtcgtgcagtacttacctaccctgcaggagaagaaggttatcccttgtccccctttctatgaatctgatcacccagtgagagttttggatgtcctgtggattggaacttatgttttcgcaatcgtttacgcggcagccgacggaactttggaaacatcacccgacgtagttatggccctcctgcccaagaaagaggagaagcatcccgaaatcttcgtcaatttcatggaaccttgctatgggtcttgtacagaaaggcagcaccactactacctgtcctacatagaagaatgggatctggtgctcgctgcgagcgctgccagtacagaggtgagcatcttggccaggcagtcagatcaaattaactgggagtcctggttactggaagattcaagcagggccgaactgcccgttacagataaatctgatgatagtctcccgatgggggtggttgtggactacacaaaccaggtggagatcactattagcgatgagaagaccttgccccctgcccctgtcctgatgctgttgtcgactgatggagtcttgtgtccattttacatgatcaaccaaaacccaggggtcaagagtctgattaagaccccagaacgcttgtcactagagggcgagcggcagcccaaatccccaggcagcactcccaccacgccaacatcatcccaggcaccccaaaagctcgatgcctctgcagcagcagctcctgcgtcacttccaccaagttctccagcggcaccgatcgctacattttctttgctgcccgctggaggagcaccaacggtgttcagcttcgggagttcaagcctaaaatcgagtgccactgtgacaggggagcccccatcctatagcagcggcagcgattcgtccaaggctgccccaggacccggtccatcgaccttttctttcgtgccccctagcaaagcttctctcgctcctacccccgctgcaagcccagtggcccctagcgcagcatccttttccttcggatcctctggattcaaacctacgctcgagtccacaccagttcctagcgttagcgctcctaatattgctatgaagccgtcttttccaccaagtacatctgcagtgaaagtgaacttaagcgaaaagttcactgctgccgctacctctactccagtatctagctcacaatcagctccccctatgagccccttttcatcggccagcaaacccgcagctagtggacccctgtcccacccaacccctttgtccgctcctccctctagcgtcccccttaagtcatctgtgctcccctcccccagcggacggtccgcacaaggcagttcctctccagttcctagcatggtgcaaaagtcacctcggataacgccgcctgccgcaaagccaggatcacctcaggcgaaatcccttcagcccgctgtggcggaaaaacaagggcaccagtggaaagacagcgatccagtgatggccggaatcggcgaagaaattgcccattttcagaaggagttggaggagctcaaggctcgcacttctaaagcctgtttccaggtaggcacctccgaggagatgaaaatgctgagaaccgagtcagacgaccttcatacattccttctggagatcaaagagaccaccgaaagtctccatggggacatctcctcactgaagaccacgctgctggaaggtttcgccggtgtggaggaagcgagagaacagaacgagcgtaacagggatagcggatacttgcatctgttgtacaaaaggccgctggatccaaagtccgaggcccagctgcaagagatcagaaggctgcaccagtatgttaagttcgcagtccaggatgtcaacgacgttcttgatctcgagtgggatcagcacttggagcagaagaaaaagcagcgccacttgctggttcctgagagggagaccctcttcaacaccctggccaacaaccgcgaaatcattaaccagcagcgaaaaagactcaaccacctcgtggacagcctccagcagctgcggttgtacaaacaaacgtcattgtggtccctatcttccgccgtgccttcccagagtagcattcattcattcgatagcgatctcgaatcactgtgtaacgcacttttgaaaactaccattgagtcgcacactaagagcttgcctaaagtgcccgcaaaactgagcccaatgaagcaggcacaactacgtaacttcctggcaaagcgaaaaacccctccagtacgctccacggcacctgcatccctcagcaggtcagccttcttaagccagcgctactacgaggatctggacgaggtatcttcaacttcctctgtctcgcagtccctcgagtcagaagacgccagaacttcttgcaaagatgacgaggcagtcgtgcaagccccaagacacgcacctgtcgttcggactccatccattcagccgagccttctgccacatgctgcaccattcgctaagagccaccttgtccacgggtcaagtcctggcgtcatgggtacaagtgtcgccacgagcgcaagtaagattatccctcaaggagccgacagcacaatgttggccacaaaaacagtgaaacacggagccccatccccctcccatcccatctctgctccccaggccgctgctgcggctgccttaagacggcaaatggcttcccaggccccagctgtgaatacactgaccgagtccaccttgaaaaatgtcccccaagtggtgaatgtgcaggagctaaagaacaatccagccactcccagcacagcgatgggctccagcgttccctactctaccgcaaagactcctcatcccgtgctgactcctgtggctgccaaccaagccaaacagggaagcttgatcaattcactgaagccatccggtcctacacccgcaagcggacagctttcttcaggtgataaggcctccgggacagccaagatcgaaacagccgtcacttccaccccgagcgccagcgggcaattcagcaagcccttcagctttagtccctcaggtactggattcaactttggcatcattacacccacaccttccagcaacttcacagcagcacagggcgctaccccctctactaaagagtcttcccagcccgacgccttttccagcgggggagggtccaagccaagctacgaggccattccggagagtagccccccttctggaatcacttccgcctcaaacaccacccccggagagccagcagcgtctagcagcagacctgtcgcacccagtggcacagctttgtctactacaagctcaaaactggagacacctccatctaagctaggcgagcttttgtttccatcttcattagcgggagagactcttggctctttttctggcctacgggtgggtcaggccgacgactctaccaagcccactaataaagcctctagcaccagtctgacttctacacaaccaaccaagacttctggcgtgccctccggatttaactttactgcccctccagtgctggggaaacacaccgaaccaccggtgacctcctccgcaacaaccaccagcgttgcgcctcccgcagccacttctacctcttctactgctgttttcggcagtctgccggttacatccgccggaagctctggtgtgatttcattcgggggaacgagcctgtctgctggcaaaacatctttttcatttggaagccaacagactaactccaccgttccacccagtgcccctccacctacgacagcggcaacgccccttcctacttcgttcccaacccttagtttcggaagtctcctgagctcggcaaccacaccctctctgcctatgagtgccggacggtccacagaagaggccacatcgagtgccctgcccgaaaaaccaggggactccgaagtcagcgcttcagccgcatccctgctcgaggagcagcagtcagcgcaacttcctcaggccccaccacagacctctgactcagttaagaaagagccagtcctggcccagcccgctgtgtctaactctggaacagctgcgagctctacctctctcgtggcattgtcagcggaagccacacctgcaacaacaggcgttccagacgcgaggactgaggccgtaccgccagctagttccttcagcgtgcctggacagactgccgtgacagctgccgctatcagctcagcaggtcctgtggctgtcgagaccagttccacccctattgcctccagtactactagcatcgtagcgccaggcccatcagccgaggccgctgctttcggaaccgtgacatcaggttcttccgttttcgcccagccccctgccgctagcagcagtagtgcctttaaccaacttactaataatactgccactgcaccaagcgctactcctgtgtttggccaggtagccgctagcaccgcaccaagcctgtttggacagcagacggggtcaacggccagtacagccgcagcaaccccacaggtgagctcctccggattttcaagtccagcttttgggactacagccccaggcgtgttcgggcagaccacattcggacaggctagcgtgttcggacagagcgcctcctccgctgcttctgttttcagcttctcccaacccggtttttctagcgtgcccgcttttggacagcccgctagcagtacccctactagcaccagcggaagcgtttttggggcagcttcctcaacatcctcatcgtcaagcttcagttttgggcagtcatcccccaacaccggcggaggcctgttcggccagagcaatgctccagctttcggacagtccccgggatttggtcaaggcggaagcgtttttgggggtacttctgcggcaacgacgacagcagctactagcggctttagcttttgccaggcatcaggcttcgggagttctaatactgggtccgtgttcggccaggccgcaagtactggcggtatcgtgttcggacaacagtctagcagttccagcggctctgtgttcgggagcgggaacacgggtcggggtggcggattcttcagcgggctcggaggaaagcctagtcaggatgctgccaacaaaaaccctttcagcagtgcctcaggcggtttcggctcaactgccacctccaataccagcaacttgtttggtaactccggagccaaaacttttggaggattcgcgagttccagttttggagagcagaagcccactggcacattttcctctgggggtggatcagtggcgtcccagggttttggcttcagcagtcctaacaagacgggcggattcggagccgctcccgtgtttggctcacctccgacctttgggggaagccctggcttcggaggagtccctgcctttggctctgcccctgcctttacctctccccttgggtcaacaggtggtaaagtcttcggggaagggacagccgctgcgagcgcaggaggcttcggattcggcagcagctcaaacacaacatcttttggaacactagcaagtcagaatgcaccaacgtttgggtctcttagccagcaaacttcaggcttcggcacacagagttcaggcttttccggatttggtagcggcacggggggatttagctttggatcgaataattcatcagtgcagggctttgggggatggagaagcta

SEQ ID NO: 152663 - DNA, 4560 bp, Artificial Sequence
  derived and/or modified sequence
atgaaacctagcttccccccttccaccagtgctgtgaaggtaaatctctctgagaagtttaccgctgctgccaccagtactcccgttagttcttcacagagtgcccctcctatgagtcccttttcctccgcctcaaagcctgctgcatccgggcctttgagtcacccgacccccttgtctgcgcctccctcctctgtgcctctaaaatcttcagtcctgccctctccgagcggcagatcagcccaagggtccagtagccctgtgcctagtatggtgcagaagtccccaaggattactcctccggcagccaaaccaggttctccccaggccaaaagcctccaacccgcagtcgcagagaagcagggccatcaatggaaggattctgaccccgtcatggcaggaattggggaggagatcgcacacttccaaaaggagctggaggaacttaaagccagaacctccaaagcctgtttccaagtcggaaccagcgaggaaatgaagatgctgagaactgaatcggatgatcttcacacctttttgctagagatcaaggaaactaccgaaagtctgcacggggacatcagctcactcaaaacaacactgcttgaggggttcgcgggagtggaagaggcgcgtgagcagaacgagcgtaatcgcgactcaggctacctgcaccttttatacaagagaccattggacccaaaatccgaggcacagctacaagaaataaggaggctgcatcagtatgttaagtttgccgtgcaggacgtaaacgacgtcctcgaccttgaatgggaccagcatcttgagcagaagaagaaacagcgtcaccttcttgtccctgagcgtgaaaccctatttaacacactggctaacaaccgagaaatcatcaatcaacagaggaagcgactcaatcacctggttgactcccttcagcagctcaggttgtataagcagacctccctgtggtcactttcttcagctgtcccctcacagtccagtatccattcttttgatagcgacctggaatctctatgtaacgctctcctgaaaactactatcgaaagccacaccaagtctcttccaaaggtccctgcgaagctcagccccatgaaacaggctcagctgaggaacttcctggccaaaagaaaaacacctccggtgagaagcaccgcaccagcttctctgtctagatcagcctttttgtctcagagatactacgaggatctggacgaagtctcgtccacttcttccgtgagccaaagccttgaaagcgaggacgcgaggacctcttgcaaagatgacgaagctgtggttcaagcaccaagacatgctccagtggttagaacaccctcgatccagccaagtctccttccacacgctgcgccattcgctaagtctcatctggtgcacgggagttctcctggcgtgatgggcacgagtgtggcgacttctgccagcaaaatcataccacagggagccgatagcaccatgctggctaccaagacggtcaagcacggggcaccaagtcccagccatccaatttctgcccctcaggcggcagctgccgctgccttacggcgacagatggcctcacaggctcccgctgtcaatacactcactgagtccacactgaagaatgtcccgcaggtggtgaacgtgcaagagctcaaaaacaaccccgctacccccagcacggccatgggctcttcagtgccttactctaccgccaagacaccacatccagtgttaacccctgttgccgctaatcaggcaaagcaaggcagtctgattaacagcctcaagccctccggacccacgccggctagtgggcaactcagttccggcgacaaagcctccggaaccgctaagattgagaccgccgtcacaagtacccccagcgcatcgggccagttctctaaacctttctctttcagtcccagtggcacaggattcaatttcgggattattacccctacccccagtagtaatttcacggctgcacagggcgcaactcccagcaccaaagagtcttctcagcccgacgcattttcctccggagggggttccaaacccagttatgaagcgatcccagagtcaagtcccccttctggcattacctctgcctcaaatacaacccccggtgagcctgccgctagcagctcaagacccgtagccccttccgggactgcgctgagtaccaccagcagtaagcttgagacacctccaagcaaactgggcgaactcctgttcccttcttctttagctggtgaaactctcggctcattctccggactgcgagtgggtcaggctgacgacagcaccaagcctacaaataaggcatcaagtacctcactgacatctactcaacccaccaagacgtcaggtgtcccctctgggttcaattttactgccccacctgtattaggcaaacacaccgagcctccagtgacttccagcgccactaccacttcggttgcacccccagcggctacatccacatcatcaaccgcggttttcggctcgctgccagtgactagtgcgggatcctccggtgtgatctcatttgggggtacctcattgtcagcaggtaaaacatctttctctttcggctcacagcagacaaattcaaccgttcctcctagcgcacctccaccaacaaccgctgccacacccctcccaacttcatttcctaccctgtcttttggatcgctcctatccagcgccacaacacctagcctccctatgtccgctggtcgatctactgaggaagccacctccagtgcattgccagaaaaaccgggtgattcggaggtctctgcctctgccgcttctctgctggaggagcagcaatctgcacagctccctcaagcacctccgcagacctctgactcagtgaagaaggaaccggtgctggcccagcctgctgtgagtaactcgggaacagctgcctcatctacttcactcgtcgcactgtccgcggaggcgactccggctacgacaggtgtgcctgacgccagaaccgaagcggtaccccctgccagcagcttctccgtgcctgggcaaacagcagtcaccgctgctgccattagctccgccggtccagtcgccgtggagacatcctccaccccgattgccagctccaccacatcgattgtcgcccctggaccctctgccgaggctgctgctttcgggacagtgacatcagggtcaagcgttttcgcacagcctccggcagcatctagcagctccgcattcaaccagctgactaataataccgccaccgcaccctccgccacacccgtgtttgggcaggttgccgcttcaactgctccctctttgttcggccaacagaccgggtctaccgcatccactgccgctgcaactccccaagtcagcagtagcggattctcttctcctgcctttggaaccaccgcccctggggtgtttggacagaccacttttgggcaagcctcagtctttgggcaatcagctagctcagcggcatccgtcttttcgttctcccagccaggtttcagttccgtgccagcttttggacagccagccagcagcaccccgacaagcacaagcggctctgtattcggggctgcttcatcaaccagctcctcttcctctttttcattcggccagtcctcacccaacaccggtggaggactcttcggtcagtcaaacgcaccagccttcggccagtcccctggctttgggcagggaggctcggtgtttggaggcacttccgctgctacaaccacagccgcaacttcagggttctctttctgtcaggcaagcggattcggttcttcgaataccggaagcgtatttggtcaggctgcatctactggcggaatcgtcttcggccagcagtcttcatcatcctccggaagcgtgttcggaagcggaaacactggcaggggagggggattcttctctggcctcggagggaagccctctcaagatgctgctaataagaatccttttagctcagcatctggaggtttcggaagtacggcgactagcaatactagtaacctcttcgggaattccggcgcaaagacatttggaggcttcgcctcatcttcatttggcgagcagaagcccacaggcaccttcagtagtggaggcggaagtgtcgcttcacagggtttcggcttctctagcccgaataaaaccggtggtttcggagcggcacctgttttcggatccccaccaacattcggcggtagccctgggttcggaggagttcccgctttcggcagcgcccctgccttcacttctccgctagggtccacggggggaaaagtgttcggggagggcactgctgccgcttccgccggtgggtttggttttggctcatccagcaatacaacatcgtttggcaccctcgcgagccagaacgcaccaaccttcgggtcactgagccaacagacttctggatttggtacacaaagcagcggcttttcaggctttggatctggcacgggcggattctccttcggctccaacaacagttccgtgcagggattcggtggctggaggagctag

SEQ ID NO: 152664 - DNA, 6273 bp, Artificial Sequence
  derived and/or modified sequence
atgggcgacgagatggacgccatgatccccgagagagagatgaaggacttccagttcagagccctgaagaaggtgagaatcttcgacagccccgaggagctgcccaaggagagaagcagcctgctggccgtgagcaacaagtacggcctggtgttcgccggcggcgccagcggcctgcagatcttccccaccaagaacctgctgatccagaacaagcccggcgacgaccccaacaagatcgtggacaaggtgcagggcctgctggtgcccatgaagttccccatccaccacctggccctgagctgcgacaacctgaccctgagcgcctgcatgatgagcagcgagtacggcagcatcatcgccttcttcgacgtgagaaccttcagcaacgaggccaagcagcagaagagacccttcgcctaccacaagctgctgaaggacgccggcggcatggtgatcgacatgaagtggaaccccaccgtgcccagcatggtggccgtgtgcctggccgacggcagcatcgccgtgctgcaggtgaccgagaccgtgaaggtgtgcgccaccctgcccagcaccgtggccgtgaccagcgtgtgctggagccccaagggcaagcagctggccgtgggcaagcagaacggcaccgtggtgcagtacctgcccaccctgcaggagaagaaggtgatcccctgcccccccttctacgagagcgaccaccccgtgagagtgctggacgtgctgtggatcggcacctacgtgttcgccatcgtgtacgccgccgccgacggcaccctggagaccagccccgacgtggtgatggccctgctgcccaagaaggaggagaagcaccccgagatcttcgtgaacttcatggagccctgctacggcagctgcaccgagagacagcaccactactacctgagctacatcgaggagtgggacctggtgctggccgccagcgccgccagcaccgaggtgagcatcctggccagacagagcgaccagatcaactgggagagctggctgctggaggacagcagcagagccgagctgcccgtgaccgacaagagcgacgacagcctgcccatgggcgtggtggtggactacaccaaccaggtggagatcaccatcagcgacgagaagaccctgccccccgcccccgtgctgatgctgctgagcaccgacggcgtgctgtgccccttctacatgatcaaccagaaccccggcgtgaagagcctgatcaagacccccgagagactgagcctggagggcgagagacagcccaagagccccggcagcacccccaccacccccaccagcagccaggccccccagaagctggacgccagcgccgccgccgcccccgccagcctgccccccagcagccccgccgcccccatcgccaccttcagcctgctgcccgccggcggcgcccccaccgtgttcagcttcggcagcagcagcctgaagagcagcgccaccgtgaccggcgagccccccagctacagcagcggcagcgacagcagcaaggccgcccccggccccggccccagcaccttcagcttcgtgccccccagcaaggccagcctggcccccacccccgccgccagccccgtggcccccagcgccgccagcttcagcttcggcagcagcggcttcaagcccaccctggagagcacccccgtgcccagcgtgagcgcccccaacatcgccatgaagcccagcttcccccccagcaccagcgccgtgaaggtgaacctgagcgagaagttcaccgccgccgccaccagcacccccgtgagcagcagccagagcgccccccccatgagccccttcagcagcgccagcaagcccgccgccagcggccccctgagccaccccacccccctgagcgccccccccagcagcgtgcccctgaagagcagcgtgctgcccagccccagcggcagaagcgcccagggcagcagcagccccgtgcccagcatggtgcagaagagccccagaatcaccccccccgccgccaagcccggcagcccccaggccaagagcctgcagcccgccgtggccgagaagcagggccaccagtggaaggacagcgaccccgtgatggccggcatcggcgaggagatcgcccacttccagaaggagctggaggagctgaaggccagaaccagcaaggcctgcttccaggtgggcaccagcgaggagatgaagatgctgagaaccgagagcgacgacctgcacaccttcctgctggagatcaaggagaccaccgagagcctgcacggcgacatcagcagcctgaagaccaccctgctggagggcttcgccggcgtggaggaggccagagagcagaacgagagaaacagagacagcggctacctgcacctgctgtacaagagacccctggaccccaagagcgaggcccagctgcaggagatcagaagactgcaccagtacgtgaagttcgccgtgcaggacgtgaacgacgtgctggacctggagtgggaccagcacctggagcagaagaagaagcagagacacctgctggtgcccgagagagagaccctgttcaacaccctggccaacaacagagagatcatcaaccagcagagaaagagactgaaccacctggtggacagcctgcagcagctgagactgtacaagcagaccagcctgtggagcctgagcagcgccgtgcccagccagagcagcatccacagcttcgacagcgacctggagagcctgtgcaacgccctgctgaagaccaccatcgagagccacaccaagagcctgcccaaggtgcccgccaagctgagccccatgaagcaggcccagctgagaaacttcctggccaagagaaagaccccccccgtgagaagcaccgcccccgccagcctgagcagaagcgccttcctgagccagagatactacgaggacctggacgaggtgagcagcaccagcagcgtgagccagagcctggagagcgaggacgccagaaccagctgcaaggacgacgaggccgtggtgcaggcccccagacacgcccccgtggtgagaacccccagcatccagcccagcctgctgccccacgccgcccccttcgccaagagccacctggtgcacggcagcagccccggcgtgatgggcaccagcgtggccaccagcgccagcaagatcatcccccagggcgccgacagcaccatgctggccaccaagaccgtgaagcacggcgcccccagccccagccaccccatcagcgccccccaggccgccgccgccgccgccctgagaagacagatggccagccaggcccccgccgtgaacaccctgaccgagagcaccctgaagaacgtgccccaggtggtgaacgtgcaggagctgaagaacaaccccgccacccccagcaccgccatgggcagcagcgtgccctacagcaccgccaagaccccccaccccgtgctgacccccgtggccgccaaccaggccaagcagggcagcctgatcaacagcctgaagcccagcggccccacccccgccagcggccagctgagcagcggcgacaaggccagcggcaccgccaagatcgagaccgccgtgaccagcacccccagcgccagcggccagttcagcaagcccttcagcttcagccccagcggcaccggcttcaacttcggcatcatcacccccacccccagcagcaacttcaccgccgcccagggcgccacccccagcaccaaggagagcagccagcccgacgccttcagcagcggcggcggcagcaagcccagctacgaggccatccccgagagcagcccccccagcggcatcaccagcgccagcaacaccacccccggcgagcccgccgccagcagcagcagacccgtggcccccagcggcaccgccctgagcaccaccagcagcaagctggagaccccccccagcaagctgggcgagctgctgttccccagcagcctggccggcgagaccctgggcagcttcagcggcctgagagtgggccaggccgacgacagcaccaagcccaccaacaaggccagcagcaccagcctgaccagcacccagcccaccaagaccagcggcgtgcccagcggcttcaacttcaccgccccccccgtgctgggcaagcacaccgagccccccgtgaccagcagcgccaccaccaccagcgtggccccccccgccgccaccagcaccagcagcaccgccgtgttcggcagcctgcccgtgaccagcgccggcagcagcggcgtgatcagcttcggcggcaccagcctgagcgccggcaagaccagcttcagcttcggcagccagcagaccaacagcaccgtgccccccagcgcccccccccccaccaccgccgccacccccctgcccaccagcttccccaccctgagcttcggcagcctgctgagcagcgccaccacccccagcctgcccatgagcgccggcagaagcaccgaggaggccaccagcagcgccctgcccgagaagcccggcgacagcgaggtgagcgccagcgccgccagcctgctggaggagcagcagagcgcccagctgccccaggcccccccccagaccagcgacagcgtgaagaaggagcccgtgctggcccagcccgccgtgagcaacagcggcaccgccgccagcagcaccagcctggtggccctgagcgccgaggccacccccgccaccaccggcgtgcccgacgccagaaccgaggccgtgccccccgccagcagcttcagcgtgcccggccagaccgccgtgaccgccgccgccatcagcagcgccggccccgtggccgtggagaccagcagcacccccatcgccagcagcaccaccagcatcgtggcccccggccccagcgccgaggccgccgccttcggcaccgtgaccagcggcagcagcgtgttcgcccagccccccgccgccagcagcagcagcgccttcaaccagctgaccaacaacaccgccaccgcccccagcgccacccccgtgttcggccaggtggccgccagcaccgcccccagcctgttcggccagcagaccggcagcaccgccagcaccgccgccgccaccccccaggtgagcagcagcggcttcagcagccccgccttcggcaccaccgcccccggcgtgttcggccagaccaccttcggccaggccagcgtgttcggccagagcgccagcagcgccgccagcgtgttcagcttcagccagcccggcttcagcagcgtgcccgccttcggccagcccgccagcagcacccccaccagcaccagcggcagcgtgttcggcgccgccagcagcaccagcagcagcagcagcttcagcttcggccagagcagccccaacaccggcggcggcctgttcggccagagcaacgcccccgccttcggccagagccccggcttcggccagggcggcagcgtgttcggcggcaccagcgccgccaccaccaccgccgccaccagcggcttcagcttctgccaggccagcggcttcggcagcagcaacaccggcagcgtgttcggccaggccgccagcaccggcggcatcgtgttcggccagcagagcagcagcagcagcggcagcgtgttcggcagcggcaacaccggcagaggcggcggcttcttcagcggcctgggcggcaagcccagccaggacgccgccaacaagaaccccttcagcagcgccagcggcggcttcggcagcaccgccaccagcaacaccagcaacctgttcggcaacagcggcgccaagaccttcggcggcttcgccagcagcagcttcggcgagcagaagcccaccggcaccttcagcagcggcggcggcagcgtggccagccagggcttcggcttcagcagccccaacaagaccggcggcttcggcgccgcccccgtgttcggcagcccccccaccttcggcggcagccccggcttcggcggcgtgcccgccttcggcagcgcccccgccttcaccagccccctgggcagcaccggcggcaaggtgttcggcgagggcaccgccgccgccagcgccggcggcttcggcttcggcagcagcagcaacaccaccagcttcggcaccctggccagccagaacgcccccaccttcggcagcctgagccagcagaccagcggcttcggcacccagagcagcggcttcagcggcttcggcagcggcaccggcggcttcagcttcggcagcaacaacagcagcgtgcagggcttcggcggctggagaagctag

SEQ ID NO: 152665 - DNA, 4560 bp, Artificial Sequence
  derived and/or modified sequence
atgaagcccagcttcccccccagcaccagcgccgtgaaggtgaacctgagcgagaagttcaccgccgccgccaccagcacccccgtgagcagcagccagagcgccccccccatgagccccttcagcagcgccagcaagcccgccgccagcggccccctgagccaccccacccccctgagcgccccccccagcagcgtgcccctgaagagcagcgtgctgcccagccccagcggcagaagcgcccagggcagcagcagccccgtgcccagcatggtgcagaagagccccagaatcaccccccccgccgccaagcccggcagcccccaggccaagagcctgcagcccgccgtggccgagaagcagggccaccagtggaaggacagcgaccccgtgatggccggcatcggcgaggagatcgcccacttccagaaggagctggaggagctgaaggccagaaccagcaaggcctgcttccaggtgggcaccagcgaggagatgaagatgctgagaaccgagagcgacgacctgcacaccttcctgctggagatcaaggagaccaccgagagcctgcacggcgacatcagcagcctgaagaccaccctgctggagggcttcgccggcgtggaggaggccagagagcagaacgagagaaacagagacagcggctacctgcacctgctgtacaagagacccctggaccccaagagcgaggcccagctgcaggagatcagaagactgcaccagtacgtgaagttcgccgtgcaggacgtgaacgacgtgctggacctggagtgggaccagcacctggagcagaagaagaagcagagacacctgctggtgcccgagagagagaccctgttcaacaccctggccaacaacagagagatcatcaaccagcagagaaagagactgaaccacctggtggacagcctgcagcagctgagactgtacaagcagaccagcctgtggagcctgagcagcgccgtgcccagccagagcagcatccacagcttcgacagcgacctggagagcctgtgcaacgccctgctgaagaccaccatcgagagccacaccaagagcctgcccaaggtgcccgccaagctgagccccatgaagcaggcccagctgagaaacttcctggccaagagaaagaccccccccgtgagaagcaccgcccccgccagcctgagcagaagcgccttcctgagccagagatactacgaggacctggacgaggtgagcagcaccagcagcgtgagccagagcctggagagcgaggacgccagaaccagctgcaaggacgacgaggccgtggtgcaggcccccagacacgcccccgtggtgagaacccccagcatccagcccagcctgctgccccacgccgcccccttcgccaagagccacctggtgcacggcagcagccccggcgtgatgggcaccagcgtggccaccagcgccagcaagatcatcccccagggcgccgacagcaccatgctggccaccaagaccgtgaagcacggcgcccccagccccagccaccccatcagcgccccccaggccgccgccgccgccgccctgagaagacagatggccagccaggcccccgccgtgaacaccctgaccgagagcaccctgaagaacgtgccccaggtggtgaacgtgcaggagctgaagaacaaccccgccacccccagcaccgccatgggcagcagcgtgccctacagcaccgccaagaccccccaccccgtgctgacccccgtggccgccaaccaggccaagcagggcagcctgatcaacagcctgaagcccagcggccccacccccgccagcggccagctgagcagcggcgacaaggccagcggcaccgccaagatcgagaccgccgtgaccagcacccccagcgccagcggccagttcagcaagcccttcagcttcagccccagcggcaccggcttcaacttcggcatcatcacccccacccccagcagcaacttcaccgccgcccagggcgccacccccagcaccaaggagagcagccagcccgacgccttcagcagcggcggcggcagcaagcccagctacgaggccatccccgagagcagcccccccagcggcatcaccagcgccagcaacaccacccccggcgagcccgccgccagcagcagcagacccgtggcccccagcggcaccgccctgagcaccaccagcagcaagctggagaccccccccagcaagctgggcgagctgctgttccccagcagcctggccggcgagaccctgggcagcttcagcggcctgagagtgggccaggccgacgacagcaccaagcccaccaacaaggccagcagcaccagcctgaccagcacccagcccaccaagaccagcggcgtgcccagcggcttcaacttcaccgccccccccgtgctgggcaagcacaccgagccccccgtgaccagcagcgccaccaccaccagcgtggccccccccgccgccaccagcaccagcagcaccgccgtgttcggcagcctgcccgtgaccagcgccggcagcagcggcgtgatcagcttcggcggcaccagcctgagcgccggcaagaccagcttcagcttcggcagccagcagaccaacagcaccgtgccccccagcgcccccccccccaccaccgccgccacccccctgcccaccagcttccccaccctgagcttcggcagcctgctgagcagcgccaccacccccagcctgcccatgagcgccggcagaagcaccgaggaggccaccagcagcgccctgcccgagaagcccggcgacagcgaggtgagcgccagcgccgccagcctgctggaggagcagcagagcgcccagctgccccaggcccccccccagaccagcgacagcgtgaagaaggagcccgtgctggcccagcccgccgtgagcaacagcggcaccgccgccagcagcaccagcctggtggccctgagcgccgaggccacccccgccaccaccggcgtgcccgacgccagaaccgaggccgtgccccccgccagcagcttcagcgtgcccggccagaccgccgtgaccgccgccgccatcagcagcgccggccccgtggccgtggagaccagcagcacccccatcgccagcagcaccaccagcatcgtggcccccggccccagcgccgaggccgccgccttcggcaccgtgaccagcggcagcagcgtgttcgcccagccccccgccgccagcagcagcagcgccttcaaccagctgaccaacaacaccgccaccgcccccagcgccacccccgtgttcggccaggtggccgccagcaccgcccccagcctgttcggccagcagaccggcagcaccgccagcaccgccgccgccaccccccaggtgagcagcagcggcttcagcagccccgccttcggcaccaccgcccccggcgtgttcggccagaccaccttcggccaggccagcgtgttcggccagagcgccagcagcgccgccagcgtgttcagcttcagccagcccggcttcagcagcgtgcccgccttcggccagcccgccagcagcacccccaccagcaccagcggcagcgtgttcggcgccgccagcagcaccagcagcagcagcagcttcagcttcggccagagcagccccaacaccggcggcggcctgttcggccagagcaacgcccccgccttcggccagagccccggcttcggccagggcggcagcgtgttcggcggcaccagcgccgccaccaccaccgccgccaccagcggcttcagcttctgccaggccagcggcttcggcagcagcaacaccggcagcgtgttcggccaggccgccagcaccggcggcatcgtgttcggccagcagagcagcagcagcagcggcagcgtgttcggcagcggcaacaccggcagaggcggcggcttcttcagcggcctgggcggcaagcccagccaggacgccgccaacaagaaccccttcagcagcgccagcggcggcttcggcagcaccgccaccagcaacaccagcaacctgttcggcaacagcggcgccaagaccttcggcggcttcgccagcagcagcttcggcgagcagaagcccaccggcaccttcagcagcggcggcggcagcgtggccagccagggcttcggcttcagcagccccaacaagaccggcggcttcggcgccgcccccgtgttcggcagcccccccaccttcggcggcagccccggcttcggcggcgtgcccgccttcggcagcgcccccgccttcaccagccccctgggcagcaccggcggcaaggtgttcggcgagggcaccgccgccgccagcgccggcggcttcggcttcggcagcagcagcaacaccaccagcttcggcaccctggccagccagaacgcccccaccttcggcagcctgagccagcagaccagcggcttcggcacccagagcagcggcttcagcggcttcggcagcggcaccggcggcttcagcttcggcagcaacaacagcagcgtgcagggcttcggcggctggagaagctag

SEQ ID NO: 152666 - protein, 243 aa, Artificial Sequence
  derived and/or modified sequence
MGKNKQPRGQQRQGGPPAADAAGPDDMEPKKGTGAPKECGEEEPRTCCGCRFPLLLALLQLALGIAVTVVGFLMASISSSLLVRDTPFWAGIIVCLVAYLGLFMLCVSYQVDERTCIQFSMKLLYFLLSALGLTVCVLAVAFAAHHYSQLTQFTCETTLDSCQCKLPSSEPLSRTFVYRDVTDCTSVTGTFKLFLLIQMILNLVCGLVCLLACFVMWKHRYQVFYVGVRICSLTASEGPQQKI

SEQ ID NO: 152667 - protein, 140 aa, Artificial Sequence
  derived and/or modified sequence
MLCVSYQVDERTCIQFSMKLLYFLLSALGLTVCVLAVAFAAHHYSQLTQFTCETTLDSCQCKLPSSEPLSRTFVYRDVTDCTSVTGTFKLFLLIQMILNLVCGLVCLLACFVMWKHRYQVFYVGVRICSLTASEGPQQKI

SEQ ID NO: 152668 - protein, 217 aa, Artificial Sequence
  derived and/or modified sequence
MEPKKGTGAPKECGEEEPRTCCGCRFPLLLALLQLALGIAVTVVGFLMASISSSLLVRDTPFWAGIIVCLVAYLGLFMLCVSYQVDERTCIQFSMKLLYFLLSALGLTVCVLAVAFAAHHYSQLTQFTCETTLDSCQCKLPSSEPLSRTFVYRDVTDCTSVTGTFKLFLLIQMILNLVCGLVCLLACFVMWKHRYQVFYVGVRICSLTASEGPQQKI

SEQ ID NO: 152669 - protein, 128 aa, Artificial Sequence
  derived and/or modified sequence
MGKNKQPRGQQRQGGPPAADAAGPDDMEPKKGTGAPKECGEEEPRTCCGCRFPLLLALLQLALGIAVTVVGFLMASISSSLLVRDTPFWAGIIVCLVAYLGLFMLCVSYQVDERTCIQFSMKIHCHDF

SEQ ID NO: 152670 - protein, 120 aa, Artificial Sequence
  derived and/or modified sequence
MLCVSYQVDERTCIQFSMKLLYFLLSALGLTVCVLAVAFAAHHYSQLTQFTCETTLDSCQCKLPSSEPLSRTFVYRDVTDCTSVTGTFKLFLLIQMILNLVCGLVCLLACFVMWKHRYQV

SEQ ID NO: 152671 - DNA, 732 bp, Artificial Sequence
  derived and/or modified sequence
atggggaaaaataaacaacctcgcggccagcagaggcagggcggtccaccagctgcagatgctgcaggaccggacgacatggagccgaagaaaggtaccggggcccccaaagagtgcggcgaggaagagcctagaacatgttgcggctgccggttccccctcctgcttgccttactccagctagcattaggtattgccgtgacagtggtgggatttcttatggcgtctataagtagttccctgctggttagagatacccccttctgggcagggattattgtctgcctcgttgcctatctcggcttattcatgctgtgcgtgtcctaccaagtcgacgagagaacatgcattcagttttccatgaagctcctgtacttcctgctctcggctctcggcctcaccgtgtgtgtgttggcagtcgcatttgcagcgcaccactacagccagctcacccagtttacttgtgagaccactttagacagctgtcagtgtaagctgcccagctctgagcccctttccaggaccttcgtttatcgggacgttactgattgcaccagcgtgaccggaacttttaaactgtttctactgattcagatgatcctcaatctggtgtgcggactcgtgtgcctgctcgcttgtttcgttatgtggaagcatcgctaccaggtgttctatgttggcgtgcgtatctgttctttgacagctagtgaggggccccaacagaaaatctag

SEQ ID NO: 152672 - DNA, 654 bp, Artificial Sequence
  derived and/or modified sequence
atggaacctaagaagggcactggggctccaaaagaatgcggcgaggaggaaccccgaacttgttgtggttgccgattccctctcctgctagcattactccagctggccctggggatcgccgttacagtggttggctttctcatggctagtatttcctcatccctgctcgtgagggacacacccttctgggccggaattatagtctgtttggtagcctatctggggctgttcatgctgtgcgtgtcctatcaggtggatgagcggacttgtatccagttcagcatgaagctgctttatttcttacttagcgccctcgggctaacggtgtgtgtcctcgcagtggcctttgctgctcatcactactcccaattgacccagtttacttgtgagacaacactggattcttgtcagtgtaagcttcctagctctgagcctttatctcgcacgtttgtctatcgagacgtgacagactgcacgtcggtgaccggaactttcaaactttttctactcatccagatgatcctgaatctggtgtgcggcctggtctgtttactcgcatgctttgttatgtggaagcacaggtatcaggttttctatgtgggcgtgcgcatctgttcgcttaccgccagcgaagggcctcagcaaaaaatttag

SEQ ID NO: 152673 - DNA, 387 bp, Artificial Sequence
  derived and/or modified sequence
atgggtaagaacaagcagccacgggggcagcagcgccagggcggccctccggcagccgatgctgccggtccggatgacatggaacctaagaagggcacaggcgctccaaaggagtgcggagaagaggagccacggacctgctgtgggtgcaggttccccctgttattagccctgctgcagctggctttagggattgcagttaccgtcgtgggatttttgatggcttctatatccagttccctgctagtgagagatactcccttctgggctggaattatcgtgtgtctcgtagcttatctgggcctcttcatgctttgtgtgagctaccaggtcgacgaaagaacgtgcatccagttttctatgaaaatccattgccacgatttctag

SEQ ID NO: 152674 - DNA, 732 bp, Artificial Sequence
  derived and/or modified sequence
atgggcaagaacaagcagccccggggccagcagaggcagggcggccccccagctgctgatgctgctggcccagatgacatggagcccaagaagggcactggagcccccaaggaatgtggggaggaggagcccaggacctgctgcggctgccgcttccccctgctgctggccctgctgcagctggccctgggcattgctgtgacagtggtgggcttcctgatggccagcatcagcagcagcctgctggtgcgggacacccccttctgggccggcatcatcgtgtgcctggtggcctacctgggcctcttcatgctgtgtgtgtcctaccaggtggatgagaggacctgcatccagttctccatgaagctgctgtacttcctgctgagcgccctgggcctgactgtgtgtgtgctggccgtggcctttgctgcccaccactacagccagctgacccagttcacctgtgagaccaccctggacagctgccagtgcaagctgcccagcagcgagcccctgagcaggacctttgtgtacagagatgtgacagactgcacctctgtgacaggcaccttcaagctgttcctgctgatccagatgatcctgaacctggtgtgtggcctggtgtgcctgctggcctgctttgtgatgtggaagcaccgctaccaggtgttctacgtgggcgtgcgcatctgcagcctgacagccagcgagggcccccagcagaagatctag

SEQ ID NO: 152675 - DNA, 654 bp, Artificial Sequence
  derived and/or modified sequence
atggagcccaagaagggcactggagcccccaaggaatgtggggaggaggagcccaggacctgctgcggctgccgcttccccctgctgctggccctgctgcagctggccctgggcattgctgtgacagtggtgggcttcctgatggccagcatcagcagcagcctgctggtgcgggacacccccttctgggccggcatcatcgtgtgcctggtggcctacctgggcctcttcatgctgtgtgtgtcctaccaggtggatgagaggacctgcatccagttctccatgaagctgctgtacttcctgctgagcgccctgggcctgactgtgtgtgtgctggccgtggcctttgctgcccaccactacagccagctgacccagttcacctgtgagaccaccctggacagctgccagtgcaagctgcccagcagcgagcccctgagcaggacctttgtgtacagagatgtgacagactgcacctctgtgacaggcaccttcaagctgttcctgctgatccagatgatcctgaacctggtgtgtggcctggtgtgcctgctggcctgctttgtgatgtggaagcaccgctaccaggtgttctacgtgggcgtgcgcatctgcagcctgacagccagcgagggcccccagcagaagatctag

SEQ ID NO: 152676 - DNA, 387 bp, Artificial Sequence
  derived and/or modified sequence
atgggcaagaacaagcagccccggggccagcagaggcagggcggccccccagctgctgatgctgctggcccagatgacatggagcccaagaagggcactggagcccccaaggaatgtggggaggaggagcccaggacctgctgcggctgccgcttccccctgctgctggccctgctgcagctggccctgggcattgctgtgacagtggtgggcttcctgatggccagcatcagcagcagcctgctggtgcgggacacccccttctgggccggcatcatcgtgtgcctggtggcctacctgggcctcttcatgctgtgtgtgtcctaccaggtggatgagaggacctgcatccagttctccatgaagatccactgccacgacttctag

SEQ ID NO: 152677 - DNA, 732 bp, Artificial Sequence
  derived and/or modified sequence
atgggcaagaacaagcagccccggggccagcagcggcagggcggcccacctgctgctgatgccgctgggccggacgacatggagccaaagaagggcaccggcgcgcctaaagagtgtggggaggaggagcctcgcacctgttgcggatgtagattccccttactgctggcccttttacagttggcactggggattgccgtgactgtcgtgggcttcctaatggctagtatcagcagttccctgctcgtacgagatacccctttctgggcaggcataatcgtatgtctggtggcttatctgggcctgttcatgctctgcgtcagttaccaggtggatgaacgcacctgcattcaattctctatgaagctcctctattttttgttgtcggctctcggactgaccgtgtgcgtgctcgcggtcgcctttgctgcccatcactacagtcaactcacccagttcacttgtgagaccactttagactcctgtcagtgtaagttgccttcttctgagccccttagtcgcactttcgtgtacagagacgtgacggattgtacatcagttacagggaccttcaaattatttctcctgatacagatgatcctgaacctcgtctgcggcttggtttgcttgttggcttgttttgtcatgtggaaacacagatatcaagtattctatgtcggagtgcgcatttgtagtttgaccgcctctgaagggccccagcagaaaatctag

SEQ ID NO: 152678 - DNA, 654 bp, Artificial Sequence
  derived and/or modified sequence
atggagcccaagaagggcaccggcgcccccaaggagtgcggcgaggaggaaccccgaacttgttgtggttgtagattccctttgcttttggcgctgttgcaactggctctaggtatagcagttacagtggtgggctttttgatggcttctattagtagttccctgcttgtgagggatacccccttttgggccggcatcattgtgtgtctggtggcctacctggggctctttatgctgtgtgtgtcatatcaggtcgacgaaagaacctgcatccagtttagcatgaagctgttatacttcctgctgtctgccctggggttgacagtttgcgtgctggcagtggcctttgcagcccatcactattctcagttaacacagttcacctgtgagacaacactggattcttgccaatgtaagttgccctcttccgagcccctttctaggaccttcgtgtaccgcgacgttacagactgcaccagcgtgacggggacctttaaactgttcctcctcatccagatgatcctcaacctggtgtgcggtctggtgtgtctgctggcctgcttcgtgatgtggaagcaccggtaccaggttttctacgtaggagtcagaatatgttccctgactgcgtccgaaggccctcagcagaaaatttag

SEQ ID NO: 152679 - DNA, 387 bp, Artificial Sequence
  derived and/or modified sequence
atgggcaagaacaagcagccccggggccagcagcggcagggcggccctcccgcagccgacgcagccgggccagatgacatggaacccaagaagggaacaggcgctcccaaagaatgcggcgaagaggagcccaggacttgttgtggatgcagattccccttactcctggcccttctgcagttggctttggggatcgccgtcaccgtggtggggtttctcatggccagcattagctccagcctgctggtcagggacacccctttttgggcaggcatcatcgtctgtttggtggcctatctgggcttattcatgctttgtgtgtcttatcaggttgacgagcgaacatgcatccaatttagtatgaagattcactgtcacgacttctag

SEQ ID NO: 152680 - DNA, 732 bp, Artificial Sequence
  derived and/or modified sequence
atgggcaaaaataaacagcctagaggtcagcagcggcaaggtggacccccagcggcagatgctgccggaccagatgatatggaaccaaagaagggcacaggagcccctaaagaatgcggggaggaagagccacgcacctgctgcggatgcaggtttccactgctgctggccttgcttcagctggcccttgggatcgctgtgaccgttgttggattcttgatggcctctatatctagctccctcctggtgagggacacacctttttgggccggtatcatcgtctgccttgttgcatacctgggcctgttcatgctgtgcgtgagctaccaggtcgatgaacggacatgtatacagttctctatgaagctgttgtattttttgctgagcgctttgggactaactgtctgcgtgctagcggttgccttcgccgctcaccactactcccagctaacccagtttacttgtgaaactactctggatagttgccagtgtaagcttccctctagtgagcctctgtcacgaacatttgtctatagggatgtcaccgactgcacctctgtaaccggaaccttcaagctgtttctcctgattcagatgatacttaatctcgtatgcggcctcgtgtgtttactggcttgttttgtaatgtggaagcaccgctaccaggttttctatgttggcgttcggatttgcagcctaactgcttctgagggtcctcaacaaaagatctag

SEQ ID NO: 152681 - DNA, 654 bp, Artificial Sequence
  derived and/or modified sequence
atggagccaaagaaaggcacgggggcacccaaggagtgtggcgaggaggaacccagaacatgctgtgggtgtcgcttcccattgctcctggccctactgcagctagctctgggcatagccgtgacagtggttggctttcttatggcatccataagctctagcctcctggttcgggatacgccattttgggccggaatcattgtgtgcctggtggcataccttggtctgtttatgctctgtgttagttatcaggtagatgagcgtacgtgtatccagttttcaatgaagttactgtatttcttgctatccgctctaggtcttaccgtgtgtgtcctggccgtggcatttgctgcacatcactactctcagctgactcaatttacgtgtgagacgacccttgatagttgccagtgtaaattaccctcctcagagcctctgtctcgcacatttgtttatagagacgtaacggactgtacctcagtcaccggcacgtttaagctttttctccttatccagatgattctcaacctagtttgcggtctggtttgcctacttgcctgcttcgttatgtggaagcatcggtatcaagtgttctacgtcggcgttcgcatatgtagcctcactgcctccgagggaccgcaacagaagatttag

SEQ ID NO: 152682 - DNA, 387 bp, Artificial Sequence
  derived and/or modified sequence
atggggaagaataagcagccccgaggtcagcagaggcaggggggaccgccagcagccgacgccgctggacccgatgatatggagcccaagaagggcaccggcgcacccaaggagtgcggggaggaggagccccgaacttgctgtggctgtaggtttccacttcttttagccctcctccagctggctcttggaatcgcagtaacggtcgttggcttcctgatggcaagcatcagctcaagcttgctggtgagggatacgcccttttgggccggaatcatagtctgtctcgtggcgtacctcgggttgttcatgctgtgtgtcagctaccaggttgacgagaggacatgtatccagttcagcatgaaaatccattgccatgatttttag

SEQ ID NO: 152683 - DNA, 2788 bp, Artificial Sequence
  derived and/or modified sequence
ctctgctgcgggctccccgtggcctttggaggctcggtgagtcggctccaaatgttttccatatttgttcagcctccataattcgaataccagggcaggccgagccagccgtgcgccgcgctccagggcccagggcgccgcacacgcacccacccacccacccagcctcgcagcgccatgggcaagaacaagcagccacgcggccagcagaggcaggggggcccgccggccgcggacgccgctgggcccgacgacatggagccgaagaagggcacgggggcccccaaggagtgcggggaggaggagccccggacctgctgcggctgccggttcccgctgctgctcgccctgctgcagctggccctgggcatcgccgtgaccgtggtgggcttcctcatggcgagcatcagctcctccctgctagtcagggacactccattttgggctgggatcattgtctgcttagtggcctatcttggcttgtttatgctttgtgtctcatatcaggttgacgaacggacatgtattcaattttctatgaaactgttatactttctgctgagtgccctgggcctgacggtctgtgtgctggccgtggcctttgccgcccaccactattcgcagctcacacagtttacctgtgagaccacactcgactcttgccagtgcaaactgccctcctcggagccgctcagcaggacctttgtttaccgggatgtgacggactgtaccagcgtcactggcactttcaaactgttcttactcatccagatgattcttaatttggtctgcggccttgtgtgcttgttggcctgctttgtgatgtggaaacataggtaccaggtcttctatgtgggtgtcaggatatgctccctcacggcttccgaaggcccccagcaaaagatctaacattcttgctcaaagttgcgagagaaagtagcacatggagtagctgaggttaaacaaacaaaaaaaaattttaaacaaagaaaggaaaaaaattgacaataaaagtcactcttctaattgaatatttttatatttttatgaaacaaaagagcatttcttcaggtttctattgtattttttttaacattcttgcagagaaagcaagatccaaattgattttgggatattaaaagttaacagaacactgaacaaggaaagaatggcatagatctatctttacagtctggagttaattcctgttaactcattttatccattccttacataatcttctttcctgttagtccagtttgatggtgtgaatggtgaatttcaggcccagttgctaaattttgtggcatcttcctctagtccttcccacctccagtcatcagccccactctgtcttggagacaggcaggaggtgggggaagagctgaatctctttattttccctggtagagacatcttcaaggcatgaaatagcttaaagagcagagtagaaacggaagaggctttgcaaaaggctagataactaacaacacctgggttggggcggcggcctcttctcttcagctcccttagcttggctccgtaagtggatcacttgccaaatgctttagatgattgcctctcaataattgaaaggtggtggtagttgtattctaaatgatgtagaaggtttaaaaataattacattatgcttctattctatcatctaaaacaaatcattaaaactaatttctagctaattgttaattataattatgctcagaagtctatttaatgagctctgactgtacttacgctgcactgtcggtgttaagagaaattactctcacaagagcagaggcctgaagattctttcttctgaaagccaagcaccacaaggaaaaaaaaaattattaatagctcaggttaaaaacacccatttaaacaaaaacaagagcatttgtaataggaagtgtttatacaaacagcacatttgtgatatgttgaaaagcatctctcttggcaaccaatctatgtttgaggaagattgggtaatgctgatgtgttccattcatgaaactgtatttgatacataatcctattattaattcgtatgcttagtcaacctaggaaatcaaaataatgttttgaagttcttatttgagcaatatggccttgacttggagggtagttttagttgttttgtttttaagtgactgtggtttaaagcacaaatgccccaaggtggggagacttctctctgtgattattgttgctattaaattctgaactgtatccatattttaaggaaggagctaaaaatggaaattcatgaaacataaatggtatcaagaactttatcagtatgctttgttgaaagcagaaattaagataataattgagttcaattcgcctctccgcattgcctattgatacactttactaatcatgaaattctaacctaaaaggaaaacattttcctgcttgtcttagaagaaagtggaataattccactgattgtgataatggtttcaatttctacacaatataaatatccagtataaaggaaagcgttaagtcggtaagctagaggattgtaaatatcttttatgtcctctagataaaacacccgattaacagatgttaaaccttttaatgttttgatttgctttaaaaatggccttcctacacattagctccagctaaaaagacacattggagagcttagaggataagtctctggagcagaatttatcacacacaaaagttacaccaacagaataccaagcagaatgatgaggacctgtaaaataccttgtgccctattaaaaaaaaaaaaaaaaaaaaa

SEQ ID NO: 152684 - DNA, 2503 bp, Artificial Sequence
  derived and/or modified sequence
gcacacgcgcgcactcgcagcctgtctgaagtgcagaggttcaggcggccaagggacccgcgccggtttccgcgggcgacctgcaaatcctgcccggggcccggcaggcgctgcgtcccggcgcgttggcagttggcgacccccctcgaatcccccctctgctgcgggctccccgtggcctttggaggctcggtctgcttagtggcctatcttggcttgtttatgctttgtgtctcatatcaggttgacgaacggacatgtattcaattttctatgaaactgttatactttctgctgagtgccctgggcctgacggtctgtgtgctggccgtggcctttgccgcccaccactattcgcagctcacacagtttacctgtgagaccacactcgactcttgccagtgcaaactgccctcctcggagccgctcagcaggacctttgtttaccgggatgtgacggactgtaccagcgtcactggcactttcaaactgttcttactcatccagatgattcttaatttggtctgcggccttgtgtgcttgttggcctgctttgtgatgtggaaacataggtaccaggtcttctatgtgggtgtcaggatatgctccctcacggcttccgaaggcccccagcaaaagatctaacattcttgctcaaagttgcgagagaaagtagcacatggagtagctgaggttaaacaaacaaaaaaaaattttaaacaaagaaaggaaaaaaattgacaataaaagtcactcttctaattgaatatttttatatttttatgaaacaaaagagcatttcttcaggtttctattgtattttttttaacattcttgcagagaaagcaagatccaaattgattttgggatattaaaagttaacagaacactgaacaaggaaagaatggcatagatctatctttacagtctggagttaattcctgttaactcattttatccattccttacataatcttctttcctgttagtccagtttgatggtgtgaatggtgaatttcaggcccagttgctaaattttgtggcatcttcctctagtccttcccacctccagtcatcagccccactctgtcttggagacaggcaggaggtgggggaagagctgaatctctttattttccctggtagagacatcttcaaggcatgaaatagcttaaagagcagagtagaaacggaagaggctttgcaaaaggctagataactaacaacacctgggttggggcggcggcctcttctcttcagctcccttagcttggctccgtaagtggatcacttgccaaatgctttagatgattgcctctcaataattgaaaggtggtggtagttgtattctaaatgatgtagaaggtttaaaaataattacattatgcttctattctatcatctaaaacaaatcattaaaactaatttctagctaattgttaattataattatgctcagaagtctatttaatgagctctgactgtacttacgctgcactgtcggtgttaagagaaattactctcacaagagcagaggcctgaagattctttcttctgaaagccaagcaccacaaggaaaaaaaaaattattaatagctcaggttaaaaacacccatttaaacaaaaacaagagcatttgtaataggaagtgtttatacaaacagcacatttgtgatatgttgaaaagcatctctcttggcaaccaatctatgtttgaggaagattgggtaatgctgatgtgttccattcatgaaactgtatttgatacataatcctattattaattcgtatgcttagtcaacctaggaaatcaaaataatgttttgaagttcttatttgagcaatatggccttgacttggagggtagttttagttgttttgtttttaagtgactgtggtttaaagcacaaatgccccaaggtggggagacttctctctgtgattattgttgctattaaattctgaactgtatccatattttaaggaaggagctaaaaatggaaattcatgaaacataaatggtatcaagaactttatcagtatgctttgttgaaagcagaaattaagataataattgagttcaattcgcctctccgcattgcctattgatacactttactaatcatgaaattctaacctaaaaggaaaacattttcctgcttgtcttagaagaaagtggaataattccactgattgtgataatggtttcaatttctacacaatataaatatccagtataaaggaaagcgttaagtcggtaagctagaggattgtaaatatcttttatgtcctctagataaaacacccgattaacagatgttaaaccttttaatgttttgatttgctttaaaaatggccttcctacacattagctccagctaaaaagacacattggagagcttagaggataagtctctggagcagaatttatcacacacaaaagttacaccaacagaataccaagcagaatgatgaggacctgtaaaataccttgtgccctatt

SEQ ID NO: 152685 - DNA, 1218 bp, Artificial Sequence
  derived and/or modified sequence
atatttgttcagcctccataattcgaataccagggcaggccgagccagccgtacgccgctgggcccgacgacatggagccgaagaagggcacgggggcccccaaggagtgcggggaggaggagccccggacctgctgcggctgccggttcccgctgctgctcgccctgctgcagctggccctgggcatcgccgtgaccgtggtgggcttcctcatggcgagcatcagctcctccctgctagtcagggacactccattttgggctgggatcattgtctgcttagtggcctatcttggcttgtttatgctttgtgtctcatatcaggttgacgaacggacatgtattcaattttctatgaaactgttatactttctgctgagtgccctgggcctgacggtctgtgtgctggccgtggcctttgccgcccaccactattcgcagctcacacagtttacctgtgagaccacactcgactcttgccagtgcaaactgccctcctcggagccgctcagcaggacctttgtttaccgggatgtgacggactgtaccagcgtcactggcactttcaaactgttcttactcatccagatgattcttaatttggtctgcggccttgtgtgcttgttggcctgctttgtgatgtggaaacataggtaccaggtcttctatgtgggtgtcaggatatgctccctcacggcttccgaaggcccccagcaaaagatctaacattcttgctcaaagttgcgagagaaagtagcacatggagtagctgaggttaaacaaacaaaaaaaaattttaaacaaagaaaggaaaaaaattgacaataaaagtcactcttctaattgaatatttttatatttttatgaaacaaaagagcatttcttcaggtttctattgtattttttttaacattcttgcagagaaagcaagatccaaattgattttgggatattaaaagttaacagaacactgaacaaggaaagaatggcatagatctatctttacagtctggagttaattcctgttaactcattttatccattccttacataatcttctttcctgttagtccagtttgatggtgtgaatggtgaatttcaggcccagttgctaaattttgtggcatcttcctctagtccttcccacctccagtcatcagccccactctgtcttggagacaggcaggaggtgggggaagagctgaatctctttatttt

SEQ ID NO: 152686 - DNA, 419 bp, Artificial Sequence
  derived and/or modified sequence
atgggcaagaacaagcagccacgcggccagcagaggcaggggggcccgccggccgcggacgccgctgggcccgacgacatggagccgaagaagggcacgggggcccccaaggagtgcggggaggaggagccccggacctgctgcggctgccggttcccgctgctgctcgccctgctgcagctggccctgggcatcgccgtgaccgtggtgggcttcctcatggcgagcatcagctcctccctgctagtcagggacactccattttgggctgggatcattgtctgcttagtggcctatcttggcttgtttatgctttgtgtctcatatcaggttgacgaacggacatgtattcaattttctatgaaaatccattgtcatgacttctgagctgtttgaaagagaatgttctcagaatcaag

SEQ ID NO: 152687 - DNA, 553 bp, Artificial Sequence
  derived and/or modified sequence
actctgcttgaacctccttaagggtattttaacttctcactctgcttgaacctccgtccttcgggacgcaaggattcagggagcttcctttcctggctgcgagggatcttcctgagcagagctctccgggttccccggctcgcggggcccggcgaagggcaggtctgcttagtggcctatcttggcttgtttatgctttgtgtctcatatcaggttgacgaacggacatgtattcaattttctatgaaactgttatactttctgctgagtgccctgggcctgacggtctgtgtgctggccgtggcctttgccgcccaccactattcgcagctcacacagtttacctgtgagaccacactcgactcttgccagtgcaaactgccctcctcggagccgctcagcaggacctttgtttaccgggatgtgacggactgtaccagcgtcactggcactttcaaactgttcttactcatccagatgattcttaatttggtctgcggccttgtgtgcttgttggcctgctttgtgatgtggaaacataggtaccaggtct

SEQ ID NO: 152688 - DNA, 732 bp, Artificial Sequence
  derived and/or modified sequence
atgggcaagaacaagcagcccagaggccagcagagacagggcggcccccccgccgccgacgccgccggccccgacgacatggagcccaagaagggcaccggcgcccccaaggagtgcggcgaggaggagcccagaacctgctgcggctgcagattccccctgctgctggccctgctgcagctggccctgggcatcgccgtgaccgtggtgggcttcctgatggccagcatcagcagcagcctgctggtgagagacacccccttctgggccggcatcatcgtgtgcctggtggcctacctgggcctgttcatgctgtgcgtgagctaccaggtggacgagagaacctgcatccagttcagcatgaagctgctgtacttcctgctgagcgccctgggcctgaccgtgtgcgtgctggccgtggccttcgccgcccaccactacagccagctgacccagttcacctgcgagaccaccctggacagctgccagtgcaagctgcccagcagcgagcccctgagcagaaccttcgtgtacagagacgtgaccgactgcaccagcgtgaccggcaccttcaagctgttcctgctgatccagatgatcctgaacctggtgtgcggcctggtgtgcctgctggcctgcttcgtgatgtggaagcacagataccaggtgttctacgtgggcgtgagaatctgcagcctgaccgccagcgagggcccccagcagaagatctag

SEQ ID NO: 152689 - DNA, 654 bp, Artificial Sequence
  derived and/or modified sequence
atggagcccaagaagggcaccggcgcccccaaggagtgcggcgaggaggagcccagaacctgctgcggctgcagattccccctgctgctggccctgctgcagctggccctgggcatcgccgtgaccgtggtgggcttcctgatggccagcatcagcagcagcctgctggtgagagacacccccttctgggccggcatcatcgtgtgcctggtggcctacctgggcctgttcatgctgtgcgtgagctaccaggtggacgagagaacctgcatccagttcagcatgaagctgctgtacttcctgctgagcgccctgggcctgaccgtgtgcgtgctggccgtggccttcgccgcccaccactacagccagctgacccagttcacctgcgagaccaccctggacagctgccagtgcaagctgcccagcagcgagcccctgagcagaaccttcgtgtacagagacgtgaccgactgcaccagcgtgaccggcaccttcaagctgttcctgctgatccagatgatcctgaacctggtgtgcggcctggtgtgcctgctggcctgcttcgtgatgtggaagcacagataccaggtgttctacgtgggcgtgagaatctgcagcctgaccgccagcgagggcccccagcagaagatctag

SEQ ID NO: 152690 - DNA, 387 bp, Artificial Sequence
  derived and/or modified sequence
atgggcaagaacaagcagcccagaggccagcagagacagggcggcccccccgccgccgacgccgccggccccgacgacatggagcccaagaagggcaccggcgcccccaaggagtgcggcgaggaggagcccagaacctgctgcggctgcagattccccctgctgctggccctgctgcagctggccctgggcatcgccgtgaccgtggtgggcttcctgatggccagcatcagcagcagcctgctggtgagagacacccccttctgggccggcatcatcgtgtgcctggtggcctacctgggcctgttcatgctgtgcgtgagctaccaggtggacgagagaacctgcatccagttcagcatgaagatccactgccacgacttctag

SEQ ID NO: 152691 - protein, 621 aa, Artificial Sequence
  derived and/or modified sequence
MAELTVEVRGSNGAFYKGFIKDVHEDSLTVVFENNWQPERQVPFNEVRLPPPPDIKKEISEGDEVEVYSRANDQEPCGWWLAKVRMMKGEFYVIEYAACDATYNEIVTFERLRPVNQNKTVKKNTFFKCTVDVPEDLREACANENAHKDFKKAVGACRIFYHPETTQLMILSASEATVKRVNILSDMHLRSIRTKLMLMSRNEEATKHLECTKQLAAAFHEEFVVREDLMGLAIGTHGSNIQQARKVPGVTAIELDEDTGTFRIYGESADAVKKARGFLEFVEDFIQVPRNLVGKVIGKNGKVIQEIVDKSGVVRVRIEGDNENKLPREDGMVPFVFVGTKESIGNVQVLLEYHIAYLKEVEQLRMERLQIDEQLRQIGSRSYSGRGRGRRGPNYTSGYGTNSELSNPSETESERKDELSDWSLAGEDDRDSRHQRDSRRRPGGRGRSVSGGRGRGGPRGGKSSISSVLKDPDSNPYSLLDNTESDQTADTDASESHHSTNRRRRSRRRRTDEDAVLMDGMTESDTASVNENGLVTVADYISRAESQSRQRNLPRETLAKNKKEMAKDVIEEHGPSEKAINGPTSASGDDISKLQRTPGEEKINTLKEENTQEAAVLNGVS

SEQ ID NO: 152692 - protein, 608 aa, Artificial Sequence
  derived and/or modified sequence
MVTEGFIKDVHEDSLTVVFENNWQPERQVPFNEVRLPPPPDIKKEISEGDEVEVYSRANDQEPCGWWLAKVRMMKGEFYVIEYAACDATYNEIVTFERLRPVNQNKTVKKNTFFKCTVDVPEDLREACANENAHKDFKKAVGACRIFYHPETTQLMILSASEATVKRVNILSDMHLRSIRTKLMLMSRNEEATKHLECTKQLAAAFHEEFVVREDLMGLAIGTHGSNIQQARKVPGVTAIELDEDTGTFRIYGESADAVKKARGFLEFVEDFIQVPRNLVGKVIGKNGKVIQEIVDKSGVVRVRIEGDNENKLPREDGMVPFVFVGTKESIGNVQVLLEYHIAYLKEVEQLRMERLQIDEQLRQIGSRSYSGRGRGRRGPNYTSGYGTNSELSNPSETESERKDELSDWSLAGEDDRDSRHQRDSRRRPGGRGRSVSGGRGRGGPRGGKSSISSVLKDPDSNPYSLLDNTESDQTADTDASESHHSTNRRRRSRRRRTDEDAVLMDGMTESDTASVNENGLVTVADYISRAESQSRQRNLPRETLAKNKKEMAKDVIEEHGPSEKAINGPTSASGDDISKLQRTPGEEKINTLKEENTQEAAVLNGVS

SEQ ID NO: 152693 - DNA, 3277 bp, Artificial Sequence
  derived and/or modified sequence
aaagccggtgatgcagggtgcgcagggatcccacctggagagtcggggcggcacgttgagaccccaggggtgaagggcgggggatcccaatcccagccctgttttcccctcccctttccccgcctccttctcgcccctcccccctcctcccctctggttggaaagtttctagaatctcttcccagcggcctttgcggttccaacatggcggagctgacggtggaggttcgcggctctaacggggctttctacaagtcaattcacaatgaatcaaatgtccccattttggaactctgaagtatttataattgatctctatacatatctacaatctactgcttgtttctacttagactttgactccattactcattttgcctcacaaagtgagttggtactttgacaaaggttggaaaggacactagccacctgtgtgtgcactgaaatcatgtacgcttgaacatttggaattttatgtccagccataatccacttgcatatgcactttgtggaaactgtggtcttcagaactctggaagaatgagaatggcggagtggaaaagagtcctggatttgaagtaaacagatgagaattctagggatttatcaaagatgttcatgaagactcccttacagttgtttttgaaaataattggcaaccagaacgccaggttccatttaatgaagttagattaccaccaccacctgatataaaaaaagaaattagtgaaggagatgaagtagaggtatattcaagagcaaatgaccaagagccatgtgggtggtggttggctaaagttcggatgatgaaaggagaattttatgtcattgaatatgctgcttgtgacgctacttacaatgaaatagtcacatttgaacgacttcggcctgtcaatcaaaataaaactgtcaaaaaaaataccttctttaaatgcacagtggatgttcctgaggatttgagagaggcgtgtgctaatgaaaatgcacataaagattttaagaaagcagtaggagcatgcagaattttttaccatccagaaacaacacagctaatgatactgtctgccagtgaagcaactgtgaagagagtaaacatcttaagtgacatgcatttgcgaagtattcgtacgaagttgatgcttatgtccagaaatgaagaggccactaagcatttagaatgcacaaaacaacttgcagcagcttttcatgaggaatttgttgtgagagaagatttaatgggcctggcaataggaacacatggtagtaacatccagcaagctaggaaggttcctggagttaccgccattgagctagatgaagatactggaacattcagaatctacggagagagtgctgatgctgtaaaaaaggctagaggtttcttggaatttgtggaggattttattcaggttcctaggaatctcgttggaaaagtaattggaaaaaatggcaaagttattcaagaaatagtggacaaatctggtgtggttcgagtgagaattgaaggggacaatgaaaataaattacccagagaagacggtatggttccatttgtatttgttggcactaaagaaagcattggaaatgtgcaggttcttctagagtatcatattgcctatctaaaggaagtagaacagctaagaatggaacgcctacagattgatgaacagctgcgacagattggttctaggtcttatagcggaagaggcagaggtcgtcggggacctaattacacctccggttatggtacaaattctgagctgtctaacccctctgaaacggaatctgagcgtaaagacgagctgagtgattggtcattggcaggagaagatgatcgagacagccgacatcagcgtgacagcaggagacgcccaggaggaagaggcagaagtgtttcagggggtcgaggtcgtggtggaccacgtggtggcaaatcctccatcagttctgtgctcaaagatccagacagcaatccatacagcttacttgataatacagaatcagatcagactgcagacactgatgccagcgaatctcatcacagtactaaccgtcgtaggcggtctcgtagacgaaggactgatgaagatgctgttctgatggatggaatgactgaatctgatacagcttcagttaatgaaaatgggctagtcacagttgcagattatatttctagagctgagtctcagagcagacaaagaaacctcccaagggaaactttggctaaaaacaagaaagaaatggcaaaagatgtgattgaagagcatggtccttcagaaaaggcaataaacggcccaactagtgcttctggcgatgacatttctaagctacagcgtactccaggagaagaaaagattaataccttaaaagaagaaaacactcaagaagcagcagtcctgaatggtgtttcataaactgaagaagttcctagtttacagttcttttacattacatttacaatagtgcttgtacaagcttgccaaagatagaatatggatcgccagtctttacatcgcactttcagttcctccatttggaattcaaaaaggggagggatcctgaagaaatcatatgttaaacatactttgacacctactgtgttataaaatatatcatcagatgtgccttgagaatagtatatgtaacattaaaaaaaagttgctggctataggaaatgttattttgttttcaaaatatggcagagatggggggtggtgggtggggtgggatccctaacgtaatattctttatgaaagcattagctgcttttgttacatttttaatatgcaaccacttcttcacctgaggaaaactagaatgaaatgcagtctaaaatattttgcactgaattgtaatttcttcattagtttagtctggaaactggtctgttttaatgtgttttttaaatgctgtatgtagaggaaaatctgcagaccactggaatacatttgttaaactctcatctgcagggacactgggcgatacttggcagtgactgttctaccttgaggctttgtttggtttatttattaaagtgtacagtatttaaaaatcaaacatagctttagttaaaacactaagctgaattagtcatgtccattcagacataacctgaactactgaaaagatcaatttccagaaggtttattctgtataaactacatgttagtcttcagtagagtatcttttttttttccttttttttttttttatttcggttgtttgatgtgcaatatgtttttgtatgcaggtagtaaataaactttgatcttccatt

SEQ ID NO: 152694 - DNA, 3120 bp, Artificial Sequence
  derived and/or modified sequence
atgccgatgcgccgggcaggctgtgcctgggcagttcattctgtggcagctggaggcactactcggccgccgcggtgcgaactgcgggcactgtggggcggagacctaggggcgggtcaacaaaggtcgggcgattgtgtctggaggcaaatccgacgtagacggcggcaggcggagcccaaagccggtgatgcagggtgcgcagggatcccacctggagagtcggggcggcacgttgagaccccaggggtgaagggcgggggatcccaatcccagccctgttttcccctcccctttccccgcctccttctcgcccctcccccctcctcccctctggttggaaagtttctagaatctcttcccagcggcctttgcggttccaacatggcggagctgacggtggaggttcgcggctctaacggggctttctacaagggatttatcaaagatgttcatgaagactcccttacagttgtttttgaaaataattggcaaccagaacgccaggttccatttaatgaagttagattaccaccaccacctgatataaaaaaagaaattagtgaaggagatgaagtagaggtatattcaagagcaaatgaccaagagccatgtgggtggtggttggctaaagttcggatgatgaaaggagaattttatgtcattgaatatgctgcttgtgacgctacttacaatgaaatagtcacatttgaacgacttcggcctgtcaatcaaaataaaactgtcaaaaaaaataccttctttaaatgcacagtggatgttcctgaggatttgagagaggcgtgtgctaatgaaaatgcacataaagattttaagaaagcagtaggagcatgcagaattttttaccatccagaaacaacacagctaatgatactgtctgccagtgaagcaactgtgaagagagtaaacatcttaagtgacatgcatttgcgaagtattcgtacgaagttgatgcttatgtccagaaatgaagaggccactaagcatttagaatgcacaaaacaacttgcagcagcttttcatgaggaatttgttgtgagagaagatttaatgggcctggcaataggaacacatggtagtaacatccagcaagctaggaaggttcctggagttaccgccattgagctagatgaagatactggaacattcagaatctacggagagagtgctgatgctgtaaaaaaggctagaggtttcttggaatttgtggaggattttattcaggttcctaggaatctcgttggaaaagtaattggaaaaaatggcaaagttattcaagaaatagtggacaaatctggtgtggttcgagtgagaattgaaggggacaatgaaaataaattacccagagaagacggtatggttccatttgtatttgttggcactaaagaaagcattggaaatgtgcaggttcttctagagtatcatattgcctatctaaaggaagtagaacagctaagaatggaacgcctacagattgatgaacagctgcgacagattggttctaggtcttatagcggaagaggcagaggtcgtcggggacctaattacacctccggttatggtacaaattctgagctgtctaacccctctgaaacggaatctgagcgtaaagacgagctgagtgattggtcattggcaggagaagatgatcgagacagccgacatcagcgtgacagcaggagacgcccaggaggaagaggcagaagtgtttcagggggtcgaggtcgtggtggaccacgtggtggcaaatcctccatcagttctgtgctcaaagatccagacagcaatccatacagcttacttgataatacagaatcagatcagactgcagacactgatgccagcgaatctcatcacagtactaaccgtcgtaggcggtctcgtagacgaaggactgatgaagatgctgttctgatggatggaatgactgaatctgatacagcttcagttaatgaaaatgggctagtcacagttgcagattatatttctagagctgagtctcagagcagacaaagaaacctcccaagggaaactttggctaaaaacaagaaagaaatggcaaaagatgtgattgaagagcatggtccttcagaaaaggcaataaacggcccaactagtgcttctggcgatgacatttctaagctacagcgtactccaggagaagaaaagattaataccttaaaagaagaaaacactcaagaagcagcagtcctgaatggtgtttcataaactgaagaagttcctagtttacagttcttttacattacatttacaatagtgcttgtacaagcttgccaaagatagaatatggatcgccagtctttacatcgcactttcagttcctccatttggaattcaaaaaggggagggatcctgaagaaatcatatgttaaacatactttgacacctactgtgttataaaatatatcatcagatgtgccttgagaatagtatatgtaacattaaaaaaaagttgctggctataggaaatgttattttgttttcaaaatatggcagagatggggggtggtgggtggggtgggatccctaacgtaatattctttatgaaagcattagctgcttttgttacatttttaatatgcaaccacttcttcacctgaggaaaactagaatgaaatgcagtctaaaatattttgcactgaattgtaatttcttcattagtttagtctggaaactggtctgttttaatgtgttttttaaatgctgtatgtagaggaaaatctgcagaccactggaatacatttgttaaactctcatctgcagggacactgggcgatacttggcagtgactgttctaccttgaggctttgtttggtttatttattaaagtgtacagtatttaaaaatcaaacatagctttagttaaaacactaagctgaattagtcatgtccattcagacataacctgaactactgaaaagatcaatttccagaaggtttattctgtataaactacatgttagtcttcagtagagtatcttttttttttccttttttttttttttatttcggttgtttgatgtgcaatatgtttttgtatgcaggtagtaaataaactttgatcttccatttgctgaa

SEQ ID NO: 152695 - DNA, 1996 bp, Artificial Sequence
  derived and/or modified sequence
gtgtagtgttttgagtccggcttccatttagcgtagaagcaatttaattttaattagtttttttccaatttagaagataatacatggtcactgagggatttatcaaagatgttcatgaagactcccttacagttgtttttgaaaataattggcaaccagaacgccaggttccatttaatgaagttagattaccaccaccacctgatataaaaaaagaaattagtgaaggagatgaagtagaggtatattcaagagcaaatgaccaagagccatgtgggtggtggttggctaaagttcggatgatgaaaggagaattttatgtcattgaatatgctgcttgtgacgctacttacaatgaaatagtcacatttgaacgacttcggcctgtcaatcaaaataaaactgtcaaaaaaaataccttctttaaatgcacagtggatgttcctgaggatttgagagaggcgtgtgctaatgaaaatgcacataaagattttaagaaagcagtaggagcatgcagaattttttaccatccagaaacaacacagctaatgatactgtctgccagtgaagcaactgtgaagagagtaaacatcttaagtgacatgcatttgcgaagtattcgtacgaagttgatgcttatgtccagaaatgaagaggccactaagcatttagaatgcacaaaacaacttgcagcagcttttcatgaggaatttgttgtgagagaagatttaatgggcctggcaataggaacacatggtagtaacatccagcaagctaggaaggttcctggagttaccgccattgagctagatgaagatactggaacattcagaatctacggagagagtgctgatgctgtaaaaaaggctagaggtttcttggaatttgtggaggattttattcaggttcctaggaatctcgttggaaaagtaattggaaaaaatggcaaagttattcaagaaatagtggacaaatctggtgtggttcgagtgagaattgaaggggacaatgaaaataaattacccagagaagacggtatggttccatttgtatttgttggcactaaagaaagcattggaaatgtgcaggttcttctagagtatcatattgcctatctaaaggaagtagaacagctaagaatggaacgcctacagattgatgaacagctgcgacagattggttctaggtcttatagcggaagaggcagaggtcgtcggggacctaattacacctccggttatggtacaaattctgagctgtctaacccctctgaaacggaatctgagcgtaaagacgagctgagtgattggtcattggcaggagaagatgatcgagacagccgacatcagcgtgacagcaggagacgcccaggaggaagaggcagaagtgtttcagggggtcgaggtcgtggtggaccacgtggtggcaaatcctccatcagttctgtgctcaaagatccagacagcaatccatacagcttacttgataatacagaatcagatcagactgcagacactgatgccagcgaatctcatcacagtactaaccgtcgtaggcggtctcgtagacgaaggactgatgaagatgctgttctgatggatggaatgactgaatctgatacagcttcagttaatgaaaatgggctagtcacagttgcagattatatttctagagctgagtctcagagcagacaaagaaacctcccaagggaaactttggctaaaaacaagaaagaaatggcaaaagatgtgattgaagagcatggtccttcagaaaaggcaataaacggcccaactagtgcttctggcgatgacatttctaagctacagcgtactccaggagaagaaaagattaataccttaaaagaagaaaacactcaagaagcagcagtcctgaatggtgtttcataaactgaagaagttcctagtttacagttcttttacattacatttacaatagtgcttgtacaagcttgccaaagatagaatatggatcg

SEQ ID NO: 152696 - DNA, 1866 bp, Artificial Sequence
  derived and/or modified sequence
atggcagaattgactgtggaagttcgggggtctaatggcgctttttataagggattcatcaaggacgtgcacgaggactccctcaccgtcgtgtttgagaataattggcagcccgagcgccaagtcccctttaacgaggtgcgcttgcccccaccccccgacattaagaaggagatatctgagggcgacgaagtggaagtctatagtcgggctaacgaccaggagccatgcggctggtggctggcaaaagtgcggatgatgaagggtgagttttatgtaatcgaatacgcagcctgtgatgctacgtataatgaaattgtgacattcgagaggctgaggcctgttaaccaaaataaaacagtcaagaagaacaccttcttcaaatgtaccgtggatgtgcctgaagaccttagggaggcatgcgcaaacgaaaacgcccataaagattttaaaaaagcagtaggagcgtgccgcattttctaccatcccgagaccacgcaactcatgattttgtccgctagcgaggctacagtcaagagggtgaacatcctcagcgacatgcacctcagaagtattaggacaaagctaatgttaatgtcccgcaatgaagaagccacgaaacatctcgaatgcaccaagcagcttgctgcggctttccatgaggaatttgtagtacgggaagacctgatgggtctggcaattggtacccacggatccaatatacagcaagcccgcaaagtgcccggggtaacagcaatagagctggatgaagacaccgggactttccgaatctacggtgaatctgcagacgccgttaagaaagccaggggttttctggagttcgtcgaggactttatacaggtacctcggaatctggtggggaaggtgattggaaagaatgggaaagtgatccaggagatcgtcgataagagtggtgttgtgagggtacgcatcgaaggggacaatgaaaataagctccccagggaggacggcatggtacctttcgtgtttgtaggaactaaggagagtattggcaatgtccaggtgctgctcgagtatcatatcgcttacctgaaggaagttgaacaactcaggatggagaggctccagatcgacgaacaattaaggcaaataggatcccgtagttacagcggcagaggccgcgggcgacgaggacccaattacacctcaggatatggaactaactctgaattatcaaacccatccgagacagagagcgagcggaaagatgaactgagtgattggagtttggccggcgaggacgatcgtgatagcaggcaccaaagagatagcagacgaaggcctggagggcgaggcagaagcgttagcgggggtcgtggacggggaggaccgaggggcggcaaatcctccattagctccgttctcaaggatcccgacagtaatccatactcgctgctcgacaacaccgaatcagatcagacagctgacaccgatgcttctgaatctcaccatagcaccaatcgaagacgcagaagccggagacgcagaacagacgaggatgccgtgctcatggatggcatgacagagagcgacaccgccagcgttaatgagaacgggctcgttaccgtggccgactatatttctcgggccgaaagccagtcccggcagcggaatctgccccgagagaccctagcaaagaacaagaaggaaatggcaaaggatgtgattgaggaacacggaccttccgagaaagcgatcaatggccctacatctgcctctggcgatgacatttcgaagcttcagagaacacctggtgaagagaaaattaacaccttaaaggaagagaacacacaggaggcagcagtacttaatggagtcagctag

SEQ ID NO: 152697 - DNA, 1827 bp, Artificial Sequence
  derived and/or modified sequence
atggttaccgagggattcattaaagatgtccacgaggattcattaacggtagtgtttgaaaacaattggcaacccgaaaggcaggtgccatttaacgaagtacgcctgccaccacccccagacatcaaaaaggagattagtgagggcgacgaggttgaggtgtacagtcgagcgaatgatcaggagccttgtggctggtggctggctaaggtgagaatgatgaaaggcgagttttatgtgatcgaatatgctgcgtgcgatgccacttacaacgaaatcgtcacattcgaaaggttaaggccagttaaccaaaacaaaacagttaaaaagaatacatttttcaagtgcacagtggacgtccctgaagatctacgggaagcttgtgctaacgaaaacgcgcataaagacttcaagaaggccgtgggcgcttgccgcattttttaccaccctgaaacgacacaacttatgatcctgtctgctagtgaagcaaccgtgaagagggtgaacatcctatcagacatgcacctgcgctcaatccggactaagctgatgcttatgtctcgcaacgaggaagcaaccaaacatctcgagtgcaccaaacagctggccgctgcgttccacgaggaattcgtggtgagggaagatcttatgggactcgctattggtacccacggatccaacatccagcaggcacgaaaagttcctggggtcacggctatcgagctggatgaggatacaggcacgtttcggatttatggcgagagcgctgacgcggtcaagaaggcccgtggcttcttggagtttgtcgaggattttattcaggtcccacgcaatctggtcggtaaggtgattggtaaaaatgggaaggtgatccaggaaatcgtcgataaatctggtgtggttcgcgtgaggatcgagggagacaatgagaacaaactgcctagggaagatgggatggtacccttcgtattcgtagggactaaggagtctattggcaacgttcaggtgctcttggaataccacatcgcctaccttaaggaggtcgaacaactgcgtatggagcgcctgcagattgatgaacaactacgtcagatcggatctaggagctactccggacggggaaggggcagaagaggccccaattatacttcgggctacggtactaactctgagctcagtaacccctccgaaactgaaagtgaacgtaaggatgagctgagcgactggagtttggctggcgaggatgatagggattcgagacatcaacgagactcgcgtagacggcccgggggccggggccggtccgtttccggagggagggggcggggaggcccacggggaggcaaatcgtcgatctcatctgtgctgaaagaccccgactctaacccatactccttgctcgacaacaccgagtctgatcagaccgcggacactgatgccagcgaaagtcatcactctacgaatcgccgtaggaggagcagaagaagaaggacagatgaagacgcagtcctaatggatggcatgaccgagagtgatactgctagcgtaaacgagaacgggctagtgactgtggctgactatatatcaagagccgagagccagagtagacagaggaacctccctcgcgaaacgctcgccaaaaacaagaaggagatggctaaagatgtgattgaagaacacggacctagcgagaaggctatcaatgggccaacctccgcctcgggtgatgacataagcaaacttcagcgtacccccggggaggaaaaaataaacactttaaaagaagaaaatacacaggaggccgcagttcttaatggggtgtcctag

SEQ ID NO: 152698 - DNA, 1866 bp, Artificial Sequence
  derived and/or modified sequence
atggccgagctgactgtggaggtgcggggcagcaatggagccttctacaagggcttcatcaaggatgtgcatgaggacagcctgactgtggtgtttgagaacaactggcagcctgagcggcaggtgcccttcaatgaggtgcggctgcccccacctccagacatcaagaaggagatcagtgaaggagatgaggtggaggtgtacagccgggccaatgaccaggagccctgtggctggtggctggccaaggtgaggatgatgaagggggagttctacgtgattgaatatgctgcctgtgatgccacctacaatgagatcgtgacctttgagcggctgcggcctgtgaaccagaacaagacagtgaagaagaacaccttcttcaagtgcaccgtggatgtgcctgaggacctgcgggaggcctgtgccaatgaaaatgcccacaaggacttcaagaaggctgtgggcgcctgccgcatcttctaccaccctgagaccacccagctgatgatcctgagcgccagcgaggccaccgtgaagagggtgaacatcctgagtgacatgcacctgcggagcatccgcaccaagctgatgctgatgagcagaaatgaggaggccaccaagcacctggagtgcaccaagcagctggccgccgccttccacgaggagtttgtggtgcgggaggacctgatgggcctggccatcggcacccacggcagcaacatccagcaggccaggaaggtgcctggggtgacagccatcgagctggatgaggacaccggcaccttccgcatctatggagagagcgcagatgctgtgaagaaggcccggggcttcctggagtttgtggaggacttcatccaggtgcccaggaacctggtgggcaaggtgattggcaagaatggcaaggtgatccaggagatcgtggacaagtctggagtggtgcgggtgcgcatcgagggggacaatgaaaacaagctgcccagagaagatggcatggtgccctttgtgtttgtgggcaccaaggagagcattggaaatgtgcaggtgctgctggagtaccacatcgcctacctgaaggaggtggagcagctgaggatggagcggctgcagattgatgagcagctgcggcagatcggcagccgcagctacagcggccggggccggggccggcggggccccaactacaccagcggctacggcaccaacagcgagctgagcaaccccagcgagacagaaagtgagaggaaggatgagctgagtgactggagcctggccggagaagatgaccgggacagccgccaccagagggacagcagaagaagacctgggggccggggccgctctgtgtctgggggccggggccggggcggcccccggggcggcaagagcagcatcagctctgtgctgaaggaccctgacagcaacccctacagcctgctggacaacacagaaagtgaccagacagctgacacagatgccagcgagagccaccacagcaccaacagaagaagaagaagcagaagaagaagaacagatgaagatgctgtgctgatggatggcatgacagaaagtgacacagcctctgtgaatgaaaatggcctggtgacagtggccgactacatcagcagagctgagagccagagccggcagaggaacctgccccgggagaccctggccaagaacaagaaggagatggccaaggatgtgattgaggagcacggccccagcgagaaggccatcaatggccccaccagcgccagcggagatgacatcagcaagctgcagaggaccccaggagaggagaagatcaacaccctgaaggaggagaacacccaggaggccgctgtgctgaatggagtgtcctag

SEQ ID NO: 152699 - DNA, 1827 bp, Artificial Sequence
  derived and/or modified sequence
atggtgacagagggcttcatcaaggatgtgcatgaggacagcctgactgtggtgtttgagaacaactggcagcctgagcggcaggtgcccttcaatgaggtgcggctgcccccacctccagacatcaagaaggagatcagtgaaggagatgaggtggaggtgtacagccgggccaatgaccaggagccctgtggctggtggctggccaaggtgaggatgatgaagggggagttctacgtgattgaatatgctgcctgtgatgccacctacaatgaaattgtgacctttgagcggctgcggcctgtgaaccagaacaagacagtgaagaagaacaccttcttcaagtgcaccgtggatgtgcctgaggacctgcgggaggcctgtgccaatgaaaatgcccacaaggacttcaagaaggctgtgggcgcctgccgcatcttctaccaccctgagaccacccagctgatgatcctgagcgccagcgaggccaccgtgaagagggtgaacatcctgagtgacatgcacctgcggagcatccgcaccaagctgatgctgatgagcagaaatgaggaggccaccaagcacctggagtgcaccaagcagctggccgccgccttccacgaggagtttgtggtgcgggaggacctgatgggcctggccatcggcacccacggcagcaacatccagcaggccaggaaggtgcctggggtgacagccatcgagctggatgaggacaccggcaccttccgcatctacggggagagcgcagatgctgtgaagaaggcccggggcttcctggagtttgtggaggacttcatccaggtgcccaggaacctggtgggcaaggtgattggcaagaatggcaaggtgatccaggagatcgtggacaagagcggcgtggtgcgggtgagaattgaaggagacaatgaaaacaagctgccccgggaggatggcatggtgccctttgtgtttgtgggcaccaaggagagcattggaaatgtgcaggtgctgctggagtaccacatcgcctacctgaaggaggtggagcagctgaggatggagcggctgcagattgatgagcagctgcggcagatcggcagccgcagctacagcggccggggccggggcagaagaggccccaactacaccagcggctacggcaccaacagcgagctgagcaaccccagcgagacagagagcgagaggaaggatgagctgagtgactggagcctggccggggaggatgaccgggacagccgccaccagagggacagcagaagaagacctgggggccggggccgctctgtgtctgggggccggggccggggcggcccccggggcggcaagagcagcatcagctctgtgctgaaggaccctgacagcaacccctacagcctgctggacaacacagaaagtgaccagacagctgacacagatgccagcgagagccaccacagcaccaacagaagaagaagaagcagaagaagaagaacagatgaagatgctgtgctgatggatggcatgacagaaagtgacacagcctctgtgaatgaaaatggcctggtgacagtggccgactacatcagcagagctgagagccagagccggcagaggaacctgccccgggagaccctggccaagaacaagaaggagatggccaaggatgtgattgaggagcacggccccagcgagaaggccatcaatggccccaccagcgccagcggagatgacatcagcaagctgcagaggaccccaggagaggagaagatcaacaccctgaaggaggagaacacccaggaggccgctgtgctgaatggagtgtcctag

SEQ ID NO: 152700 - DNA, 1866 bp, Artificial Sequence
  derived and/or modified sequence
atggccgagctgaccgtggaggtgcggggcagcaacggcgccttctataaaggatttatcaaggacgtccatgaggactccctaaccgttgtgttcgagaataattggcaacctgagcgacaggtgccttttaatgaggtcaggcttcctcctcctcctgacattaagaaggagatttctgagggcgacgaagtagaagtgtattctagagcgaacgaccaggagccatgtggttggtggttggcaaaggtgcggatgatgaagggtgaattctacgtcatagagtatgcggcctgtgatgcgacctacaacgagattgtcacatttgagcgactacgtcccgtcaatcagaataagacagtgaagaagaatacttttttcaagtgtactgttgatgtccccgaggacctgcgcgaggcctgcgccaacgaaaatgcccataaggactttaaaaaggccgtaggagcctgcaggatcttctatcaccccgagactacccagctgatgatactgtctgcctcagaagctactgtgaagagagtcaacatattatccgatatgcacctgagatccatccggaccaaactgatgctgatgtcccgaaacgaagaagcaacaaaacacctagagtgcactaaacaactcgctgccgcattccacgaggaatttgtggtcagagaagatctgatggggctggcaatcgggacccacggttctaatatccagcaggctcgaaaggtcccaggcgtgacggcaatcgaactggatgaagataccggtacctttagaatttatggcgagagtgctgatgcagtgaaaaaggcccgaggattccttgagttcgtggaggacttcatccaggtgccacgtaacctggtaggcaaggttatcgggaaaaacggcaaggtcatccaggaaattgttgataaatctggcgtcgtgcgggtgcggattgagggcgataacgagaacaaactcccacgggaggatggaatggtgccctttgtgtttgtggggactaaggagtctattgggaatgtacaggtcctactggaataccacatcgcgtacttaaaggaggtcgagcagcttagaatggagcggctgcagattgatgagcagttaaggcagatcggctcccggtcttattccgggcgtggcagaggaaggcgcggcccgaattacaccagcgggtatggcactaactccgagctgtctaacccttcagaaacagagagtgagaggaaagatgaactgagcgattggtcactcgcgggggaagatgatagagacagcagacaccaacgagacagtaggcgccggccaggcggacgcgggaggtcagtatccggaggacgtggacggggcggaccccgaggcggcaagtcaagcatatcctcagtgcttaaagaccccgattcgaatccctactctttactcgacaacacagagagcgatcagaccgctgacacagatgcatctgagagccaccactcgactaacagaaggcggcggtcgcgccgtcgaagaacagacgaagatgccgtgctgatggacggaatgacggagtccgacactgcttccgtgaacgagaatggtctagtgaccgttgccgactatatcagccgagcagagtcccagagcaggcagcgaaacctgccacgcgagactttggcgaaaaataagaaagaaatggctaaggacgtgattgaggagcatggtccgagtgaaaaggcgattaacggtccaacctcagcttcaggcgatgacatatccaaacttcaaagaaccccgggcgaagagaagattaacaccctcaaagaggagaacacacaggaggcggcagtgcttaacggagtgagctag

SEQ ID NO: 152701 - DNA, 1827 bp, Artificial Sequence
  derived and/or modified sequence
atggtgaccgagggcttcatcaaggacgtgcacgaggacagcctgaccgtggtgtttgagaacaattggcagcccgagcgccaggttcctttcaatgaggtcagactcccccctccacccgatataaaaaaggagatctctgaaggcgacgaagtggaggtatattctcgggccaacgaccaggagccctgtggatggtggctggccaaggtacgcatgatgaaaggcgagttctatgttatcgaatacgcagcctgcgatgctacctacaacgaaatcgtgaccttcgaaagactcaggccggtgaaccagaacaaaaccgttaaaaagaatacattcttcaagtgcacggtggacgtccccgaggatctcagagaggcctgtgctaatgaaaacgcccacaaggatttcaagaaagctgtcggcgcttgccgaatcttctatcaccctgagactacacagttgatgatcttgtcagcttccgaggccaccgtgaagcgcgtgaatatcttatccgacatgcatctgcggagtatccggactaaactgatgctaatgtcacgaaatgaagaagcaactaagcacctagaatgtacaaagcaactggctgccgccttccacgaggagtttgtggttcgggaagatctcatgggtcttgcgataggaacccacgggagcaacatacagcaagcccggaaagtgccgggggtgacggccatcgagctggacgaggacactgggactttcaggatctatggggagtccgctgacgcggtgaagaaggctcgcggcttcctggaattcgtggaggattttatccaggtgccccgtaatctggtgggcaaggtaatcggaaagaatggaaaggttatccaagagatcgtggataaatccggagttgtgagggtgagaatcgaaggcgataacgagaacaagctgccacgggaagacgggatggtgccattcgtctttgtggggaccaaggaatccatcggtaatgtgcaggtactgctcgagtaccatattgcatacctgaaagaggttgagcaattacgcatggaaagattacagattgatgagcagttacgacagattggcagtcgtagttattccgggcgcggacgggggcggcgcgggcctaactacacgtccggctatggaacaaacagcgaactgtctaatcctagcgagaccgagagcgagagaaaagatgaattatccgactggagtttggctggggaggatgatcgggactctcggcaccaacgtgactccaggcggcgccctgggggtcggggccggagtgtgtcaggtggcaggggtagaggcggcccccgtggggggaagagttcaatctcgagtgtcttaaaggatccggatagcaatccttactccttgcttgataataccgaaagcgaccaaacagccgatacagacgcttcagagtctcatcactcaaccaatagaaggagacgctccaggaggaggcgcaccgacgaagacgcagtgttaatggatggtatgaccgagtctgacacagcgagcgtgaacgagaacggtctggtgacagtggctgattacatctccagagcagagagccagtcaagacaaagaaatctcccacgcgagacactagccaagaacaagaaagaaatggcaaaagacgtgatcgaagaacatggcccatccgagaaggccatcaacggcccaactagcgcttccggggacgatattagcaagctgcagaggacaccaggcgaagagaagatcaacacactgaaagaagagaacacccaggaggcagccgtcctgaacggggttagctag

SEQ ID NO: 152702 - DNA, 1866 bp, Artificial Sequence
  derived and/or modified sequence
atggccgaacttacagtcgaggtacggggtagtaatggcgcattttacaagggctttatcaaggacgtgcacgaggatagccttactgtggtcttcgaaaataactggcaacccgagaggcaagtgcctttcaacgaggtgcgccttccaccaccgccagatataaaaaaagaaatctctgaaggcgatgaggttgaggtgtactcacgggcaaatgatcaggaaccatgcggatggtggctcgctaaggtccggatgatgaagggagagttttatgtgattgagtacgctgcgtgcgatgcaacctacaacgagattgttacctttgagagactccggccagtgaaccagaacaaaacagttaaaaagaacacctttttcaagtgtactgtggatgtccctgaggacctccgcgaggcctgcgctaatgaaaacgcacacaaggacttcaagaaagctgtgggtgcatgccgcatcttctatcacccggagactacacagttgatgatacttagcgcatctgaagctaccgtgaagagggtaaacatcctctccgacatgcatcttaggagcataagaactaaactcatgcttatgagccgtaatgaggaagcaaccaagcacctcgagtgtacaaagcaactggctgcagccttccatgaggaattcgtggtgagggaggacctaatggggctggctataggaacacacggatctaatatccagcaggctcgcaaggtccctggcgtaaccgccattgaattggatgaggatacaggcactttcagaatctatggcgaatccgccgatgccgtgaagaaagcacgcggattcctggaattcgtcgaggactttatccaagtaccacggaatctggtagggaaagttatcggaaaaaatggcaaggtaatccaggagattgttgataaatctggcgttgttcgggtgaggattgaaggagacaacgaaaataagctccctagagaagatggtatggtccctttcgtattcgttggaaccaaggagtcaattggaaacgtgcaggtgctgctggagtatcacatagcctacctgaaagaggtggaacagctgcgcatggagaggctccagattgacgaacaactgcgtcagatcggcagtaggtcttactcaggcaggggacgaggacggagggggcctaactatacctctggctatggaacaaactccgaactgagcaatcccagcgaaacagaaagcgaaagaaaggacgaactatccgattggagcttagccggagaggatgatagggactcccgtcaccaaagggacagtcgccgacggcctggagggcgaggcaggtctgtgagcggcggaaggggacgtggcggtccaagaggcggtaagtcgtctatatccagcgtcctcaaggaccccgacagcaatccctattctctgcttgataacacagaatctgaccaaaccgctgacacagacgctagcgaatcacatcattccacaaacagaagacggcgaagccgaagaagaaggaccgatgaagatgccgtcctgatggatggaatgaccgagagcgatactgctagcgtgaatgagaatggtctcgtgactgtggctgactacatctctagagcggaatcgcaatctcgacaaaggaacctcccccgagaaaccttggctaaaaacaagaaagagatggccaaggacgtgattgaggaacacgggccaagcgagaaggccatcaatggccctacaagcgcctccggtgacgatatcagcaagctgcagaggactcccggtgaagagaagatcaatactttaaaggaggaaaatacccaagaggcagcagtcctcaatggtgtgagctag

SEQ ID NO: 152703 - DNA, 1827 bp, Artificial Sequence
  derived and/or modified sequence
atggtcaccgaggggttcattaaggacgttcatgaagactccctcacggtcgtgttcgaaaacaattggcagcctgaacgtcaagtgccgtttaatgaggttaggctgccccctcctccagatattaagaaagagattagcgaaggcgacgaagtggaggtgtactcccgcgcaaatgaccaggagccatgtgggtggtggctagctaaagtacggatgatgaagggagagttttacgtgatcgaatatgctgcctgcgacgctacgtacaacgaaattgttacatttgaaaggctccgcccagtgaatcaaaataaaactgttaagaaaaatacattctttaaatgcacagtagatgttcctgaagacctgagagaggcctgtgccaatgaaaacgcccacaaggattttaagaaagccgtgggcgcttgtcggattttttaccaccccgaaaccacccagcttatgattctctctgctagcgaagcaacagtcaaaagagtgaacatactcagcgacatgcacctcaggtccattcgaactaagttgatgctcatgagtagaaatgaagaagctaccaaacatctagaatgcacaaaacaactggcagccgcatttcacgaagaatttgtggttagagaggacctgatggggctggccatagggactcacggatccaacattcagcaggccagaaaagtgcccggtgtgaccgctatcgagttagacgaggatacagggacgttccgcatttacggggaaagtgctgatgccgtcaagaaggctcgtgggtttctggaatttgtagaggattttatacaagtccccagaaaccttgttggtaaagttatcggaaaaaatggtaaagtgattcaggagatcgttgacaagagcggggtggtgagggtgcgcattgagggcgataacgagaacaagttaccccgtgaggacggtatggtgccgttcgtgtttgttgggaccaaagagtccatcgggaacgtgcaggtcttactcgagtatcatatcgcctatctgaaggaggtggagcaactgagaatggagagactgcagatcgacgagcagttgcggcagataggctcccggtcctactctgggaggggacgtggacggcgtgggccaaattacacgtctggctatggtacaaatagcgagctctccaacccatctgaaacagagtctgagcggaaagatgagctgagtgattggtccctcgccggagaagacgatagagatagtaggcatcagagggactctaggcgccgaccaggcggacgcggtaggagcgtaagtggtgggagaggcaggggtggacctagggggggaaagtcatcaatcagctctgtcctgaaggacccagattcaaacccgtactcccttctcgataatactgaatccgaccagaccgccgacaccgatgcttccgagagccaccactcaacaaacaggcgtcgacggtccagacgcagacgcaccgatgaagatgcagtgctgatggacggaatgactgaaagcgacaccgccagcgtgaacgaaaacggcctcgtcactgtggcagattacatcagccgcgcagaaagtcagagcaggcaacgtaacctccctagagagacccttgctaagaataagaaggaaatggcaaaggacgtcatagaggagcacggtccttccgagaaagcaattaacggcccaactagcgcgtccggcgacgatatttcaaaacttcagcggacacctggggaggagaagatcaataccctgaaggaggagaacacacaggaagccgctgtactaaatggcgtcagctag

SEQ ID NO: 152704 - DNA, 1866 bp, Artificial Sequence
  derived and/or modified sequence
atggccgagctgaccgtggaggtgagaggcagcaacggcgccttctacaagggcttcatcaaggacgtgcacgaggacagcctgaccgtggtgttcgagaacaactggcagcccgagagacaggtgcccttcaacgaggtgagactgccccccccccccgacatcaagaaggagatcagcgagggcgacgaggtggaggtgtacagcagagccaacgaccaggagccctgcggctggtggctggccaaggtgagaatgatgaagggcgagttctacgtgatcgagtacgccgcctgcgacgccacctacaacgagatcgtgaccttcgagagactgagacccgtgaaccagaacaagaccgtgaagaagaacaccttcttcaagtgcaccgtggacgtgcccgaggacctgagagaggcctgcgccaacgagaacgcccacaaggacttcaagaaggccgtgggcgcctgcagaatcttctaccaccccgagaccacccagctgatgatcctgagcgccagcgaggccaccgtgaagagagtgaacatcctgagcgacatgcacctgagaagcatcagaaccaagctgatgctgatgagcagaaacgaggaggccaccaagcacctggagtgcaccaagcagctggccgccgccttccacgaggagttcgtggtgagagaggacctgatgggcctggccatcggcacccacggcagcaacatccagcaggccagaaaggtgcccggcgtgaccgccatcgagctggacgaggacaccggcaccttcagaatctacggcgagagcgccgacgccgtgaagaaggccagaggcttcctggagttcgtggaggacttcatccaggtgcccagaaacctggtgggcaaggtgatcggcaagaacggcaaggtgatccaggagatcgtggacaagagcggcgtggtgagagtgagaatcgagggcgacaacgagaacaagctgcccagagaggacggcatggtgcccttcgtgttcgtgggcaccaaggagagcatcggcaacgtgcaggtgctgctggagtaccacatcgcctacctgaaggaggtggagcagctgagaatggagagactgcagatcgacgagcagctgagacagatcggcagcagaagctacagcggcagaggcagaggcagaagaggccccaactacaccagcggctacggcaccaacagcgagctgagcaaccccagcgagaccgagagcgagagaaaggacgagctgagcgactggagcctggccggcgaggacgacagagacagcagacaccagagagacagcagaagaagacccggcggcagaggcagaagcgtgagcggcggcagaggcagaggcggccccagaggcggcaagagcagcatcagcagcgtgctgaaggaccccgacagcaacccctacagcctgctggacaacaccgagagcgaccagaccgccgacaccgacgccagcgagagccaccacagcaccaacagaagaagaagaagcagaagaagaagaaccgacgaggacgccgtgctgatggacggcatgaccgagagcgacaccgccagcgtgaacgagaacggcctggtgaccgtggccgactacatcagcagagccgagagccagagcagacagagaaacctgcccagagagaccctggccaagaacaagaaggagatggccaaggacgtgatcgaggagcacggccccagcgagaaggccatcaacggccccaccagcgccagcggcgacgacatcagcaagctgcagagaacccccggcgaggagaagatcaacaccctgaaggaggagaacacccaggaggccgccgtgctgaacggcgtgagctag

SEQ ID NO: 152705 - DNA, 1827 bp, Artificial Sequence
  derived and/or modified sequence
atggtgaccgagggcttcatcaaggacgtgcacgaggacagcctgaccgtggtgttcgagaacaactggcagcccgagagacaggtgcccttcaacgaggtgagactgccccccccccccgacatcaagaaggagatcagcgagggcgacgaggtggaggtgtacagcagagccaacgaccaggagccctgcggctggtggctggccaaggtgagaatgatgaagggcgagttctacgtgatcgagtacgccgcctgcgacgccacctacaacgagatcgtgaccttcgagagactgagacccgtgaaccagaacaagaccgtgaagaagaacaccttcttcaagtgcaccgtggacgtgcccgaggacctgagagaggcctgcgccaacgagaacgcccacaaggacttcaagaaggccgtgggcgcctgcagaatcttctaccaccccgagaccacccagctgatgatcctgagcgccagcgaggccaccgtgaagagagtgaacatcctgagcgacatgcacctgagaagcatcagaaccaagctgatgctgatgagcagaaacgaggaggccaccaagcacctggagtgcaccaagcagctggccgccgccttccacgaggagttcgtggtgagagaggacctgatgggcctggccatcggcacccacggcagcaacatccagcaggccagaaaggtgcccggcgtgaccgccatcgagctggacgaggacaccggcaccttcagaatctacggcgagagcgccgacgccgtgaagaaggccagaggcttcctggagttcgtggaggacttcatccaggtgcccagaaacctggtgggcaaggtgatcggcaagaacggcaaggtgatccaggagatcgtggacaagagcggcgtggtgagagtgagaatcgagggcgacaacgagaacaagctgcccagagaggacggcatggtgcccttcgtgttcgtgggcaccaaggagagcatcggcaacgtgcaggtgctgctggagtaccacatcgcctacctgaaggaggtggagcagctgagaatggagagactgcagatcgacgagcagctgagacagatcggcagcagaagctacagcggcagaggcagaggcagaagaggccccaactacaccagcggctacggcaccaacagcgagctgagcaaccccagcgagaccgagagcgagagaaaggacgagctgagcgactggagcctggccggcgaggacgacagagacagcagacaccagagagacagcagaagaagacccggcggcagaggcagaagcgtgagcggcggcagaggcagaggcggccccagaggcggcaagagcagcatcagcagcgtgctgaaggaccccgacagcaacccctacagcctgctggacaacaccgagagcgaccagaccgccgacaccgacgccagcgagagccaccacagcaccaacagaagaagaagaagcagaagaagaagaaccgacgaggacgccgtgctgatggacggcatgaccgagagcgacaccgccagcgtgaacgagaacggcctggtgaccgtggccgactacatcagcagagccgagagccagagcagacagagaaacctgcccagagagaccctggccaagaacaagaaggagatggccaaggacgtgatcgaggagcacggccccagcgagaaggccatcaacggccccaccagcgccagcggcgacgacatcagcaagctgcagagaacccccggcgaggagaagatcaacaccctgaaggaggagaacacccaggaggccgccgtgctgaacggcgtgagctag

SEQ ID NO: 152706 - protein, 695 aa, Artificial Sequence
  derived and/or modified sequence
MAAATIVHDTSEAVELCPAYGLYLKPITKMTISVALPQLKQPGKSISNWEVMERLKGMVQNHQFSTLRISKSTMDFIRFEGEVENKSLVKSFLACLDGKTIKLSGFSDILKVRAAEFKIDFPTRHDWDSFFRDAKDMNETLPGERPDTIHLEGLPCKWFALKESGSEKPSEDVLVKVFEKFGEIRNVDIPMLDPYREEMTGRNFHTFSFGGHLNFEAYVQYREYMGFIQAMSALRGMKLMYKGEDGKAVACNIKVSFDSTKHLSDASIKKRQLERQKLQELEQQREEQKRREKEAEERQRAEERKQKELEELERERKREEKLRKREQKQRDRELRRNQKKLEKLQAEEQKQLQEKIKLEERKLLLAQRNLQSIRLIAELLSRAKAVKLREQEQKEEKLRLQQQEERRRLQEAELRRVEEEKERALGLQRKERELRERLLSILLSKKPDDSHTHDELGVAHADLLQPVLDILQTVSSGCVSATTLHPLGGQPPAGAPKESPAHPEADGAPKSVNGSVAEEAPCKEVQSSCRVVPEDGSPEKRCPGGVLSCIPDNNQQPKGIPACEQNVSRKDTRSEQDKCNREPSKGRGRATGDGLADRHKRERSRARRASSREDGRPRKERRPHKKHAYKDDSPRRRSTSPDHTRSRRSHSKDRHRRERSRERRGSASRKHSRHRRRSERSRSRSPSRHRSTWNR

SEQ ID NO: 152707 - protein, 446 aa, Artificial Sequence
  derived and/or modified sequence
MAAATIVHDTSEAVELCPAYGLYLKPITKMTISVALPQLKQPGKSISNWEVMERLKGMVQNHQFSTLRISKSTMDFIRFEGEVENKSLVKSFLACLDGKTIKLSGFSDILKVRAAEFKIDFPTRHDWDSFFRDAKDMNETLPGERPDTIHLEGLPCKWFALKESGSEKPSEDVLVKVFEKFGEIRNVDIPMLDPYREEMTGRNFHTFSFGGHLNFEAYVQYREYMGFIQAMSALRGMKLMYKGEDGKAVACNIKVSFDSTKHLSDASIKKRQLERQKLQELEQQREEQKRREKEAEERQRAEERKQKELEELERERKREEKLRKREQKQRDRELRRNQKKLEKLQAEEQKQLQEKIKLEERKLLLAQRNLQSIRLIAELLSRAKVPGGSLCSRQPRPGCPQCPPLKCGRRHGAVSPPAAAVATKPALMPRMTAPSREGVALVCRSR

SEQ ID NO: 152708 - DNA, 3227 bp, Artificial Sequence
  derived and/or modified sequence
agtggaaatgcgtcatagagggcgggcggcgacggcggtggcggcgtcggaggcgcctccgggggacggtggcggctcccggcggtgaggccgcgcctgtccggggatcgtcgagggacggcgggagcttgggccagcggcggcggcggcctgggacgcaggcggagccccgcgcaggcccaaggtcccggaggctatggcagcggctaccatcgtgcacgacacgtctgaggccgtggagctctgccctgcttacggcttgtacctgaagcccatcaccaagatgaccatcagcgtggcactcccgcagctgaagcagccggggaagtccatctccaactgggaggtgatggagaggctgaagggcatggtgcagaaccaccagttctccacgctgcgtatttccaagagcaccatggacttcatccgcttcgagggggaggtggagaacaagagcctggtcaagtcttttctggcctgcctggacggcaagaccatcaagctcagcggcttctccgacatcctgaaggtgcgcgcggccgagttcaagatcgacttccccacccgccacgactgggactccttcttccgcgacgccaaggacatgaacgagaccctgccgggggagcggccggacaccatccacctggaggggctgccctgcaagtggttcgccctgaaggagtcgggctccgagaagcccagcgaggacgtcctggtcaaggtgtttgagaagttcggggagatccggaatgtggacatccccatgctggacccctaccgggaggagatgacgggccgcaacttccacaccttcagtttcggggggcacttgaacttcgaggcctatgtgcagtaccgcgagtacatgggcttcatccaggccatgagcgccctgcgcgggatgaaactcatgtacaagggcgaggacggcaaggccgtggcctgcaacatcaaggtttcttttgattcgaccaaacacctgagtgatgcctcaattaagaagcggcagctggagaggcagaagcttcaggaactggagcagcaaagagaagaacaaaagcgcagagagaaggaagcggaggagaggcagcgagcggaggaaaggaaacaaaaggagctggaagagctggagcgagagaggaaaagagaagagaagcttcgcaagagggagcagaagcagagggaccgtgagctgcgccggaatcagaagaagctggagaagctgcaggcggaggagcagaagcagctgcaggagaagatcaagctggaggagcgcaagctgctgctggcccagaggaacctgcagtccatccggctcatcgccgagctgctcagcagagccaaggctgtgaagctacgggaacaggagcagaaggaggagaagctgaggctccagcagcaggaggagcggcggcggctgcaggaggccgagctgcggcgcgtggaggaggagaaggagcgcgcgctgggcctgcagcggaaagagcgggagctgcgcgagcggctgctgagcatcctgctgagcaagaagccggacgacagccacacacacgacgagctgggcgtggcacacgccgacctgctgcagcccgtcctggacatcctgcagaccgtgtcgtccggctgtgtgagcgccaccacgctgcaccccctcgggggccagcccccggccggtgcccccaaggagagcccggcccacccagaggccgacggcgctcccaaaagcgtgaacgggagcgtggccgaggaggccccatgcaaggaggttcagagctcctgtcgtgtggtccccgaggatggctctccagagaagaggtgcccgggcggcgtcctctcctgcattcctgacaacaaccaacagcccaagggcatccctgcctgcgagcagaatgtctccagaaaggacacccggtcagaacaggacaagtgcaaccgggagcccagcaagggccggggccgggccaccggagacgggcttgctgaccggcacaagcgggagaggagccgggccaggcgggccagcagcagggaggacgggaggccacgcaaggagcggcggccccacaagaagcacgcctacaaggatgacagcccccgccggcgcagcacgagcccggaccacacccggtcccggaggtcccacagcaaagacaggcaccggagggagcggagccgggagcggaggggcagcgccagcaggaagcacagccgccaccgccgccgaagcgagcggtcgcgctcccggtccccgagcaggcaccgcagtacctggaacaggtaatgacgggcacggcctccccacggcctgtccgggaaagaccaggacctgctcgagcctcctggccgctccttggccgctctccgtccacccctgcaaagccaagacccttctgcagccacgaatgtccacggagcccgccggcaggaaggaagacaccatgctttagagatccatctttctccactcaccgcagcgtacttggcacttcagtttcaaacacgtagtcctttaaaacttgatccgatagctttaatgcggccggtcctctctcagtcaggaaaattgcacagaccgacagtcgtgaggatggcagagctgctgcattcccccacacggggatttctgtgtctgcttggcgacctccctgcgtgcacggcctaggaggtgcacgggccaccatagtcacactggcactgaaaagaaagcgttgccctggtgattctttcccccccgtttgtaatgttaactgatcaggaagtgcagtttgggtgggatgccgaatcgtcgtgctgacattgagtcacggatgaggaaggtacaagtcctttaagatcaaaactcaaacgggccgttctttctaaggtgtcggtatgtggggagtggtacaaaatggtctgatgctccttcaaaaacattcactttttacaacgtcaaggaattaagcataaaaaagattggttaaaagctttggtttctagtaaaggttagtgtgtgtggtttttttaagaagctgttttgctaaattatttttacttggaatgtttcaaacagatttcaggctgcaaacttgttttataatcgtttgcttctccaagtgaagctcagaaatacctaaaaatagctgtaacgttcgcgttaggaaagatggtgtttattccagtttgcatttttatggtgaaataaaatccttttccaatgaactaaaaaaaaaaaaaaaaaaaaa

SEQ ID NO: 152709 - DNA, 2088 bp, Artificial Sequence
  derived and/or modified sequence
atggccgctgctaccatcgtccatgacacttcggaagctgtcgagctgtgcccggcttatgggctatatttgaagcctatcacgaagatgactatttctgttgccctgcctcagctcaagcaacccgggaaaagtattagcaactgggaggtgatggaacggctgaagggcatggttcaaaatcatcagttttcaactctacgcatttcaaagagtaccatggatttcatacggttcgaaggtgaggtcgagaataaaagtctagtgaaaagtttcctggcctgcttggacgggaaaacgatcaagctgtccggcttttctgatatactcaaagtacgggccgcggagttcaaaatcgactttcccactaggcacgattgggattcctttttcagggacgctaaagatatgaatgaaactctacctggcgagaggcctgataccatccaccttgaaggactgccctgcaagtggttcgcactgaaagagtcggggagcgaaaagccgagcgaagatgtgcttgttaaggttttcgagaagtttggagagattaggaacgtggacatcccaatgctcgacccttaccgggaggagatgaccggcagaaactttcacactttcagctttggtgggcacttgaatttcgaggcttatgttcagtacagagagtatatgggtttcatacaagctatgagtgctttgaggggtatgaagcttatgtataagggtgaagatggcaaggcggtggcatgcaacataaaggtgtccttcgatagtaccaagcacctgtctgacgcaagcatcaagaaaaggcaattagaacggcaaaaactgcaggagctggaacagcaaagggaggagcagaaacgacgtgaaaaagaggcagaagagcggcagagagcagaggagaggaagcaaaaagagctggaggaactcgagcgcgagagaaaacgtgaagaaaaactgagaaaaagggaacagaaacagagagaccgagaactaaggaggaaccagaagaaattggagaagcttcaggccgaggagcagaaacagctgcaggagaaaattaaattggaggagcggaagctacttctggctcaacggaacctgcagagtataaggctgatcgccgagcttttgtctcgcgcaaaggccgtgaagttgagagaacaagaacaaaaagaggagaaactgaggctccagcagcaggaggagcgacggcgattgcaggaagccgagctgagaagggtggaggaagagaaagagcgcgctttagggctgcagcgaaaggaacgcgagctacgggagcgactgttaagcatcctgttatcaaaaaagcctgacgatagtcacacccacgacgagttgggggtggcacatgccgatttgctccaacctgttcttgatatcctgcaaacagtgagttccggctgtgtgagcgctaccaccctgcaccctctgggcggccagccccctgccggcgctcccaaggagtcccctgcccacccagaggccgacggagcaccgaagtcagttaatggaagcgtcgccgaggaggccccatgcaaagaggtgcagtcgagctgcagggtcgtgcctgaggacggctcccccgagaagcggtgcccgggtggagttttgagctgcatccctgacaacaaccagcagcctaaaggcatacctgcctgtgagcaaaatgtcagcaggaaggatacaaggtccgaacaggataagtgtaatagggagccttcaaaggggcgtggtcgtgcaactggagatggcctggctgacaggcacaagcgggagaggtcaagagcaagacgggctagttctcgggaagatggcagaccaagaaaggagaggaggccacataagaagcatgcatacaaggatgacagccctcggcgccgtagcacgtctccagaccataccaggtcacggaggagccattctaaagacaggcacagaagagagagaagtagggaacgtcgaggaagtgcgagtagaaaacacagtcgacatcggagaaggagcgagaggagccggtcaagaagtccgagccgacataggagcacttggaatcgctag

SEQ ID NO: 152710 - DNA, 1341 bp, Artificial Sequence
  derived and/or modified sequence
atggcagctgcgacgatcgtgcacgacacttccgaggccgtcgaactctgtcccgcatacggactttatctgaagccaataaccaaaatgaccattagtgtggctcttcctcagcttaaacagccgggaaaatctatcagtaattgggaggttatggagaggctgaagggcatggtgcagaaccaccagttctctacattgcgaatcagtaagtcgacgatggacttcatccgttttgagggtgaagtggaaaataagtctttggtcaaatcgttcctggcttgtctcgacgggaaaacaattaagctatcaggcttctccgatatcctgaaggtgagagcagctgagtttaagattgacttcccgacacgacacgactgggacagcttttttagagatgcgaaggacatgaatgagacccttccaggagagcgacctgatacaatccatctggagggattgccctgcaagtggttcgccctgaaggagagtggaagtgagaagccgagcgaagatgtcctagtaaaggttttcgaaaagttcggagaaatccgcaatgtcgacattccgatgctggatccctacagggaggagatgactggcaggaactttcacactttcagctttggtgggcacctgaactttgaggcttacgtgcaataccgggaatatatgggatttattcaggctatgtctgcgctccgggggatgaaactcatgtacaagggagaagatggaaaagcagtagcgtgcaacattaaagtctcttttgactccacgaaacacctgtcagacgcatcgatcaaaaaacggcaattggagcggcaaaaactgcaggaactggagcagcagcgagaggagcaaaagagacgcgagaaggaggccgaggaaagacagcgcgctgaagagaggaaacaaaaggaactcgaagaactggaacgggagaggaagagagaagagaaactgcgaaaacgcgagcagaaacagagggacagggagctgcgcaggaaccagaagaagctggagaaacttcaggctgaagagcagaaacagttacaggagaagatcaagctcgaagagagaaaactgcttctcgctcaacggaatttgcaaagtattcgcctgattgccgaactgctgtctcgcgctaaagtgccaggaggctcgttgtgctccaggcagcccaggcccggttgtcctcagtgcccccccctcaagtgtggccgacgccacggggccgtgtcgcccccagctgcagcagtcgccaccaaacctgccctcatgccgaggatgacggctcccagccgcgaaggcgtggctcttgtgtgtaggtccaggtag

SEQ ID NO: 152711 - DNA, 2088 bp, Artificial Sequence
  derived and/or modified sequence
atggctgctgccaccatcgtgcatgacaccagcgaggccgtggagctgtgcccagcctacggcctgtacctgaagcccatcaccaagatgaccatctctgtggccctgccccagctgaagcagcccgggaagagcatcagcaactgggaggtgatggagcggctgaagggcatggtgcagaaccaccagttcagcaccctgcgcatcagcaagagcaccatggacttcatccgctttgaaggagaggtggagaacaagagcctggtgaagagcttcctggcctgcctggatggcaagaccatcaagctgagcggcttcagtgacatcctgaaggtgcgggctgctgagttcaagattgacttccccaccaggcatgactgggacagcttcttcagagatgccaaggacatgaatgagaccctgcccggggagaggccagacaccatccacctggagggcctgccctgcaagtggtttgccctgaaggagagcggcagcgagaagcccagtgaagatgtgctggtgaaggtgtttgagaagtttggagagatcagaaatgtggacatccccatgctggacccctaccgggaggagatgacaggcaggaacttccacaccttctcctttggaggccacctgaactttgaggcctacgtgcagtaccgggagtacatgggcttcatccaggccatgtctgccctgcggggcatgaagctgatgtacaagggggaggatggcaaggctgtggcctgcaacatcaaggtgtcctttgacagcaccaagcacctgagtgatgccagcatcaagaagaggcagctggagcggcagaagctgcaggagctggagcagcagcgggaggagcagaagaggcgggagaaggaggccgaggagcggcagagagctgaggagaggaagcagaaggagctggaggagctggagcgggagaggaagcgggaggagaagctgaggaagcgggagcagaagcagagggaccgggagctgcggaggaaccagaagaagctggagaagctgcaggccgaggagcagaagcagctgcaggagaagatcaagctggaggagaggaagctgctgctggcccagaggaacctgcagagcatccggctgattgctgagctgctgagccgggccaaggctgtgaagctgcgggagcaggagcagaaggaggagaagctgcggctgcagcagcaggaggagcggcggcggctgcaggaggccgagctgcggcgggtggaggaggagaaggagcgggccctgggcctgcagaggaaggagcgggagctgcgggagcggctgctgagcatcctgctgagcaagaagccagatgacagccacacccatgatgagctgggcgtggcccatgctgacctgctgcagcctgtgctggacatcctgcagacagtgagcagcggctgtgtgtctgccaccaccctgcaccccctgggcggccagcccccagctggggcccccaaggagagccctgcccaccctgaggctgatggagcccccaagtctgtgaatggatctgtggccgaggaggccccctgcaaggaggtgcagagcagctgccgggtggtgcctgaagatggcagccctgagaagcgctgccctggaggagtgctgagctgcatcccagacaacaaccagcagcccaagggcatcccagcctgtgagcagaatgtgtccaggaaggacaccaggtctgagcaggacaagtgcaaccgggagcccagcaagggccggggccgggccactggagatggcctggccgacagacacaagcgggagaggagccgggcccggcgggccagcagcagagaagatggccggcccaggaaggagcggcggccccacaagaagcacgcctacaaggatgacagcccccggcggcgcagcaccagcccagaccacaccaggagcagaagaagccacagcaaggacagacaccggcgggagaggagccgggagcggcggggcagcgccagcaggaagcacagccgccacagaagaagaagtgagaggagccgcagccgcagccccagccgccacaggagcacctggaacagatag

SEQ ID NO: 152712 - DNA, 1341 bp, Artificial Sequence
  derived and/or modified sequence
atggctgctgccaccatcgtgcatgacaccagcgaggccgtggagctgtgcccagcctacggcctgtacctgaagcccatcaccaagatgaccatctctgtggccctgccccagctgaagcagcccgggaagagcatcagcaactgggaggtgatggagcggctgaagggcatggtgcagaaccaccagttcagcaccctgcgcatcagcaagagcaccatggacttcatccgctttgaaggagaggtggagaacaagagcctggtgaagagcttcctggcctgcctggatggcaagaccatcaagctgagcggcttcagtgacatcctgaaggtgcgggctgctgagttcaagattgacttccccaccaggcatgactgggacagcttcttcagagatgccaaggacatgaatgagaccctgcccggggagaggccagacaccatccacctggagggcctgccctgcaagtggtttgccctgaaggagagcggcagcgagaagcccagtgaagatgtgctggtgaaggtgtttgagaagtttggagagatcagaaatgtggacatccccatgctggacccctaccgggaggagatgacaggcaggaacttccacaccttctcctttggaggccacctgaactttgaggcctacgtgcagtaccgggagtacatgggcttcatccaggccatgtctgccctgcggggcatgaagctgatgtacaagggggaggatggcaaggctgtggcctgcaacatcaaggtgtcctttgacagcaccaagcacctgagtgatgccagcatcaagaagaggcagctggagcggcagaagctgcaggagctggagcagcagcgggaggagcagaagaggcgggagaaggaggccgaggagcggcagagagctgaggagaggaagcagaaggagctggaggagctggagcgggagaggaagcgggaggagaagctgaggaagcgggagcagaagcagagggaccgggagctgcggaggaaccagaagaagctggagaagctgcaggccgaggagcagaagcagctgcaggagaagatcaagctggaggagaggaagctgctgctggcccagaggaacctgcagagcatccggctgattgctgagctgctgagccgggccaaggtgcctgggggcagcctgtgcagccggcagcccaggcctggctgcccccagtgcccccccctgaagtgtggcagaagacatggagctgtgagccccccagctgctgctgtggccaccaagccagccctgatgcccaggatgacagcccccagccgggagggcgtggccctggtgtgccgcagcaggtag

SEQ ID NO: 152713 - DNA, 2088 bp, Artificial Sequence
  derived and/or modified sequence
atggccgccgccaccatcgtgcacgacaccagcgaggccgtggagctgtgtccggcctatggattgtacctgaaacccatcaccaaaatgacgataagcgttgcgctgccacagttgaagcagccaggaaaatccatttccaattgggaggtaatggagcgactcaagggcatggtgcagaaccatcagttttcaacgttacgtattagcaagagtacaatggattttatccgctttgaaggggaagttgagaataagtccctggtgaaatcttttctggcttgcctggacggcaagaccattaagttaagtggtttctccgatattctgaaagtgcgcgccgccgaatttaaaatagatttcccaaccagacacgactgggactcctttttccgggatgcaaaggacatgaatgaaaccctgccaggcgaaaggcctgacaccattcatctggagggccttccctgtaagtggtttgcgctcaaggaatccggatccgagaaaccgtcagaagacgtcctggtgaaagtctttgagaagtttggagagattcgtaacgtggacatcccaatgctcgacccttaccgggaggagatgacaggccgcaactttcatacattctctttcggcggacatctgaactttgaggcctacgtacagtacagagaatatatggggtttatccaggctatgtctgcactgaggggaatgaagctaatgtataagggtgaggatggcaaagctgttgcttgcaatatcaaagttagttttgactctactaaacatctgtcagacgccagcatcaaaaagagacagcttgaaagacagaaattgcaggagcttgaacaacagagggaggagcagaagcgaagagagaaggaagccgaagagcgacagcgtgctgaggaaagaaagcagaaagaactggaggagctggaaagagagcgcaaacgggaagagaaactgcgaaaaagagagcagaagcagcgggatcgagaactccgtagaaaccagaaaaagttggagaagctgcaggctgaagagcagaagcagctacaagagaaaatcaaattagaagaaagaaagcttctgcttgctcagcgcaatctgcagagcatccgtcttatcgctgaattattgtccagggcgaaagccgttaagctgcgcgagcaagagcaaaaagaagaaaagctgaggcttcagcaacaggaagagcggcgtagactgcaggaagcagaacttcgcagggtggaagaggaaaaggagcgtgctctgggcttgcagcgaaaggagagggagttgagagagcgcctgctgagcattttgctgtccaagaagcctgatgacagccacacacatgacgagctgggcgttgcccacgccgatctcctgcagcctgtactcgacatactacagaccgtatcctccggttgtgtttccgcaaccaccctgcacccgctaggcggccagccacccgcgggggccccaaaggagtcacccgcgcatccagaagcagacggagctcctaagtccgtgaatggatcagttgccgaagaggcaccctgcaaggaggtccagtctagttgtcgcgtagtacccgaggatgggagtcctgaaaagcgctgtccagggggagtgctgagttgtatccccgataacaaccagcagcccaaaggaatcccggcttgcgaacagaatgtaagcagaaaagatacccgcagtgagcaggataaatgcaatcgagagccttcaaagggccgaggtcgcgctactggcgacggcctggccgaccgccacaaacgcgagcgaagccgggcccgtcgcgcttcctcccgcgaagacggccggccccgcaaggagcgccgcccccacaaaaaacacgcctacaaggacgactccccaaggagaagatcaactagcccagatcacacccgatcgcgtaggagtcattccaaagataggcatcgacgggaacggagccgggagcggcgcggttccgcaagtagaaaacattcaagacataggaggaggtccgaacgatctcggtctcgttccccatcccggcacagatcaacttggaataggtag

SEQ ID NO: 152714 - DNA, 1341 bp, Artificial Sequence
  derived and/or modified sequence
atggccgccgccaccatcgtgcacgacaccagcgaggccgtggagctgtgtcctgcgtatgggctgtacctgaaacctatcaccaagatgacaattagtgttgctttgcctcaactgaagcagcccggaaaatccatctctaattgggaggtgatggaacggttgaagggaatggtgcagaatcaccaattcagtactttgcgcatcagcaagtctacaatggattttatacgctttgaaggagaagtcgagaacaagtccctggtcaagagcttcctagcttgtttagacgggaaaactattaaactctccggattcagcgatatcctaaaagtccgggcagccgaattcaagattgatttcccgactcggcacgactgggactcattctttcgcgatgccaaggacatgaatgagacccttcctggcgagagacccgacactattcatctggaagggctgccatgcaagtggttcgcccttaaggagagcgggtctgaaaagccaagcgaagacgtgctggtcaaggtgtttgaaaagtttggagaaattcggaatgtcgacattccaatgctcgacccataccgggaagagatgaccggaagaaactttcacactttttcctttggcggccacctgaacttcgaggcctacgtgcagtatcgcgaatatatggggtttattcaggctatgtcagcactccgcggtatgaagctgatgtacaagggcgaagatggcaaggctgtcgcgtgcaacatcaaggtctccttcgattctactaagcacctttcagacgcaagcattaagaagcggcagctggagaggcaaaaactccaagagctcgagcagcagagagaggaacagaaaaggcgcgagaaggaagctgaagagagacagcgggccgaagagaggaagcaaaaggagctggaagaactggagagggaacggaaacgagaagaaaaattgcggaagcgcgaacagaagcagagagaccgggaattaaggcgtaaccagaagaagcttgagaaacttcaggctgaagaacagaagcagttgcaagagaagatcaagttagaggaacgaaaactgcttctcgcccaacgcaacctgcagagcattcgactgatcgcagagttgctaagtcgcgcaaaagtccccggaggcagcctgtgctcgagacagccaaggcccgggtgtccccagtgcccccccctgaaatgcggaaggcggcatggtgcagttagtccgcccgccgccgccgtggccaccaaacctgccctcatgccacgcatgactgccccatctagagagggcgtggccctggtctgtcgaagcaggtag

SEQ ID NO: 152715 - DNA, 2088 bp, Artificial Sequence
  derived and/or modified sequence
atggccgcagccacaatcgttcatgacaccagcgaggctgtcgaactgtgccctgcgtacgggttgtacctgaaacccatcaccaaaatgactatttccgtggccttgccacagttaaagcagccgggaaaatcaatttcaaactgggaagttatggaacgactcaaagggatggtccagaatcaccagttctctaccctcagaatttctaagtcgacaatggacttcattaggtttgagggcgaggtggagaataagtcactggtcaaatctttcttggcctgcctggatggcaagacgatcaagctgtctggtttcagtgatatcctgaaggtgagagcagcagaatttaagattgatttcccgacacggcacgattgggatagcttttttcgggacgccaaagatatgaacgaaacattgcccggagaaagaccagacacaatccaccttgaagggttaccctgtaagtggtttgctctgaaggagtccggctccgaaaagccaagcgaggatgtgctggtcaaggtatttgagaagttcggagaaatacgaaacgtggacattccaatgctggacccatatcgggaagagatgaccggacgaaacttccatacatttagttttggcggacacctgaacttcgaggcttacgtacaatacagagagtatatggggttcatccaggcaatgtccgctctccgagggatgaaactgatgtacaaaggtgaggacgggaaggccgttgcgtgcaatattaaggttagctttgatagtacgaagcacttgtcagatgcctcaatcaagaaacgccagcttgagcggcaaaagctgcaggagttggaacagcaacgtgaggaacagaagcgtagagaaaaagaggcagaggagcggcaaagggcagaggaaaggaaacagaaggagcttgaggagctggagcgagaaagaaagcgggaggaaaagctgcgcaagcgggaacaaaagcagagggaccgggaactccgcagaaaccagaagaagctggaaaaactccaggctgaagagcaaaaacagctccaggaaaagataaagctggaggaacgcaagctcctgctggctcagaggaacctgcagagcattcgtctcatagccgaactccttagcagggcaaaggctgtgaagctccgtgaacaagagcaaaaagaggaaaagctcaggttacagcagcaggaagaacggagacggctacaggaggcggagctacgacgagttgaagaggaaaaggaacgagccctgggcctgcagcggaaagaacgggaactgagagagagactgctatccatcctgttaagtaagaaaccggacgacagccatactcacgacgaactcggggtggctcatgccgatctgctgcagccagtcctggacattctgcagacagtatcctctgggtgcgtgagcgctaccaccctccatcccctgggcggacagccacctgccggagcacccaaggaaagtccagcacatcccgaggccgatggcgctccaaagagcgtgaacggcagcgtggctgaagaagctccctgtaaggaagtccagtccagctgtcgggtggtgcctgaagatggcagccccgagaagcggtgtccgggtggggtcctgagttgtatcccggataacaatcaacagcccaagggaatccccgcatgcgaacagaacgtgtctcggaaggatactcgatccgaacaggacaaatgtaatcgcgagccttctaaggggagaggaagggcgacgggcgacggcctggccgacaggcataagcgcgagaggtccagagctcgcagggcttcctcccgggaagatgggagacctaggaaagagcggcgaccccacaaaaagcatgcgtataaagacgattcaccaaggagacgctccactagccctgatcacacccgaagcaggcgatctcactcaaaggaccggcatagacgggaaagatctagagagcgcaggggctctgcttcaaggaaacactcgcgtcatcgcagacgtagtgaacgtagccggagccgctcgccgtcccgccaccgctctacttggaaccgatag

SEQ ID NO: 152716 - DNA, 1341 bp, Artificial Sequence
  derived and/or modified sequence
atggccgcagctactatcgtccacgataccagtgaggctgtagaactgtgccctgcatacggactatatctaaagccaattactaagatgaccatctcagtggccctgccgcagttgaagcaaccaggcaaaagtatttcaaattgggaggtgatggagcggcttaaggggatggtccagaaccaccagttctcgaccctacggatatctaagtctacaatggatttcatacggtttgagggggaggtggagaacaaatctctggtcaaatcttttctcgcctgcctggatggtaagacaattaagctcagcggcttctccgatatcttaaaggttagagcagccgaatttaagatcgactttccgacaagacacgactgggactctttttttcgggacgctaaagatatgaacgagacacttcccggagagcgtcccgatacaatacacctagaaggccttccgtgtaaatggtttgcacttaaggagagtggatcggagaaaccaagtgaagacgtgctggtcaaggtgtttgaaaagtttggcgaaatcaggaacgtggacattccaatgctggatccttacagagaggaaatgacaggacggaacttccatacgtttagttttgggggtcacctgaatttcgaggcctacgtccagtacagggagtacatgggctttatacaggcaatgagtgccctgcggggtatgaagctaatgtataaaggagaggatggaaaggcagttgcttgcaacatcaaggtatctttcgactctaccaaacacctctctgatgcgagtattaaaaagagacaactggagaggcagaagctgcaggagcttgaacagcaaagagaggagcagaagcggagagagaaggaagcggaggaacgtcagagggcggaagagcgcaagcaaaaggagctggaggagctggagcgagagcgtaaaagagaggagaagctgaggaagcgggagcagaaacagagagacagagagctccgcagaaatcaaaagaagctcgagaaattgcaggccgaggagcagaagcagctgcaggagaagattaagctggaagaaaggaaactgctgctggctcagaggaacctccaatctatcaggctaatcgctgaactgctgtctcgtgcaaaggtgcccggaggcagcctgtgtagcaggcaaccgcgaccagggtgccctcagtgcccccctctgaaatgcggtcggcgtcatggtgcggtgtccccacctgcggctgccgtggcaacaaagcctgctctgatgccacgaatgaccgcaccttcacgcgaaggcgttgcccttgtttgccggagccggtag

SEQ ID NO: 152717 - DNA, 3204 bp, Artificial Sequence
  derived and/or modified sequence
agtggaaatgcgtcatagagggcgggcggcgacggcggtggcggcgtcggaggcgcctccgggggacggtggcggctcccggcggtgaggccgcgcctgtccggggatcgtcgagggacggcgggagcttgggccagcggcggcggcggcctgggacgcaggcggagccccgcgcaggcccaaggtcccggaggctatggcagcggctaccatcgtgcacgacacgtctgaggccgtggagctctgccctgcttacggcttgtacctgaagcccatcaccaagatgaccatcagcgtggcactcccgcagctgaagcagccggggaagtccatctccaactgggaggtgatggagaggctgaagggcatggtgcagaaccaccagttctccacgctgcgtatttccaagagcaccatggacttcatccgcttcgagggggaggtggagaacaagagcctggtcaagtcttttctggcctgcctggacggcaagaccatcaagctcagcggcttctccgacatcctgaaggtgcgcgcggccgagttcaagatcgacttccccacccgccacgactgggactccttcttccgcgacgccaaggacatgaacgagaccctgccgggggagcggccggacaccatccacctggaggggctgccctgcaagtggttcgccctgaaggagtcgggctccgagaagcccagcgaggacgtcctggtcaaggtgtttgagaagttcggggagatccggaatgtggacatccccatgctggacccctaccgggaggagatgacgggccgcaacttccacaccttcagtttcggggggcacttgaacttcgaggcctatgtgcagtaccgcgagtacatgggcttcatccaggccatgagcgccctgcgcgggatgaaactcatgtacaagggcgaggacggcaaggccgtggcctgcaacatcaaggtttcttttgattcgaccaaacacctgagtgatgcctcaattaagaagcggcagctggagaggcagaagcttcaggaactggagcagcaaagagaagaacaaaagcgcagagagaaggaagcggaggagaggcagcgagcggaggaaaggaaacaaaaggagctggaagagctggagcgagagaggaaaagagaagagaagcttcgcaagagggagcagaagcagagggaccgtgagctgcgccggaatcagaagaagctggagaagctgcaggcggaggagcagaagcagctgcaggagaagatcaagctggaggagcgcaagctgctgctggcccagaggaacctgcagtccatccggctcatcgccgagctgctcagcagagccaaggctgtgaagctacgggaacaggagcagaaggaggagaagctgaggctccagcagcaggaggagcggcggcggctgcaggaggccgagctgcggcgcgtggaggaggagaaggagcgcgcgctgggcctgcagcggaaagagcgggagctgcgcgagcggctgctgagcatcctgctgagcaagaagccggacgacagccacacacacgacgagctgggcgtggcacacgccgacctgctgcagcccgtcctggacatcctgcagaccgtgtcgtccggctgtgtgagcgccaccacgctgcaccccctcgggggccagcccccggccggtgcccccaaggagagcccggcccacccagaggccgacggcgctcccaaaagcgtgaacgggagcgtggccgaggaggccccatgcaaggaggttcagagctcctgtcgtgtggtccccgaggatggctctccagagaagaggtgcccgggcggcgtcctctcctgcattcctgacaacaaccaacagcccaagggcatccctgcctgcgagcagaatgtctccagaaaggacacccggtcagaacaggacaagtgcaaccgggagcccagcaagggccggggccgggccaccggagacgggcttgctgaccggcacaagcgggagaggagccgggccaggcgggccagcagcagggaggacgggaggccacgcaaggagcggcggccccacaagaagcacgcctacaaggatgacagcccccgccggcgcagcacgagcccggaccacacccggtcccggaggtcccacagcaaagacaggcaccggagggagcggagccgggagcggaggggcagcgccagcaggaagcacagccgccaccgccgccgaagcgagcggtcgcgctcccggtccccgagcaggcaccgcagtacctggaacaggtaatgacgggcacggcctccccacggcctgtccgggaaagaccaggacctgctcgagcctcctggccgctccttggccgctctccgtccacccctgcaaagccaagacccttctgcagccacgaatgtccacggagcccgccggcaggaaggaagacaccatgctttagagatccatctttctccactcaccgcagcgtacttggcacttcagtttcaaacacgtagtcctttaaaacttgatccgatagctttaatgcggccggtcctctctcagtcaggaaaattgcacagaccgacagtcgtgaggatggcagagctgctgcattcccccacacggggatttctgtgtctgcttggcgacctccctgcgtgcacggcctaggaggtgcacgggccaccatagtcacactggcactgaaaagaaagcgttgccctggtgattctttcccccccgtttgtaatgttaactgatcaggaagtgcagtttgggtgggatgccgaatcgtcgtgctgacattgagtcacggatgaggaaggtacaagtcctttaagatcaaaactcaaacgggccgttctttctaaggtgtcggtatgtggggagtggtacaaaatggtctgatgctccttcaaaaacattcactttttacaacgtcaaggaattaagcataaaaaagattggttaaaagctttggtttctagtaaaggttagtgtgtgtggtttttttaagaagctgttttgctaaattatttttacttggaatgtttcaaacagatttcaggctgcaaacttgttttataatcgtttgcttctccaagtgaagctcagaaatacctaaaaatagctgtaacgttcgcgttaggaaagatggtgtttattccagtttgcatttttatggtgaaataaaatccttttccaatgaa

SEQ ID NO: 152718 - DNA, 2187 bp, Artificial Sequence
  derived and/or modified sequence
cggcggtggcggcgtcggaggcgcctccgggggacggtggcggctcccggcggtgaggccgcgcctgtccggggatcgtcgagggacggcgggagcttgggccagcggcggcggcggcctgggacgcaggcggagccccgcgcaggcccaaggtcccggaggctatggcagcggctaccatcgtgcacgacacgtctgaggccgtggagctctgccctgcttacggcttgtacctgaagcccatcaccaagatgaccatcagcgtggcactcccgcagctgaagcagccggggaagtccatctccaactgggaggtgatggagaggctgaagggcatggtgcagaaccaccagttctccacgctgcgtatttccaagagcaccatggacttcatccgcttcgagggggaggtggagaacaagagcctggtcaagtcttttctggcctgcctggacggcaagaccatcaagctcagcggcttctccgacatcctgaaggtgcgcgcggccgagttcaagatcgacttccccacccgccacgactgggactccttcttccgcgacgccaaggacatgaacgagaccctgccgggggagcggccggacaccatccacctggaggggctgccctgcaagtggttcgccctgaaggagtcgggctccgagaagcccagcgaggacgtcctggtcaaggtgtttgagaagttcggggagatccggaatgtggacatccccatgctggacccctaccgggaggagatgacgggccgcaacttccacaccttcagtttcggggggcacttgaacttcgaggcctatgtgcagtaccgcgagtacatgggcttcatccaggccatgagcgccctgcgcgggatgaaactcatgtacaagggcgaggacggcaaggccgtggcctgcaacatcaaggtttcttttgattcgaccaaacacctgagtgatgcctcaattaagaagcggcagctggagaggcagaagcttcaggaactggagcagcaaagagaagaacaaaagcgcagagagaaggaagcggaggagaggcagcgagcggaggaaaggaaacaaaaggagctggaagagctggagcgagagaggaaaagagaagagaagcttcgcaagagggagcagaagcagagggaccgtgagctgcgccggaatcagaagaagctggagaagctgcaggcggaggagcagaagcagctgcaggagaagatcaagctggaggagcgcaagctgctgctggcccagaggaacctgcagtccatccggctcatcgccgagctgctcagcagagccaaggtacccgggggctccctctgcagccgccagccgcgcccgggctgccctcagtgccctcccctgaaatgcgggcggcgtcacggcgccgtttccccgccggctgcagctgtagctacgaaaccagctttaatgccgaggatgacggctccttcccgggagggtgtagcgctcgtctgtcgttcccgatgatttcagagctgtgacggtttccttttgcaaagctggtgcattcaggttccccgagcaggctggcagcctcccgggggccagggcagaggctctctgtttcctttgggtcggggcagtggcagagagtgcagggggccgctccctctggcccgcgcctctgtgtgtggtcagctggcctggctgtgacctcaccagtggcccagagcagaggggcaaggtgggctggggggagggctgagcgcacagagggggcctgccgtgggcccgggtccctcctccgcagcgtgaacctgacaggtctcaccagcgccggtactgacgaccccctcagcaccaagagcctccctgctcctcctgcaggcgcgactggtaactcccatgagcccggggccagggcccacagacagacagacctccccaggacagacgtccccggcacgctccttgtcctcaggagggctgcgtccccctggagtccaacgcggggcgaccccataacctgttgtctgattacagttgtgataagtccccgggaaggagcatgacaagaggctgagacatgtggcagcccagtccttacctcatggtgaatattgaagacactaacccaggctaggccaggctcgccccgcagctacggcggtggcatgcgtctgcggcgtcatctcagctccctgttgct

SEQ ID NO: 152719 - DNA, 2088 bp, Artificial Sequence
  derived and/or modified sequence
atggccgccgccaccatcgtgcacgacaccagcgaggccgtggagctgtgccccgcctacggcctgtacctgaagcccatcaccaagatgaccatcagcgtggccctgccccagctgaagcagcccggcaagagcatcagcaactgggaggtgatggagagactgaagggcatggtgcagaaccaccagttcagcaccctgagaatcagcaagagcaccatggacttcatcagattcgagggcgaggtggagaacaagagcctggtgaagagcttcctggcctgcctggacggcaagaccatcaagctgagcggcttcagcgacatcctgaaggtgagagccgccgagttcaagatcgacttccccaccagacacgactgggacagcttcttcagagacgccaaggacatgaacgagaccctgcccggcgagagacccgacaccatccacctggagggcctgccctgcaagtggttcgccctgaaggagagcggcagcgagaagcccagcgaggacgtgctggtgaaggtgttcgagaagttcggcgagatcagaaacgtggacatccccatgctggacccctacagagaggagatgaccggcagaaacttccacaccttcagcttcggcggccacctgaacttcgaggcctacgtgcagtacagagagtacatgggcttcatccaggccatgagcgccctgagaggcatgaagctgatgtacaagggcgaggacggcaaggccgtggcctgcaacatcaaggtgagcttcgacagcaccaagcacctgagcgacgccagcatcaagaagagacagctggagagacagaagctgcaggagctggagcagcagagagaggagcagaagagaagagagaaggaggccgaggagagacagagagccgaggagagaaagcagaaggagctggaggagctggagagagagagaaagagagaggagaagctgagaaagagagagcagaagcagagagacagagagctgagaagaaaccagaagaagctggagaagctgcaggccgaggagcagaagcagctgcaggagaagatcaagctggaggagagaaagctgctgctggcccagagaaacctgcagagcatcagactgatcgccgagctgctgagcagagccaaggccgtgaagctgagagagcaggagcagaaggaggagaagctgagactgcagcagcaggaggagagaagaagactgcaggaggccgagctgagaagagtggaggaggagaaggagagagccctgggcctgcagagaaaggagagagagctgagagagagactgctgagcatcctgctgagcaagaagcccgacgacagccacacccacgacgagctgggcgtggcccacgccgacctgctgcagcccgtgctggacatcctgcagaccgtgagcagcggctgcgtgagcgccaccaccctgcaccccctgggcggccagccccccgccggcgcccccaaggagagccccgcccaccccgaggccgacggcgcccccaagagcgtgaacggcagcgtggccgaggaggccccctgcaaggaggtgcagagcagctgcagagtggtgcccgaggacggcagccccgagaagagatgccccggcggcgtgctgagctgcatccccgacaacaaccagcagcccaagggcatccccgcctgcgagcagaacgtgagcagaaaggacaccagaagcgagcaggacaagtgcaacagagagcccagcaagggcagaggcagagccaccggcgacggcctggccgacagacacaagagagagagaagcagagccagaagagccagcagcagagaggacggcagacccagaaaggagagaagaccccacaagaagcacgcctacaaggacgacagccccagaagaagaagcaccagccccgaccacaccagaagcagaagaagccacagcaaggacagacacagaagagagagaagcagagagagaagaggcagcgccagcagaaagcacagcagacacagaagaagaagcgagagaagcagaagcagaagccccagcagacacagaagcacctggaacagatag

SEQ ID NO: 152720 - DNA, 1341 bp, Artificial Sequence
  derived and/or modified sequence
atggccgccgccaccatcgtgcacgacaccagcgaggccgtggagctgtgccccgcctacggcctgtacctgaagcccatcaccaagatgaccatcagcgtggccctgccccagctgaagcagcccggcaagagcatcagcaactgggaggtgatggagagactgaagggcatggtgcagaaccaccagttcagcaccctgagaatcagcaagagcaccatggacttcatcagattcgagggcgaggtggagaacaagagcctggtgaagagcttcctggcctgcctggacggcaagaccatcaagctgagcggcttcagcgacatcctgaaggtgagagccgccgagttcaagatcgacttccccaccagacacgactgggacagcttcttcagagacgccaaggacatgaacgagaccctgcccggcgagagacccgacaccatccacctggagggcctgccctgcaagtggttcgccctgaaggagagcggcagcgagaagcccagcgaggacgtgctggtgaaggtgttcgagaagttcggcgagatcagaaacgtggacatccccatgctggacccctacagagaggagatgaccggcagaaacttccacaccttcagcttcggcggccacctgaacttcgaggcctacgtgcagtacagagagtacatgggcttcatccaggccatgagcgccctgagaggcatgaagctgatgtacaagggcgaggacggcaaggccgtggcctgcaacatcaaggtgagcttcgacagcaccaagcacctgagcgacgccagcatcaagaagagacagctggagagacagaagctgcaggagctggagcagcagagagaggagcagaagagaagagagaaggaggccgaggagagacagagagccgaggagagaaagcagaaggagctggaggagctggagagagagagaaagagagaggagaagctgagaaagagagagcagaagcagagagacagagagctgagaagaaaccagaagaagctggagaagctgcaggccgaggagcagaagcagctgcaggagaagatcaagctggaggagagaaagctgctgctggcccagagaaacctgcagagcatcagactgatcgccgagctgctgagcagagccaaggtgcccggcggcagcctgtgcagcagacagcccagacccggctgcccccagtgcccccccctgaagtgcggcagaagacacggcgccgtgagcccccccgccgccgccgtggccaccaagcccgccctgatgcccagaatgaccgcccccagcagagagggcgtggccctggtgtgcagaagcagatag

SEQ ID NO: 152721 - protein, 479 aa, Artificial Sequence
  derived and/or modified sequence
MAALEKMTFPKKMTFPEKPSHKKYRAALKKEKRKKRRQELARLRDSGLSQEEEEDTFIEEQQLEEEKLLERERERLHEEWLLREQKAQEEFRIKKEKEEAAKKWLEEQERKLKEQWKEQQRKEREEEEQKQQEKKEKEEAVQKMLDQAENDLENSTTWQNPEPPVDFRVMEKDRANCPFYSKTGACRFGDRCSRKHNFPTSSPTLLIKSMFTTFGMEQCRRDDYDPDASLEYSEEETYQQFLDFYEDVLPEFKNVGKVIQFKVSCNLEPHLRGNVYVQYQSEEECQAALSLFNGRWYAGRQLQCEFCPVTRWKMAICGLFEIQQCPRGKHCNFLHVFRNPNNEFWEANRDIYLSSDQTGSSFGKNSERREKMGHHDHYYSRQRGRRNPSPDHTYKRNGESERKKSSHRGKKSHKRTSKSRERHNSPSRGRNRHRSWDQGRRSQSRRSHRSRSQSSSRCRSRGRRKSGNRDRTVQSPQSK

SEQ ID NO: 152722 - protein, 482 aa, Artificial Sequence
  derived and/or modified sequence
MAAPEKMTFPEKPSHKKYRAALKKEKRKKRRQELARLRDSGLSQKEEEEDTFIEEQQLEEEKLLERERQRLHEEWLLREQKAQEEFRIKKEKEEAAKKRQEEQERKLKEQWEEQQRKEREEEEQKRQEKKEKEEALQKMLDQAENELENGTTWQNPEPPVDFRVMEKDRANCPFYSKTGACRFGDRCSRKHNFPTSSPTLLIKSMFTTFGMEQCRRDDYDPDASLEYSEEETYQQFLDFYEDVLPEFKNVGKVIQFKVSCNLEPHLRGNVYVQYQSEEECQAALSLFNGRWYAGRQLQCEFCPVTRWKMAICGLFEIQQCPRGKHCNFLHVFRNPNNEFWEANRDIYLSPDRTGSSFGKNSERRERMGHHDDYYSRLRGRRNPSPDHSYKRNGESERKSSRHRGKKSHKRTSKSRERHNSRSRGRNRDRSRDRSRGRGSRSRSRSRSRRSRRSRSQSSSRSRSRGRRRSGNRDRTVQSPKSK

SEQ ID NO: 152723 - DNA, 3620 bp, Artificial Sequence
  derived and/or modified sequence
atcacagggtgggaaataaaagctgtggcccccaggagttctggacactgggggagagtggggtgacatgagtgactccaaggaaccaagactgcagcagctgggcctcctggaggaggaacagctgagaggccttggattccgacagactcgaggatacaagagcttagcagggtgtcttggccatggtcccctggtgctgcaactcctctccttcacgctcttggctgggctccttgtccaagtgtccaaggtccccagctccataagtcaggaacaatccagaagtaaccgcttcacctggatgggactttcagatctaaatcaggaaggcacgtggcaatgggtggacggctcacctctgttgcccagcttcaagcagtattggaacagaggagagcccaacaacgttggggaggaagactgcgcggaatttagtggcaatggctggaacgacgacaaatgtaatcttgccaaattctggatctgcaaaaagtccgcagcctcctgctccagggatgaagaacagtttctttctccagcccctgccaccccaaacccccctcctgcgtagcagaacttcacccccttttaagctacagttccttctctccatccttcgaccttcacaaaatctctgggactgttctttgtcagattcttcctcctttagaaggctgggtcccattctgtccttcttgtcatgcctccaatttcccctggtgtagagcttgtttttctggcccatccttggagctttatgagtgagctggtgtgggatgcctttgggggtggacttgtgttccaagaatccactctctcttccttttggagattaggatatttgggttgccatgtgtagctgctatgtcccctggggcgttatcttatacatgcaaacctaccatctgttcaacttccacctaccacctcctgcacccctttgatcggggacttactggttgcaagagctcattttgcaggctggaagcaccagggaattaattcccccagtcaaccaatggcacccagagagggcatggaggctccacgcaaccccttccacccccacatcttcctttgtcttatacatggcttccatttggctgtttctaagttgtattctttattttattattattattactatttttcgagatggagtttcactcttgtcgctcaggctggagtgccatggcgcgatcttggctcactgcaacctctgcctcccgggttcaagtgattctcctgcctcagcctcacgagtagctggaattacaggcaggcgccaccagacccggctaattttttgtatttttagtacagatggggtttctccgtgttggtcaggctggtcttgaactcccgacctcagatgatctgcccgcctcggcctcccaaaattgctgggattacaggtgtgagccaccgcgcctggcctattattttttgtaagaataaaacaggtttattgggatttgggactctgaacagttctgtctctactacctgatctcctcctaccacgactttgggatctagaggagctttggctccggctgtgacggctccggccgttctcactgcggctgcaccggcccccgctgcggtcactatttcttcctctgctaggtgaattgtgcctctcctggctctttgacatgtgctagtgagatttcttccttttcctttcggattccccatttcttttgtaggaatggtctggactagggttctccttccccgcagcctgtagtattcatcgtggtggcccaccctctctctccccttggagctcttgccaaaggaggagacaagcagaggtctctattggatttctcaacacctgaagaaagttgcagtgttttcctcttggacattgttgtatttcaaataaaccacaaatcatcattttccaccgagccactgggcagaattcacactgaagctgtcgtcctgcgtacataccatcgtccgttaaacagagaaagagctgcttggcattcttcttccgactggtactgaacatatatacttgcccctcaggtgaggttccaagttgcaactgaccttgaactgaatcactctccccacgttattttttaattactatttttttttaaagatggggtcttgctctgtcgccaggctggagtgcagtggcgcgatctaggctcactgcaacttccgcctcccgggttcaagcgattctcctgcctcagcctcccgagtagctgggactccactaaaagtacaaaaattagctgggcgtgcaccactgcgcccagctaattcttgtatttttggtagagacggggtttcaacatgttgaccaggatggtctcgatctcttgacctcgtgattcgcccgccgcgtcctcccaaagtgctgggattacaggcctgagccaccgcgcccagtctctccccacgttcttgaactcgggcagcacatcctcacagaaatctaggaactgttggtaggtttcttcctcgctgtactccaggcttgcttcggagtcatagtcatccctcctgcactgctcctttccaaacactgtaaacatgcttttaataagaagggtaggactggatgttgggaaatcatgtgaacatctatctccaaatctgcaagctcctgttttactgtagaagggacaattaactccatccttctccatgactctgaaatccaagggggggttccgggttttgccatgtggcgccattttccaactcattttcagcctgatccagcatcttctggacagcttccggtttttgtttcttctgtcgtttctgttcctcctcctctctctctttcctctgctgttcttcccattgttcctttaactttcgctcttgttcttgccgttttctagccacctcttccttttccttctttattctgaattcttcttgtgccttctgctctctcagcaaccactcctcatgtaatctttgcctctctcttccccatagcttttctagttgttgtttttcaataaaagtgtcctcctctttctgtgagagtcctgagtccctcagtggagcaagttcctgctggcgtttctttcgtttctccttcttcagggcggccctgtactttttgtggcttggtttctctggaaatgtcaccttttcgggcgcagccatcttgccggcaccgccccgcccctctagttgtatcctttataataaactggtaaacattgtaaccgcagattcagcccaatctggttcaactttgtgtaataaaatggcgagttgtttttcagttgtcgtggacccccaggttgcaagttacataccctgggcatgtccagatgaacgaagcgtgcaaatccacgtggaacctaagtgctcagaccgaggaacagggactgagttaagaagtggacaccacgtggcatgatccttgatccaatcagattgagccctggcgtgatccagtcagatcaagcctcctgaatcccctcattacaagatccaatcatatcatgcctcactaccctctgtatataaaatctgccccagcctccaacttggagagacagatttgggccagactcctgtgtccttgcttggctgccttgcaataaatttttctctctacaaaa

SEQ ID NO: 152724 - protein, 190 aa, Artificial Sequence
  derived and/or modified sequence
MSRRYTPLAWVLLALLGLGAAQDCGSIVSRGKWGALASKCSQRLRQPVRYVVVSHTAGSVCNTPASCQRQAQNVQYYHVRERGWCDVGYNFKIGEDGKVYEGRGWNTKGDHSGPTWNPIAIGISFMGNYMHRVFFASALRAAQSLLACGAARGYLTPNYEVKGHRDVQQTLSPGDELYKIIQQWPHYRRV

SEQ ID NO: 152725 - protein, 165 aa, Artificial Sequence
  derived and/or modified sequence
MKFACALLALLGLATSCSFIVFRSEWRALPSECSSRLGHPVRYVVISHTRGSFCNSFDSCEQQARNVQHYHKNELEWCDVAYNIKEDHTEPIYNPMSIGITFMGNFMDRVRKAALRAALNLLESGVSRGFLRSNYEVKGHRDVQSFLSFGDQKYQVIQSWEHYRE

SEQ ID NO: 152726 - protein, 196 aa, Artificial Sequence
  derived and/or modified sequence
MSRRSMLLAWALPSLLRLGAAQETEDPACCSPIVPRNEWKALASECAQHLSLPLRYVVVSHTAGSSCNTPASCQQQARNVQHYHMKTLGWCDVGYNFLIGEDGLVYEGRGWNFTGAHSGHLWNPMSIGISFMGNYMDRVPTPQAIRAAQGLLACGVAQGALRSNYVLKGHRDVQRTLSPGNQLYHLIQNWPHYRSP

SEQ ID NO: 152727 - DNA, 591 bp, Artificial Sequence
  derived and/or modified sequence
atgtccagacggtctatgctcctggcttgggccctcccatcccttctgagactaggggctgctcaggaaacagaggatcctgcctgctgtagccccatagtgcctcgcaacgagtggaaggcccttgcctccgagtgtgcccagcacctgagccttcctctcagatatgtcgtagttagccatacagccggatcctcttgcaacaccccggcatcgtgccagcaacaagctcgtaatgtacagcactatcatatgaagaccttggggtggtgtgacgtcgggtacaacttcctgattggagaagatgggctggtttatgaggggaggggctggaacttcacaggcgcacatagtggccacttgtggaaccccatgagcatcggcatcagcttcatggggaactacatggacagggtccctacgcctcaagccattcgggctgcccagggcctgctcgcatgcggggtggcgcagggggctctccgcagcaactatgtgctcaagggccaccgcgacgtgcagcggacactttcaccaggaaatcagttataccatttgattcagaattggcctcactataggtctccttag

SEQ ID NO: 152728 - DNA, 591 bp, Artificial Sequence
  derived and/or modified sequence
atgtcaagacgatcaatgctgctggcgtgggctcttcctagcctgcttaggctgggggctgctcaggaaaccgaagaccccgcctgttgcagtccaatagtaccgcggaacgagtggaaggccctagcctcagaatgcgcccagcatttgtccctgccactcagatatgtcgtggtgtctcacaccgccggctccagctgcaataccccagctagctgtcagcaacaggcaaggaatgtccagcattatcatatgaagacacttgggtggtgcgatgttggttataattttttaatcggagaagacgggctcgtctatgagggcagaggttggaattttaccggagcccattcaggacacctgtggaatccaatgtcaataggaataagcttcatgggtaactatatggacagagtacctactccccaggctatccgtgccgctcagggcctactggcttgcggcgtcgcccagggcgcactcaggagtaattacgtgttgaagggccatcgcgatgtgcagcggacccttagcccaggcaaccaactttaccatttaatacagaattggccacattataggagtccttag

SEQ ID NO: 152729 - DNA, 591 bp, Artificial Sequence
  derived and/or modified sequence
atgtcccgcagaagtatgctactcgcatgggcattgccttctctactgagactaggtgcggcccaggagacagaggaccctgcctgctgttccccaattgtgccgcggaacgaatggaaagctctggcaagcgaatgtgcccagcatctttccctgccgctccgttacgttgttgtgtctcacaccgccggttcatcatgcaacaccccagcctcctgtcagcaacaggccaggaatgtgcaacactaccacatgaaaacgttgggatggtgcgacgtcggttacaattttctcatcggggaggatggcctggtgtacgaaggcagaggctggaatttcacgggcgctcacagcggacacttgtggaacccgatgtccatcggtatcagctttatgggaaattacatggacagagtgcctaccccacaagccattcgcgctgcacagggactgctggcctgcggagtcgcacagggggcactccgctccaactacgtgctgaagggtcacagggacgtgcaacggactctctcgcccggaaaccaactgtaccacctaatccagaattggccccactaccgctccccctag

SEQ ID NO: 152730 - DNA, 949 bp, Artificial Sequence
  derived and/or modified sequence
acggcggggcgaagcgcccaggggcctgtgcgtccctccctgctgagcgagggggcctgtcattgccgtgggcgtgacccagaccccaaccacagtgcatcccgccctggcccagccagagaaggaagctgagtctggggtctgctgggccagcaggaagtcccagcagggtgtgaagcaagactttccgggccactcctggaatcccccagcagataaaggcggcccctccaccgggcgctcctagcggtctcccggaccctgccgccctgccactatgtcccgccgctctatgctgcttgcctgggctctccccagcctccttcgactcggagcggctcaggagacagaagacccggcctgctgcagccccatagtgccccggaacgagtggaaggccctggcatcagagtgcgcccagcacctgagcctgcccttacgctatgtggtggtatcgcacacggcgggcagcagctgcaacacccccgcctcgtgccagcagcaggcccggaatgtgcagcactaccacatgaagacactgggctggtgcgacgtgggctacaacttcctgattggagaagacgggctcgtatacgagggccgtggctggaacttcacgggtgcccactcaggtcacttatggaaccccatgtccattggcatcagcttcatgggcaactacatggatcgggtgcccacaccccaggccatccgggcagcccagggtctactggcctgcggtgtggctcagggagccctgaggtccaactatgtgctcaaaggacaccgggatgtgcagcgtacactctctccaggcaaccagctctaccacctcatccagaattggccacactaccgctccccctgaggccctgctgatccgcaccccattcctcccctcccatggccaaaaaccccactgtctccttctccaataaagatgtagctc

SEQ ID NO: 152731 - DNA, 591 bp, Artificial Sequence
  derived and/or modified sequence
atgagcagaagaagcatgctgctggcctgggccctgcccagcctgctgagactgggcgccgcccaggagaccgaggaccccgcctgctgcagccccatcgtgcccagaaacgagtggaaggccctggccagcgagtgcgcccagcacctgagcctgcccctgagatacgtggtggtgagccacaccgccggcagcagctgcaacacccccgccagctgccagcagcaggccagaaacgtgcagcactaccacatgaagaccctgggctggtgcgacgtgggctacaacttcctgatcggcgaggacggcctggtgtacgagggcagaggctggaacttcaccggcgcccacagcggccacctgtggaaccccatgagcatcggcatcagcttcatgggcaactacatggacagagtgcccaccccccaggccatcagagccgcccagggcctgctggcctgcggcgtggcccagggcgccctgagaagcaactacgtgctgaagggccacagagacgtgcagagaaccctgagccccggcaaccagctgtaccacctgatccagaactggccccactacagaagcccctag

SEQ ID NO: 152732 - DNA, 591 bp, Artificial Sequence
  derived and/or modified sequence
atgagcaggagatctatgctgcttgcttgggcccttcctagtctgctaaggttgggggccgcgcaagagaccgaggaccctgcatgctgctcccctattgtgccaaggaacgaatggaaagcgctcgcctcggagtgtgcccagcatctgtctttgccactgagatatgtggtggtcagtcataccgcagggtcttcttgcaatacgcctgcgtcttgccagcaacaggcccgcaacgtccagcactaccatatgaagaccttaggttggtgtgatgtcggttacaattttttaataggcgaagatggcctggtttatgaaggcagaggctggaacttcactggcgcgcattccggacacttatggaaccctatgagtattgggatcagcttcatgggcaattacatggatagggtgcccaccccacaagcaatccgggccgcccagggcttactggcctgcggtgtggctcagggtgctctcaggagtaattatgtactgaaagggcacagggacgtccagcgaaccctgtcccctgggaaccagctatatcatctgatccagaattggcctcactacaggagtccttag

SEQ ID NO: 152733 - DNA, 591 bp, Artificial Sequence
  derived and/or modified sequence
atgagcagaagatccatgctgctggcctgggccctgcccagcctgctgcggctgggcgccgcccaggagacagaagatcctgcctgctgcagccccatcgtgcccagaaatgagtggaaggccctggcctctgaatgtgcccagcacctgagcctgcccctgcgctacgtggtggtgagccacacagctggcagcagctgcaacaccccagccagctgccagcagcaggccagaaatgtgcagcactaccacatgaagaccctgggctggtgtgatgtgggctacaacttcctgattggagaagatggcctggtgtatgagggccggggctggaacttcaccggggcccacagcggccacctgtggaaccccatgagcatcggcatctccttcatgggcaactacatggacagagtgcccaccccccaggccatccgggccgcccagggcctgctggcctgtggggtggcccagggcgccctgcggagcaactacgtgctgaagggccacagagatgtgcagaggaccctgagccctggcaaccagctgtaccacctgatccagaactggccccactaccgcagcccctag

SEQ ID NO: 152734 - DNA, 591 bp, Artificial Sequence
  derived and/or modified sequence
atgagccggcggagcatgctgctggcctgggccctgcccagcctgttacggctcggggctgcccaagagacagaggaccctgcttgctgcagtcccatcgtacctcgcaacgagtggaaagcacttgcgtccgagtgtgcccagcatctctccctgcccttacgttatgtggtggtcagccatacggcagggagttcctgtaatactcccgcttcttgtcaacagcaagcacgcaacgttcagcactaccacatgaagactttaggatggtgtgacgtcggctacaactttctgatcggagaggacggcctggtatacgaaggtagaggttggaatttcaccggtgcccattctggccatctctggaacccgatgagcattgggatttcctttatgggcaattacatggatagggtgccgacccctcaggccatcagggcagcacagggcctattagcatgtggcgtggcccagggggccctgcggtctaactacgtgttaaagggacatcgtgacgtgcagcggacactgtctcccggaaaccagctctatcacctcatccagaattggcctcactaccgctcaccctag

SEQ ID NO: 152735 - RNA, 591 nt, Artificial Sequence
  derived and/or modified sequence
augucaagacgaucaaugcugcuggcgugggcucuuccuagccugcuuaggcugggggcugcucaggaaaccgaagaccccgccuguugcaguccaauaguaccgcggaacgaguggaaggcccuagccucagaaugcgcccagcauuugucccugccacucagauaugucguggugucucacaccgccggcuccagcugcaauaccccagcuagcugucagcaacaggcaaggaauguccagcauuaucauaugaagacacuuggguggugcgauguugguuauaauuuuuuaaucggagaagacgggcucgucuaugagggcagagguuggaauuuuaccggagcccauucaggacaccuguggaauccaaugucaauaggaauaagcuucauggguaacuauauggacagaguaccuacuccccaggcuauccgugccgcucagggccuacuggcuugcggcgucgcccagggcgcacucaggaguaauuacguguugaagggccaucgcgaugugcagcggacccuuagcccaggcaaccaacuuuaccauuuaauacagaauuggccacauuauaggaguccuuag

SEQ ID NO: 152736 - RNA, 591 nt, Artificial Sequence
  derived and/or modified sequence
augucccgcagaaguaugcuacucgcaugggcauugccuucucuacugagacuaggugcggcccaggagacagaggacccugccugcuguuccccaauugugccgcggaacgaauggaaagcucuggcaagcgaaugugcccagcaucuuucccugccgcuccguuacguuguugugucucacaccgccgguucaucaugcaacaccccagccuccugucagcaacaggccaggaaugugcaacacuaccacaugaaaacguugggauggugcgacgucgguuacaauuuucucaucggggaggauggccugguguacgaaggcagaggcuggaauuucacgggcgcucacagcggacacuuguggaacccgauguccaucgguaucagcuuuaugggaaauuacauggacagagugccuaccccacaagccauucgcgcugcacagggacugcuggccugcggagucgcacagggggcacuccgcuccaacuacgugcugaagggucacagggacgugcaacggacucucucgcccggaaaccaacuguaccaccuaauccagaauuggccccacuaccgcucccccuag

SEQ ID NO: 152737 - protein, 177 aa, Artificial Sequence
  derived and/or modified sequence
MCLSHLENMPLSHSRTQGAQRSSWKLWLFCSIVMLLFLCSFSWLIFIFLQLETAKEPCMAKFGPLPSKWQMASSEPPCVNKVSDWKLEILQNGLYLIYGQVAPNANYNDVAPFEVRLYKNKDMIQTLTNKSKIQNVGGTYELHVGDTIDLIFNSEHQVLKNNTYWGIILLANPQFIS

SEQ ID NO: 152738 - protein, 199 aa, Artificial Sequence
  derived and/or modified sequence
MTLHPSPITCEFLFSTALISPKMCLSHLENMPLSHSRTQGAQRSSWKLWLFCSIVMLLFLCSFSWLIFIFLQLETAKEPCMAKFGPLPSKWQMASSEPPCVNKVSDWKLEILQNGLYLIYGQVAPNANYNDVAPFEVRLYKNKDMIQTLTNKSKIQNVGGTYELHVGDTIDLIFNSEHQVLKNNTYWGIILLANPQFIS

SEQ ID NO: 152739 - DNA, 534 bp, Artificial Sequence
  derived and/or modified sequence
atgtgcctgagccacctggagaacatgcccctgagccacagcagaacccagggcgcccagagaagcagctggaagctgtggctgttctgcagcatcgtgatgctgctgttcctgtgcagcttcagctggctgatcttcatcttcctgcagctggagaccgccaaggagccctgcatggccaagttcggccccctgcccagcaagtggcagatggccagcagcgagcccccctgcgtgaacaaggtgagcgactggaagctggagatcctgcagaacggcctgtacctgatctacggccaggtggcccccaacgccaactacaacgacgtggcccccttcgaggtgagactgtacaagaacaaggacatgatccagaccctgaccaacaagagcaagatccagaacgtgggcggcacctacgagctgcacgtgggcgacaccatcgacctgatcttcaacagcgagcaccaggtgctgaagaacaacacctactggggcatcatcctgctggccaacccccagttcatcagctag

SEQ ID NO: 152740 - DNA, 600 bp, Artificial Sequence
  derived and/or modified sequence
atgaccctgcaccccagccccatcacctgcgagttcctgttcagcaccgccctgatcagccccaagatgtgcctgagccacctggagaacatgcccctgagccacagcagaacccagggcgcccagagaagcagctggaagctgtggctgttctgcagcatcgtgatgctgctgttcctgtgcagcttcagctggctgatcttcatcttcctgcagctggagaccgccaaggagccctgcatggccaagttcggccccctgcccagcaagtggcagatggccagcagcgagcccccctgcgtgaacaaggtgagcgactggaagctggagatcctgcagaacggcctgtacctgatctacggccaggtggcccccaacgccaactacaacgacgtggcccccttcgaggtgagactgtacaagaacaaggacatgatccagaccctgaccaacaagagcaagatccagaacgtgggcggcacctacgagctgcacgtgggcgacaccatcgacctgatcttcaacagcgagcaccaggtgctgaagaacaacacctactggggcatcatcctgctggccaacccccagttcatcagctag

SEQ ID NO: 152741 - DNA, 534 bp, Artificial Sequence
  derived and/or modified sequence
atgtgcctttcccatctggagaatatgcccttgagccattcccgtacacagggggctcagagatcttcatggaaactgtggttattctgtagcatagtcatgctcctctttctatgcagcttcagttggctgatttttatttttctccagttagagaccgcaaaagagccgtgcatggcaaaattcggccctctgccatcaaagtggcagatggccagcagcgaaccaccgtgcgtgaataaggtttccgactggaaattagaaatcctacagaatggactctaccttatatatggtcaggtagcgcctaacgctaattacaatgacgtcgctcctttcgaagtccgcttatataagaataaggacatgatccaaactctgacaaataaaagtaagatccagaatgtgggtggaacttacgaacttcacgtgggtgacacaatcgatctcatcttcaattctgagcaccaggtgctgaaaaataatacatattggggcatcattctgctagccaacccgcagttcataagctag

SEQ ID NO: 152742 - DNA, 600 bp, Artificial Sequence
  derived and/or modified sequence
atgactctccaccccagtccaatcacatgcgagttcctcttcagcaccgctctgataagccccaaaatgtgcttgagtcacctggagaacatgccattgtcacactcaaggacacagggagcccagcggagctcttggaagctctggttgttctgcagcatcgtcatgctgttatttctgtgtagtttcagttggttgatctttatcttcctgcagctggagacagctaaagaaccttgtatggcaaaattcggacccctccccagcaaatggcagatggcctcaagcgagcccccgtgtgtcaacaaagtcagcgactggaagcttgaaattcttcagaacggactgtatctgatttacggccaggtggctcccaacgccaattataatgacgtggcccccttcgaggtcagactgtacaagaataaggatatgattcagacactgaccaacaaatccaagattcagaacgtgggggggacctatgagctgcacgttggagacaccatagacttaatattcaactctgagcaccaggtgctgaagaacaatacttattggggaataattctcttagctaatccacaatttatttcttag

SEQ ID NO: 152743 - DNA, 534 bp, Artificial Sequence
  derived and/or modified sequence
atgtgcctgagccacctggagaacatgcccctgagccacagcaggacccagggcgcccagaggagctcctggaagctgtggctgttctgcagcatcgtgatgctgctcttcctgtgcagcttctcctggctgatcttcatcttcctgcagctggagacagccaaggagccctgcatggccaagtttggccccctgcccagcaagtggcagatggccagcagcgagcccccctgtgtgaacaaggtgtctgactggaagctggagatcctgcagaatggcctgtacctgatctacggccaggtggccccaaatgccaactacaatgatgtggccccctttgaggtgcggctgtacaagaacaaggacatgatccagaccctgaccaacaagagcaagatccagaatgtgggcggcacctatgagctgcacgtgggggacaccatcgacctgatcttcaacagcgagcaccaggtgctgaagaacaacacctactggggcatcatcctgctggccaacccccagttcatctcctag

SEQ ID NO: 152744 - DNA, 600 bp, Artificial Sequence
  derived and/or modified sequence
atgaccctgcaccccagccccatcacctgtgagttcctgttcagcacagccctgatcagccccaagatgtgcctgagccacctggagaacatgcccctgagccacagcaggacccagggcgcccagaggagctcctggaagctgtggctgttctgcagcatcgtgatgctgctcttcctgtgcagcttctcctggctgatcttcatcttcctgcagctggagacagccaaggagccctgcatggccaagtttggccccctgcccagcaagtggcagatggccagcagcgagcccccctgtgtgaacaaggtgtctgactggaagctggagatcctgcagaatggcctgtacctgatctacggccaggtggccccaaatgccaactacaatgatgtggccccctttgaggtgcggctgtacaagaacaaggacatgatccagaccctgaccaacaagagcaagatccagaatgtgggcggcacctatgagctgcacgtgggggacaccatcgacctgatcttcaacagcgagcaccaggtgctgaagaacaacacctactggggcatcatcctgctggccaacccccagttcatctcctag

SEQ ID NO: 152745 - DNA, 534 bp, Artificial Sequence
  derived and/or modified sequence
atgtgcctgagccacctggagaacatgcccctgagccacagccggacccaaggcgctcaaagatcttcctggaaactctggctgttttgcagcattgtcatgctgttgtttctgtgcagtttctcatggctgatctttatcttccttcagctggagactgctaaagaaccttgtatggctaagtttggcccattgccctctaagtggcagatggccagctcagagccaccgtgcgtgaataaagtgtcggactggaagcttgagattctccagaatggactgtacttgatctatggacaggtggcaccgaacgcaaattataacgacgtggctccgttcgaggttagactgtacaaaaacaaagatatgattcagacgctgactaacaagagcaagatccagaacgtaggaggtacatacgaacttcacgttggggatacaattgacctcatcttcaatagcgaacaccaggtgcttaagaacaatacatactggggcatcattctgctggccaacccccagtttatatcttag

SEQ ID NO: 152746 - DNA, 600 bp, Artificial Sequence
  derived and/or modified sequence
atgaccctgcaccccagccccatcacctgcgagttcctgttcagcacagcattgatctctcctaaaatgtgtcttagtcatctagagaacatgcccctatcccatagtcgtactcagggagcacaaaggtcgtcttggaaactctggttgttctgctctatcgttatgctcctgttcctctgctctttttcctggctgatcttcatctttctccagctggaaactgctaaggagccctgcatggccaaatttggccctctgccttctaaatggcagatggcctccagcgagccgccatgtgtgaataaagttagcgactggaagcttgaaatcttgcaaaatggattatatctgatctacggccaggtggctcctaatgctaactataacgacgtggctccatttgaggtgcgactgtataagaataaagacatgattcagactctaacgaacaagagcaagattcagaacgtcggagggacctatgaactgcatgtgggcgatactatcgacctgatctttaattccgagcatcaagtcctgaagaataacacttattgggggataatcctgctcgcaaacccccagttcatctcctag

SEQ ID NO: 152747 - DNA, 534 bp, Artificial Sequence
  derived and/or modified sequence
atgtgtctgtctcatctagagaatatgccgctgagccatagccgaacgcagggcgcacagcgctccagttggaagctgtggttgttttgttcaatcgtcatgctgctgttcctatgttcttttagctggctcattttcatctttttgcaactcgagactgcaaaggagccatgtatggccaaatttgggccactaccatcaaagtggcagatggccagcagcgaaccgccttgcgtcaacaaagtcagtgactggaagctagagatcctgcagaacggactgtaccttatttatggtcaggtggcacccaacgccaactacaacgatgtggctccttttgaggtccgtctctataagaataaggacatgatccagacactaacaaataaatctaagatccaaaatgtcggcggaacatatgaattgcatgtgggagatactattgatctgattttcaatagtgaacatcaggtacttaagaataacacttattggggcataatcttgcttgccaacccccagtttatttcctag

SEQ ID NO: 152748 - DNA, 600 bp, Artificial Sequence
  derived and/or modified sequence
atgaccctccacccttctcctatcacctgcgagttcctgtttagcactgccctcatatctccaaagatgtgcttgagccatctagagaacatgccactgtcacactctagaactcagggcgcacagagatcatcctggaaactgtggctgttttgtagcattgtgatgctgctctttctgtgttctttttcatggctcatcttcatcttcctgcaactcgagacagccaaagagccatgcatggcaaagttcgggccattgccctcgaagtggcagatggcatccagcgaacctccctgcgtgaacaaggtgagtgactggaagcttgaaatcctccaaaacggtctctacttgatatacggacaagtagccccaaacgcaaactacaatgacgttgccccattcgaagtgaggttgtacaagaacaaggatatgatccagactttgaccaataaatcaaagatccagaatgttggcggtacatacgagctgcacgtgggagataccatcgatctgatattcaactcggagcatcaagttctcaaaaacaatacatattggggaatcattcttctggccaatcctcaatttattagctag

SEQ ID NO: 152749 - DNA, 1961 bp, Artificial Sequence
  derived and/or modified sequence
cagctctcatttctccaaaaatgtgtttgagccacttggaaaatatgcctttaagccattcaagaactcaaggagctcagagatcatcctggaagctgtggctcttttgctcaatagttatgttgctatttctttgctccttcagttggctaatctttatttttctccaattagagactgctaaggagccctgtatggctaagtttggaccattaccctcaaaatggcaaatggcatcttctgaacctccttgcgtgaataaggtgtctgactggaagctggagatacttcagaatggcttatatttaatttatggccaagtggctcccaatgcaaactacaatgatgtagctccttttgaggtgcggctgtataaaaacaaagacatgatacaaactctaacaaacaaatctaaaatccaaaatgtaggagggacttatgaattgcatgttggggacaccatagacttgatattcaactctgagcatcaggttctaaaaaataatacatactggggtatcattttactagcaaatccccaattcatctcctagagacttgatttgatctcctcattcccttcagcacatgtagaggtgccagtgggtggattggagggagaagatattcaatttctagagtttgtctgtctacaaaaatcaacacaaacagaactcctctgcacgtgaattttcatctatcatgcctatctgaaagagactcaggggaagagccaaagacttttggttggatctgcagagatacttcattaatccatgataaaacaaatatggatgacagaggacatgtgcttttcaaagaatctttatctaattcttgaattcatgagtggaaaaatggagttctattcccatggaagatttacctggtatgcaaaaaggatctggggcagtagcctggctttgttctcatattcttgggctgctgtaattcattcttctcatactcccatcttctgagaccctcccaataaaaagtagactgataggatggccacagatatgcctaccataccctactttagatatggtggtgttagaagataaagaacaatctgagaactattggaatagaggtacaagtggcataaaatggaatgtacgctatctggaaatttctcttggttttatcttcctcaggatgcagggtgctttaaaaagccttatcaaaggagtcattccgaaccctcacgtagagctttgtgagaccttactgttggtgtgtgtgtctaaacattgctaattgtaaagaaagagtaaccattagtaatcattaggtttaaccccagaatggtattatcattactggattatgtcatgtaatgatttagtatttttagctagctttccacagtttgcaaagtgctttcgtaaaacagttagcaattctatgaagttaattgggcaggcatttgggggaaaattttagtgatgagaatgtgatagcatagcatagccaactttcctcaactcataggacaagtgactacaagaggcaatgggtagtcccctgcattgcactgtctcagctttagaattgttatttctgctatcgtgttataagactctaaaacttagcgaattcacttttcaggaagcatattcccctttagcccaaggtgagcagagtgaagctacaacagatctttcctttaccagcacactttttttttttttcctgcctgaatcagggagatccaggatgctgttcaggccttatcccaaccaaattcccctcttcactttgcagggcccatcttagtcaaatgtgctaacttctaaaataataaatagcactaattcaaaatttttggactcttaaattagctacttgcaggttcttgttgaaaggtatataatattacattgtaaacaaatttaaaatatttatggatatttgtgaaaagctgcattatgttaaataatattacatgtaaagct

SEQ ID NO: 152750 - DNA, 2008 bp, Artificial Sequence
  derived and/or modified sequence
catgacattgcatccttcacccatcacttgtgaatttttgttttccacagctctcatttctccaaaaatgtgtttgagccacttggaaaatatgcctttaagccattcaagaactcaaggagctcagagatcatcctggaagctgtggctcttttgctcaatagttatgttgctatttctttgctccttcagttggctaatctttatttttctccaattagagactgctaaggagccctgtatggctaagtttggaccattaccctcaaaatggcaaatggcatcttctgaacctccttgcgtgaataaggtgtctgactggaagctggagatacttcagaatggcttatatttaatttatggccaagtggctcccaatgcaaactacaatgatgtagctccttttgaggtgcggctgtataaaaacaaagacatgatacaaactctaacaaacaaatctaaaatccaaaatgtaggagggacttatgaattgcatgttggggacaccatagacttgatattcaactctgagcatcaggttctaaaaaataatacatactggggtatcattttactagcaaatccccaattcatctcctagagacttgatttgatctcctcattcccttcagcacatgtagaggtgccagtgggtggattggagggagaagatattcaatttctagagtttgtctgtctacaaaaatcaacacaaacagaactcctctgcacgtgaattttcatctatcatgcctatctgaaagagactcaggggaagagccaaagacttttggttggatctgcagagatacttcattaatccatgataaaacaaatatggatgacagaggacatgtgcttttcaaagaatctttatctaattcttgaattcatgagtggaaaaatggagttctattcccatggaagatttacctggtatgcaaaaaggatctggggcagtagcctggctttgttctcatattcttgggctgctgtaattcattcttctcatactcccatcttctgagaccctcccaataaaaagtagactgataggatggccacagatatgcctaccataccctactttagatatggtggtgttagaagataaagaacaatctgagaactattggaatagaggtacaagtggcataaaatggaatgtacgctatctggaaatttctcttggttttatcttcctcaggatgcagggtgctttaaaaagccttatcaaaggagtcattccgaaccctcacgtagagctttgtgagaccttactgttggtgtgtgtgtctaaacattgctaattgtaaagaaagagtaaccattagtaatcattaggtttaaccccagaatggtattatcattactggattatgtcatgtaatgatttagtatttttagctagctttccacagtttgcaaagtgctttcgtaaaacagttagcaattctatgaagttaattgggcaggcatttgggggaaaattttagtgatgagaatgtgatagcatagcatagccaactttcctcaactcataggacaagtgactacaagaggcaatgggtagtcccctgcattgcactgtctcagctttagaattgttatttctgctatcgtgttataagactctaaaacttagcgaattcacttttcaggaagcatattcccctttagcccaaggtgagcagagtgaagctacaacagatctttcctttaccagcacactttttttttttttcctgcctgaatcagggagatccaggatgctgttcaggccttatcccaaccaaattcccctcttcactttgcagggcccatcttagtcaaatgtgctaacttctaaaataataaatagcactaattcaaaatttttggactcttaaattagctacttgcaggttcttgttgaaaggtatataatattacattgtaaacaaatttaaaatatttatggatatttgtgaaaagctgcattatgttaaataatattacatgtaaagct

SEQ ID NO: 152751 - protein, 643 aa, Artificial Sequence
  derived and/or modified sequence
MLLGASLVGVLLFSKLVLKLPWTQVGFSLLFLYLGSGGWRFIRVFIKTIRRDIFGGLVLLKVKAKVRQCLQERRTVPILFASTVRRHPDKTALIFEGTDTHWTFRQLDEYSSSVANFLQARGLASGDVAAIFMENRNEFVGLWLGMAKLGVEAALINTNLRRDALLHCLTTSRARALVFGSEMASAICEVHASLDPSLSLFCSGSWEPGAVPPSTEHLDPLLKDAPKHLPSCPDKGFTDKLFYIYTSGTTGLPKAAIVVHSRYYRMAALVYYGFRMRPNDIVYDCLPLYHSAGNIVGIGQCLLHGMTVVIRKKFSASRFWDDCIKYNCTIVQYIGELCRYLLNQPPREAENQHQVRMALGNGLRQSIWTNFSSRFHIPQVAEFYGATECNCSLGNFDSQVGACGFNSRILSFVYPIRLVRVNEDTMELIRGPDGVCIPCQPGEPGQLVGRIIQKDPLRRFDGYLNQGANNKKIAKDVFKKGDQAYLTGDVLVMDELGYLYFRDRTGDTFRWKGENVSTTEVEGTLSRLLDMADVAVYGVEVPGTEGRAGMAAVASPTGNCDLERFAQVLEKELPLYARPIFLRLLPELHKTGTYKFQKTELRKEGFDPAIVKDPLFYLDAQKGRYVPLDQEAYSRIQAGEEKL

SEQ ID NO: 152752 - protein, 237 aa, Artificial Sequence
  derived and/or modified sequence
MPLTLSTLLQPGRIWTGRRAAEPTPGHNAAWSLSGGGAAVLQAGAETALDPGGILPVVPLLGIWRLALHPGLHQDHQAYLTGDVLVMDELGYLYFRDRTGDTFRWKGENVSTTEVEGTLSRLLDMADVAVYGVEVPGTEGRAGMAAVASPTGNCDLERFAQVLEKELPLYARPIFLRLLPELHKTGTYKFQKTELRKEGFDPAIVKDPLFYLDAQKGRYVPLDQEAYSRIQAGEEKL

SEQ ID NO: 152753 - DNA, 1932 bp, Artificial Sequence
  derived and/or modified sequence
atgctgttgggggcaagtctagttggcgttttgctgttttcgaagttggtgctgaagctaccgtggacacaggtaggcttttctctgttatttctctacctgggtagcggcgggtggcggttcatcagggtgtttattaagacaatcagaagggatatctttggaggcttggtgctgctgaaagtaaaagcgaaggtccgccagtgcctgcaggagcgccggactgtacccatattatttgcgtccaccgtccgcagacaccctgataagaccgccctgatttttgaaggcacggacactcattggacatttcggcagctagacgagtatagtagcagcgtcgctaactttctgcaggccagaggactggccagcggcgacgtggctgctatcttcatggagaatagaaacgagtttgtaggactatggcttggcatggccaagctgggtgttgaagctgccctcatcaataccaatctaaggcgggatgccttgttacactgcctgactacaagccgggcgagagcactggtttttggttctgagatggcctctgccatctgcgaggtccatgcgtccctcgacccttctctcagcctgttttgttccgggtcctgggagccaggtgccgtgcccccttccaccgagcatttagaccctcttctaaaggacgccccgaaacatctaccttcgtgcccggacaagggctttacagacaagttattctatatatatactagtggaactacagggttgcctaaagcagcaatcgttgtgcatagccgctattatcgaatggccgcgttagtctactacgggtttcggatgcggcccaatgatatcgtttacgactgcctacccttgtatcacagcgcagggaacattgtagggattggacagtgcctgctgcatggtatgaccgtggtgatcaggaagaagttctccgcatcccgcttttgggacgattgtattaagtataattgtacaattgtgcagtacattggcgagttatgccgttatttactcaaccagcctcccagggaagcggaaaatcagcaccaggtaaggatggctttgggcaacggtttacgccaatcaatttggacaaacttctcatcgcgctttcacattccacaggtggctgagttctacggtgcaactgaatgtaactgttcactgggcaacttcgactcccaggtaggggcctgtggcttcaacagccgaattttgtcatttgtctaccctataaggttggtccgggtaaacgaggataccatggagctgatacggggcccagacggggtctgcattccatgtcagccaggtgaaccgggccagctcgtcggtagaattatccaaaaggatccactgcggcgattcgatggctacctaaaccagggggcaaacaacaagaagatcgccaaagacgttttcaaaaagggcgatcaggcctatttaaccggggatgtgcttgtaatggatgagctgggttatttgtattttcgcgataggaccggagacactttcagatggaaaggagaaaacgtctccactactgaagtcgagggaacattgagtaggctgttggacatggccgatgtcgccgtgtatggcgtagaggtaccgggaaccgagggcagagccggaatggcagcggtggcctcccctaccggcaattgtgatctggagcggtttgcccaggttctggagaaggaactgcccttatacgccagacccatctttcttcgactactcccagaactgcacaagaccggtacctataaattccagaagacggagctgaggaaggaaggttttgatccggctatcgtgaaggatccactgttctatctggacgcgcagaagggcagatatgtgccccttgaccaagaggcttacagtcggattcaggcaggtgaagagaaattgtag

SEQ ID NO: 152754 - DNA, 714 bp, Artificial Sequence
  derived and/or modified sequence
atgccactgacactctctaccctgctccagcccggtcggatttggacgggccgccgggccgccgaaccaacgcctggccataatgcggcctggtcactttctgggggaggagccgccgtgttgcaagccggcgctgaaaccgctttggaccccggcggaatcctgcctgttgtgccactgcttgggatctggcggctggccctacaccctgggctgcatcaagaccatcaggcttacctcaccggcgatgtgttggtgatggacgagttaggttatctgtatttccgtgatcggactggcgacacttttcgctggaaaggggaaaatgtctcgaccacagaggtagagggcactctgagcaggctcctggacatggctgatgtggctgtgtatggcgttgaggtccccggcaccgaaggtcgagcgggaatggccgctgtggccagcccaacagggaactgtgaccttgaaaggttcgcgcaggtgctggagaaggaactaccgctatacgctagaccaattttcttgagactgttaccagaattgcacaaaaccggaacatacaagtttcagaagaccgaactgcgcaaggaagggttcgatcccgcaattgtgaaggatcccttgttctacctagatgcacaaaaggggagatatgttccgctggaccaagaagcgtactcaagaatccaggccggagaggagaagctctag

SEQ ID NO: 152755 - DNA, 1932 bp, Artificial Sequence
  derived and/or modified sequence
atgctgctgggcgccagcctggtgggcgtgctgctcttcagcaagctggtgctgaagctgccctggacccaggtgggcttcagcctgctcttcctgtacctgggcagcggcggctggaggttcatccgggtcttcatcaagaccatccggcgggacatctttggaggcctggtgctgctgaaggtgaaggccaaggtgcggcagtgcctgcaggagaggagaacagtgcccatcctgtttgccagcacagtgagaagacacccagacaagacagccctgatctttgagggcacagacacccactggaccttccggcagctggatgagtacagcagctctgtggccaacttcctgcaggcccggggcctggccagcggagatgtggccgccatcttcatggagaacagaaatgaatttgtgggcctgtggctgggcatggccaagctgggcgtggaggccgccctgatcaacaccaacctgcggagagatgccctgctgcactgcctgaccaccagccgggcccgggccctggtgtttggaagtgagatggccagcgccatctgtgaggtgcacgccagcctggaccccagcctgagcctcttctgcagcggctcctgggagcccggggctgtgccccccagcacagagcacctggaccccctgctgaaggatgcccccaagcacctgcccagctgcccagacaagggcttcacagacaagctgttctacatctacaccagcggcaccaccggcctgcccaaggccgccatcgtggtgcacagccgctactacaggatggccgccctggtgtactacggcttcaggatgaggcccaatgacatcgtgtatgactgcctgcccctgtaccacagcgctggcaacatcgtgggcatcggccagtgcctgctgcacggcatgacagtggtgatcaggaagaagttcagcgccagccgcttctgggatgactgcatcaagtacaactgcaccatcgtgcagtacatcggggagctgtgccgctacctgctgaaccagcccccccgggaggccgagaaccagcaccaggtgaggatggccctgggcaatggcctgcggcagagcatctggaccaacttcagcagccgcttccacatcccccaggtggccgagttctacggggccacagagtgcaactgcagcctgggcaactttgacagccaggtgggcgcctgtggcttcaacagccgcatcctgagctttgtgtaccccatccggctggtgcgggtgaatgaagacaccatggagctgatccggggcccagatggagtgtgcatcccctgccagcctggagagcccggccagctggtgggccgcatcatccagaaggaccccctgcggagatttgatggctacctgaaccagggcgccaacaacaagaagatcgccaaggatgtgttcaagaagggggaccaggcctacctgactggagatgtgctggtgatggatgagctgggctacctgtacttccgggacagaactggagacaccttccgctggaagggggagaatgtgtccaccacagaggtggagggcaccctgagccggctgctggacatggctgatgtggccgtgtatggagtggaggtgcccggcacagagggccgggccggcatggctgctgtggccagccccactggaaactgtgacctggagagatttgcccaggtgctggagaaggagctgcccctgtatgcccggcccatcttcctgcggctgctgcctgagctgcacaagacaggcacctacaagttccagaagacagagctgaggaaggagggctttgatcctgccatcgtgaaggaccccctcttctacctggatgcccagaagggccgctacgtgcccctggaccaggaggcctacagccgcatccaggccggggaggagaagctgtag

SEQ ID NO: 152756 - DNA, 714 bp, Artificial Sequence
  derived and/or modified sequence
atgcccctgaccctgagcaccctgctgcagcccggccgcatctggacaggccggcgggctgctgagcccaccccaggccacaatgctgcctggagcctgagcggcggcggcgctgctgtgctgcaggccggggctgagacagccctggaccccggcggcatcctgcctgtggtgcccctgctgggcatctggaggctggccctgcaccctggcctgcaccaggaccaccaggcctacctgactggagatgtgctggtgatggatgagctgggctacctgtacttccgggacagaactggagacaccttccgctggaagggggagaatgtgtccaccacagaggtggagggcaccctgagccggctgctggacatggctgatgtggccgtgtatggagtggaggtgcccggcacagagggccgggccggcatggctgctgtggccagccccactggaaactgtgacctggagagatttgcccaggtgctggagaaggagctgcccctgtatgcccggcccatcttcctgcggctgctgcctgagctgcacaagacaggcacctacaagttccagaagacagagctgaggaaggagggctttgatcctgccatcgtgaaggaccccctcttctacctggatgcccagaagggccgctacgtgcccctggaccaggaggcctacagccgcatccaggccggggaggagaagctgtag

SEQ ID NO: 152757 - DNA, 1932 bp, Artificial Sequence
  derived and/or modified sequence
atgctgctgggcgccagcctggtgggcgtgctgctgttcagcaagctggtgctgaagctgccctggacacaagtgggcttcagcttgctgtttctttacctgggttccggaggatggaggtttatccgggtttttattaagactattaggagggacattttcggggggttggtcctgctcaaagtgaaggccaaagtaagacagtgtctccaggagcgaaggacggtgccgatcctctttgccagtaccgtccgcaggcaccctgacaaaacagcactgatttttgaaggaaccgacactcactggaccttccgccagctggacgaatacagttcctcagttgccaactttttgcaggctagaggcctggctagcggtgatgtagccgctatattcatggagaacaggaacgagttcgtcggcttgtggctgggaatggcaaagttgggggtcgaggcagccctgatcaacacaaatctgcggagagatgccctgctgcattgcctgactacctctagagcaagagccctggtttttggaagcgagatggcatcagctatctgcgaggtccacgcctctcttgatccaagtctgtcactcttttgctctggatcatgggaacctggcgcggtgccgccatctaccgagcacctggatccactgcttaaagacgcccccaaacacctcccctcatgccctgacaaggggttcactgacaagctcttctatatctacaccagcgggaccaccggcctcccaaaagctgcaatcgtggtgcattcccgctattacaggatggcggccttggtttattatggatttaggatgaggccaaacgatatcgtttacgactgcctgccgctgtaccatagtgccggaaacatagtggggatcggccagtgcttgctccacggaatgacggtcgttatccggaagaaattctccgccagcaggttctgggacgactgcattaagtataactgcactatagtgcagtatattggggaactgtgtcggtacctgctcaatcaaccgccacgggaggcagagaaccaacatcaggtgagaatggctctggggaacggactgcgacagagcatctggactaattttagtagtcgtttccacatcccacaagtcgctgagttttatggtgcgacagaatgtaattgttctctgggaaactttgatagccaggttggggcctgcggatttaacagtaggatactgtcatttgtttatcctattagacttgtgcgggtgaacgaggatacaatggagctgattcgcggcccagacggagtatgtatcccatgccagcccggtgaaccaggccaactggtgggacggatcatacagaaggatccactcaggcgcttcgatggatacctgaaccagggtgccaataacaagaaaatcgccaaagacgtgttcaagaagggagaccaggcctacctgaccggagacgtgctggtgatggacgagctaggatacctgtacttccgggacagaactggagatacatttagatggaaaggggagaatgtctctaccacagaagtggaggggaccttgtcccgactgctagacatggcagatgtcgcagtctacggagtggaagttccgggcacggaaggacgcgccgggatggccgcagttgcttcccctacagggaactgcgatctcgaaagatttgcccaggtgcttgaaaaggagctccctttatatgcgaggcctatttttttgagactgctgcccgagctgcataaaacgggcacttataaattccagaaaaccgaactcagaaaagagggcttcgaccccgcaatcgtgaaagatcccttattttacctcgacgcacagaaaggacgttacgtgcccctggatcaggaggcctactctcggatacaggcaggagaggagaagctctag

SEQ ID NO: 152758 - DNA, 714 bp, Artificial Sequence
  derived and/or modified sequence
atgcccctgaccctgagcaccctgctgcagcccggccggatctggacagggcgacgggcagccgagcccaccccagggcataatgccgcatggtccctctctggtgggggggcagctgtactgcaggctggagccgaaaccgctctggaccccggtggaattctgccggtggtgcctcttctcggcatatggaggctggccttacacccaggcctacatcaggatcaccaggcatatctcacaggggacgttctggtgatggatgaattggggtacctgtacttccgggatcgaacaggcgataccttcaggtggaaaggcgagaacgtgtcaaccactgaggtcgagggaaccctaagccgtctcttggatatggcggatgtggccgtttacggggtcgaggtgcctggtacagagggccgtgctggaatggccgcagtggcgtcccctaccggtaattgcgatctggagcggttcgcccaggtcttggagaaagaattacctttgtacgctagacctatttttctccgcctgctacccgagctacacaagactgggacctataaattccaaaaaaccgaactccgaaaagagggatttgatcctgccatcgtgaaagacccacttttctatctggatgcacagaagggacgatatgtgccactggaccaggaggcctatagcagaatccaagccggggaagaaaagttgtag

SEQ ID NO: 152759 - DNA, 1932 bp, Artificial Sequence
  derived and/or modified sequence
atgctactgggcgctagtctggttggggttctactttttagtaagctcgtgctgaagctgccctggacacaggtcgggttcagcctgctttttctgtacttgggcagtggcggatggagattcatcagagtgtttataaagaccattcgtcgagacatcttcggaggcctcgttttgttaaaagtcaaggcaaaagtgcgtcagtgtctgcaggaaaggcgtaccgttccaatcctgtttgcctccaccgtgcggagacatcctgacaaaaccgctttgatcttcgaggggaccgacacgcactggacttttaggcagttagacgagtacagcagtagcgtcgccaacttccttcaggcacgagggctagcttccggggatgtggccgctatttttatggagaataggaacgagtttgtcgggttatggttgggcatggcaaagctgggagtagaggccgcactgatcaataccaacctgcgcagagacgccctgctgcactgtcttacaaccagcagagccagggctctcgtctttggctccgaaatggcctctgccatatgcgaagtgcatgcatcactggaccccagtctgagcctgttctgttctgggtcttgggagcctggggctgtcccgccttcgacagaacacctggacccactgctgaaggatgcacccaagcatctcccatcatgccccgacaaaggattcacagataagctgttttacatttatacatcaggtaccaccggactacctaaagctgccatagtagtccattcacggtactacaggatggccgcattggtgtactacggatttcgtatgaggccaaatgacatcgtttacgactgcctgcctctgtaccactcagctgggaacatcgttggcattggccagtgtctgctgcacggcatgacagtggttattagaaaaaaattcagcgctagccgcttctgggacgattgtatcaagtataactgtactattgtccagtacatcggggagctgtgccgttacctccttaaccaacccccaagagaggccgaaaaccagcatcaagtccggatggccctcggaaatggcctccggcaatctatctggactaatttcagtagccgcttccatatccctcaggtagccgagttctacggcgctactgaatgcaactgcagcctcggcaacttcgattcacaagtgggagcctgtgggttcaatagccggattctttccttcgtctaccccatcagattggtgagagtgaatgaggataccatggagctcattcgcggacccgacggtgtctgtattccttgtcaaccaggggagcctggacagctggtgggcagaataatccagaaggatcctctcagaaggttcgatgggtacctgaaccagggcgcaaataataagaaaatcgctaaggacgtatttaaaaagggagaccaggcctacctgactggggatgttctggtcatggacgaactaggatatctctattttagggacagaacaggtgacacattcaggtggaagggcgaaaacgtctcaactaccgaagtcgagggtacattatctcgcctgcttgatatggctgatgttgctgtgtacggcgtggaggtacccggaacagaagggagagctggcatggcagcggtggctagtcctacgggaaactgcgatttggagcgcttcgctcaggtcttggagaaagagctgcctctatacgcacgaccgatttttctgcggctgctcccagagcttcataagaccgggacctacaagtttcagaagacagaactgcgcaaggaaggtttcgacccggcaatcgtgaaggaccctctcttttacctggatgcccagaaggggaggtacgtgccgttagatcaggaggcatattcaagaatacaggctggggaagaaaaactgtag

SEQ ID NO: 152760 - DNA, 714 bp, Artificial Sequence
  derived and/or modified sequence
atgcctttgacactaagtaccctcctccagccaggtcgcatctggaccggaaggcgagcagcggagcctactccgggacataacgctgcctggtctctgtcaggcggtggagctgcagttttacaggccggtgccgaaactgcactggacccaggcggaattctccccgtggtgcccctgctgggcatttggcgactggccctccatccaggactgcatcaggatcatcaggcttatctgaccggggacgttttggttatggacgagctgggctatctctacttcagagaccgcaccggggatacattccggtggaaaggtgagaacgtcagtacgactgaagtggagggaacgctctcccggctcctcgacatggccgacgtggccgtctatggggtggaggtgccaggaaccgaggggagggccggaatggctgctgtcgccagtccaaccgggaactgcgatttggagagatttgctcaggttctggaaaaagaactacccctgtatgcccgacctatcttcctgcggctgctgcctgagctccataaaactggcacttacaaatttcagaaaaccgaattgagaaaggaaggctttgacccagcgatcgtgaaagacccactgttctatctggatgcccagaagggcaggtatgtgcctcttgatcaggaggcttactcccggattcaagcaggagaggaaaagctgtag

SEQ ID NO: 152761 - DNA, 2781 bp, Artificial Sequence
  derived and/or modified sequence
gctgagacccggctccgtgcgtccaggggcggctaatgcccctcacgctgtctacgctgctgcaaccgggccgcatctggacggggcgccgcgcggcggagccgacgccgggccacaatgctgcttggagcctctctggtgggggtgctgctgttctccaagctggtgctgaaactgccctggacccaggtgggattctccctgttgttcctctacttgggatctggcggctggcgcttcatccgggtcttcatcaagaccatcaggcgcgatatctttggcggcctggtcctcctgaaggtgaaggcaaaggtgcgacagtgcctgcaggagcggcggacagtgcccattttgtttgcctctaccgttcggcgccaccccgacaagacggccctgatcttcgagggcacagatacccactggaccttccgccagctggatgagtactcaagcagtgtagccaacttcctgcaggcccggggcctggcctcgggcgatgtggctgccatcttcatggagaaccgcaatgagttcgtgggcctatggctgggcatggccaagctcggtgtggaggcagccctcatcaacaccaacctgcggcgggatgctctgctccactgcctcaccacctcgcgcgcacgggcccttgtctttggcagcgaaatggcctcagccatctgtgaggtccatgccagcctggacccctcgctcagcctcttctgctctggctcctgggagcccggtgcggtgcctccaagcacagaacacctggaccctctgctgaaagatgctcccaagcaccttcccagttgccctgacaagggcttcacagataaactgttctacatctacacatccggcaccacagggctgcccaaggccgccatcgtggtgcacagcaggtattaccgcatggctgccctggtgtactatggattccgcatgcggcccaacgacatcgtctatgactgcctccccctctaccactcagcaggaaacatcgtgggaatcggccagtgcctgctgcatggcatgacggtggtgattcggaagaagttctcagcctcccggttctgggacgattgtatcaagtacaactgcacgattgtgcagtacattggtgaactgtgccgctacctcctgaaccagccaccgcgggaggcagaaaaccagcaccaggttcgcatggcactaggcaatggcctccggcagtccatctggaccaacttttccagccgcttccacataccccaggtggctgagttctacggggccacagagtgcaactgtagcctgggcaacttcgacagccaggtgggggcctgtggtttcaatagccgcatcctgtccttcgtgtaccccatccggttggtacgtgtcaacgaggacaccatggagctgatccgggggcccgacggcgtctgcattccctgccagccaggtgagccgggccagctggtgggccgcatcatccagaaagaccccctgcgccgcttcgatggctacctcaaccagggcgccaacaacaagaagattgccaaggatgtcttcaagaagggggaccaggcctaccttactggtgatgtgctggtgatggacgagctgggctacctgtacttccgagaccgcactggggacacgttccgctggaaaggtgagaacgtgtccaccaccgaggtggaaggcacactcagccgcctgctggacatggctgacgtggccgtgtatggtgtcgaggtgccaggaaccgagggccgggccggaatggctgctgtggccagccccactggcaactgtgacctggagcgctttgctcaggtcttggagaaggaactgcccctgtatgcgcgccccatcttcctgcgcctcctgcctgagctgcacaaaacaggaacctacaagttccagaagacagagctacggaaggagggctttgacccggctattgtgaaagacccgctgttctatctagatgcccagaagggccgctacgtcccgctggaccaagaggcctacagccgcatccaggcaggcgaggagaagctgtgattccccccatccctctgagggccggcggatgctggatccggagccccaggttccgccccagagcggtcctggacaaggccagaccaaagcaagcagggcctggcacctccatcctgaggtgctgcccctccatccaaaactgccaagtgactcattgccttcccaacccttccagaggctttctgtgaaagtctcatgtccaagttccgtcttctgggctgggcaggccctctggttcccaggctgagactgacgggttttctcaggatgatgtcttgggtgagggtagggagaggacaaggggtcaccgagcccttcccagagagcagggagcttataaatggaaccagagcagaagtccccagactcaggaagtcaacagagtgggcagggacagtggtagcatccatctggtggccaaagagaatcgtagccccagagctgcccaagttcactgggctccacccccacctccaggaggggaggagaggacctgacatctgtaggtggcccctgatgccccatctacagcaggaggtcaggaccacgcccctggcctctccccactcccccatcctcctccctgggtggctgcctgattatccctcaggcagggcctctcagtccttgtgggtctgtgtcacctccatctcagtcttggcctggctatgaggggaggaggaatgggagagggggctcaggggccaataaactctgccttgagtcctccta

SEQ ID NO: 152762 - DNA, 1557 bp, Artificial Sequence
  derived and/or modified sequence
ggagcgcggcgggcggggccgggcggcgggcggggctggcggggcggccgggccatgcagggcgcagagccggctaaaccctgctgagacccggctccgtgcgtccaggggcggctaatgcccctcacgctgtctacgctgctgcaaccgggccgcatctggacggggcgccgcgcggcggagccgacgccgggccacaatgctgcttggagcctctctggtgggggtgctgctgttctccaagctggtgctgaaactgccctggacccaggtgggattctccctgttgttcctctacttgggatctggcggctggcgcttcatccgggtcttcatcaagaccatcaggcctaccttactggtgatgtgctggtgatggacgagctgggctacctgtacttccgagaccgcactggggacacgttccgctggaaaggtgagaacgtgtccaccaccgaggtggaaggcacactcagccgcctgctggacatggctgacgtggccgtgtatggtgtcgaggtgccaggaaccgagggccgggccggaatggctgctgtggccagccccactggcaactgtgacctggagcgctttgctcaggtcttggagaaggaactgcccctgtatgcgcgccccatcttcctgcgcctcctgcctgagctgcacaaaacaggaacctacaagttccagaagacagagctacggaaggagggctttgacccggctattgtgaaagacccgctgttctatctagatgcccagaagggccgctacgtcccgctggaccaagaggcctacagccgcatccaggcaggcgaggagaagctgtgattccccccatccctctgagggccggcggatgctggatccggagccccaggttccgccccagagcggtcctggacaaggccagaccaaagcaagcagggcctggcacctccatcctgaggtgctgcccctccatccaaaactgccaagtgactcattgccttcccaacccttccagaggctttctgtgaaagtctcatgtccaagttccgtcttctgggctgggcaggccctctggttcccaggctgagactgacgggttttctcaggatgatgtcttgggtgagggtagggagaggacaaggggtcaccgagcccttcccagagagcagggagcttataaatggaaccagagcagaagtccccagactcaggaagtcaacagagtgggcagggacagtggtagcatccatctggtggccaaagagaatcgtagccccagagctgcccaagttcactgggctccacccccacctccaggaggggaggagaggacctgacatctgtaggtggcccctgatgccccatctacagcaggaggtcaggaccacgcccctggcctctccccactcccccatcctcctccctgggtggctgcctgattatccctcaggcagggcctctcagtccttgtgggtctgtgtcacctccatctcagtcttggcctggctatgaggggaggaggaatgggagagggggctcaggggccaataaactctgccttgagtc

SEQ ID NO: 152763 - DNA, 1932 bp, Artificial Sequence
  derived and/or modified sequence
atgctgctgggcgccagcctggtgggcgtgctgctgttcagcaagctggtgctgaagctgccctggacccaggtgggcttcagcctgctgttcctgtacctgggcagcggcggctggagattcatcagagtgttcatcaagaccatcagaagagacatcttcggcggcctggtgctgctgaaggtgaaggccaaggtgagacagtgcctgcaggagagaagaaccgtgcccatcctgttcgccagcaccgtgagaagacaccccgacaagaccgccctgatcttcgagggcaccgacacccactggaccttcagacagctggacgagtacagcagcagcgtggccaacttcctgcaggccagaggcctggccagcggcgacgtggccgccatcttcatggagaacagaaacgagttcgtgggcctgtggctgggcatggccaagctgggcgtggaggccgccctgatcaacaccaacctgagaagagacgccctgctgcactgcctgaccaccagcagagccagagccctggtgttcggcagcgagatggccagcgccatctgcgaggtgcacgccagcctggaccccagcctgagcctgttctgcagcggcagctgggagcccggcgccgtgccccccagcaccgagcacctggaccccctgctgaaggacgcccccaagcacctgcccagctgccccgacaagggcttcaccgacaagctgttctacatctacaccagcggcaccaccggcctgcccaaggccgccatcgtggtgcacagcagatactacagaatggccgccctggtgtactacggcttcagaatgagacccaacgacatcgtgtacgactgcctgcccctgtaccacagcgccggcaacatcgtgggcatcggccagtgcctgctgcacggcatgaccgtggtgatcagaaagaagttcagcgccagcagattctgggacgactgcatcaagtacaactgcaccatcgtgcagtacatcggcgagctgtgcagatacctgctgaaccagccccccagagaggccgagaaccagcaccaggtgagaatggccctgggcaacggcctgagacagagcatctggaccaacttcagcagcagattccacatcccccaggtggccgagttctacggcgccaccgagtgcaactgcagcctgggcaacttcgacagccaggtgggcgcctgcggcttcaacagcagaatcctgagcttcgtgtaccccatcagactggtgagagtgaacgaggacaccatggagctgatcagaggccccgacggcgtgtgcatcccctgccagcccggcgagcccggccagctggtgggcagaatcatccagaaggaccccctgagaagattcgacggctacctgaaccagggcgccaacaacaagaagatcgccaaggacgtgttcaagaagggcgaccaggcctacctgaccggcgacgtgctggtgatggacgagctgggctacctgtacttcagagacagaaccggcgacaccttcagatggaagggcgagaacgtgagcaccaccgaggtggagggcaccctgagcagactgctggacatggccgacgtggccgtgtacggcgtggaggtgcccggcaccgagggcagagccggcatggccgccgtggccagccccaccggcaactgcgacctggagagattcgcccaggtgctggagaaggagctgcccctgtacgccagacccatcttcctgagactgctgcccgagctgcacaagaccggcacctacaagttccagaagaccgagctgagaaaggagggcttcgaccccgccatcgtgaaggaccccctgttctacctggacgcccagaagggcagatacgtgcccctggaccaggaggcctacagcagaatccaggccggcgaggagaagctgtag

SEQ ID NO: 152764 - DNA, 714 bp, Artificial Sequence
  derived and/or modified sequence
atgcccctgaccctgagcaccctgctgcagcccggcagaatctggaccggcagaagagccgccgagcccacccccggccacaacgccgcctggagcctgagcggcggcggcgccgccgtgctgcaggccggcgccgagaccgccctggaccccggcggcatcctgcccgtggtgcccctgctgggcatctggagactggccctgcaccccggcctgcaccaggaccaccaggcctacctgaccggcgacgtgctggtgatggacgagctgggctacctgtacttcagagacagaaccggcgacaccttcagatggaagggcgagaacgtgagcaccaccgaggtggagggcaccctgagcagactgctggacatggccgacgtggccgtgtacggcgtggaggtgcccggcaccgagggcagagccggcatggccgccgtggccagccccaccggcaactgcgacctggagagattcgcccaggtgctggagaaggagctgcccctgtacgccagacccatcttcctgagactgctgcccgagctgcacaagaccggcacctacaagttccagaagaccgagctgagaaaggagggcttcgaccccgccatcgtgaaggaccccctgttctacctggacgcccagaagggcagatacgtgcccctggaccaggaggcctacagcagaatccaggccggcgaggagaagctgtag

SEQ ID NO: 152765 - protein, 1370 aa, Artificial Sequence
  derived and/or modified sequence
MDPSDFPSPFDPLTLPEKPLAGDLPVDMEFGEDLLESQTAPTRGWAPPGPSPSSGALDLLDTPAGLEKDPGVLDGATELLGLGGLLYKAPSPPEVDHGPEGTLAWDAGDQTLEPGPGGQTPEVVPPDPGAGANSCSPEGLLEPLAPDSPITLQSPHIEEEETTSIATARRGSPGQEEELPQGQPQSPNAPPSPSVGETLGDGINSSQTKPGGSSPPAHPSLPGDGLTAKASEKPPERKRSERVRRAEPPKPEVVDSTESIPVSDEDSDAMVDDPNDEDFVPFRPRRSPRMSLRSSVSQRAGRSAVGTKMTCAHCRTPLQKGQTAYQRKGLPQLFCSSSCLTTFSKKPSGKKTCTFCKKEIWNTKDSVVAQTGSGGSFHEFCTSVCLSLYEAQQQRPIPQSGDPADATRCSICQKTGEVLHEVSNGSVVHRLCSDSCFSKFRANKGLKTNCCDQCGAYIYTKTGSPGPELLFHEGQQKRFCNTTCLGAYKKKNTRVYPCVWCKTLCKNFEMLSHVDRNGKTSLFCSLCCTTSYKVKQAGLTGPPRPCSFCRRSLSDPCYYNKVDRTVYQFCSPSCWTKFQRTSPEGGIHLSCHYCHSLFSGKPEVLDWQDQVFQFCCRDCCEDFKRLRGVVSQCEHCRQEKLLHEKLRFSGVEKSFCSEGCVLLYKQDFTKKLGLCCITCTYCSQTCQRGVTEQLDGSTWDFCSEDCKSKYLLWYCKAARCHACKRQGKLLETIHWRGQIRHFCNQQCLLRFYSQQNQPNLDTQSGPESLLNSQSPESKPQTPSQTKVENSNTVRTPEENGNLGKIPVKTRSAPTAPTPPPPPPPATPRKNKAAMCKPLMQNRGVSCKVEMKSKGSQTEEWKPQVIVLPIPVPIFVPVPMHLYCQKVPVPFSMPIPVPVPMFLPTTLESTDKIVETIEELKVKIPSNPLEADILAMAEMIAEAEELDKASSDLCDLVSNQSAEGLLEDCDLFGPARDDVLAMAVKMANVLDEPGQDLEADFPKNPLDINPSVDFLFDCGLVGPEDVSTEQDLPRTMRKGQKRLVLSESCSRDSMSSQPSCTGLNYSYGVNAWKCWVQSKYANGETSKGDELRFGPKPMRIKEDILACSAAELNYGLAQFVREITRPNGERYEPDSIYYLCLGIQQYLLENNRMVNIFTDLYYLTFVQELNKSLSTWQPTLLPNNTVFSRVEEEHLWECKQLGVYSPFVLLNTLMFFNTKFFGLQTAEEHMQLSFTNVVRQSRKCTTPRGTTKVVSIRYYAPVRQRKGRDTGPGKRKREDEAPILEQRENRMNPLRCPVKFYEFYLSKCPESLRTRNDVFYLQPERSCIAESPLWYSVIPMDRSMLESMLNRILAVREIYEELGRPGEEDLD

SEQ ID NO: 152766 - protein, 1280 aa, Artificial Sequence
  derived and/or modified sequence
MDPSDFPSPFDPLTLPEKPLAGDLPVDMEFGEDLLESQTAPTRGWAPPGPSPSSGALDLLDTPAGLEKDPGVLDGATELLGLGGLLYKAPSPPEVDHGPEGTLAWDAGDQTLEPGPGGQTPEVVPPDPGAGANSCSPEGLLEPLAPDSPITLQSPHIEEEETTSIATARRGSPGQEEELPQGQPQSPNAPPSPSVGETLGDGINSSQTKPGGSSPPAHPSLPGDGLTAKASEKPPERVQKRSERVRRAEPPKPEVVDSTESIPVSDEDSDAMVDDPNDEDFVPFRPRRSPRMSLRSSVSQRAGRSAVGTKMTCAHCRTPLQKGQTAYQRKGLPQLFCSSSCLTTFSKKPSGKKTCTFCKKEIWNTKDSVVAQTGSGGSFHEFCTSVCLSLYEAQQQRPIPQSGDPADATRCSICQKTGEVLHEVSNGSVVHRLCSDSCFSKFRANKGLKTNCCDQCGAYIYTKTGSPGPELLFHEGQQKRFCNTTCLGAYKKKNTRVYPCVWCKTLCKNFEMLSHVDRNGKTSLFCSLCCTTSYKVKQAGLTGPPRPCSFCRRSLSDPCYYNKVDRTVYQFCSPSCWTKFQRTSPEGGIHLSCHYCHSLFSGKPEVLDWQDQVFQFCCRDCCEDFKRLRGVVSQCEHCRQEKLLHEKLRFSGVEKSFCSEGCVLLYKQDFTKKLGLCCITCTYCSQTCQRGVTEQLDGSTWDFCSEDCKSKYLLWYCKAARCHACKRQGKLLETIHWRGQIRHFCNQQCLLRFYSQQNQPNLDTQSGPESLLNSQSPESKPQTPSQTKVENSNTVRTPEENGNLGKIPVKTRSAPTAPTPPPPPPPATPRKNKAAMCKPLMQNRGVSCKVEMKSKGSQTEEWKPQVIVLPIPVPIFVPVPMHLYCQKVPVPFSMPIPVPVPMFLPTTLESTDKIVETIEELKVKIPSNPLEADILAMAEMIAEAEELDKASSDLCDLVSNQSAEGLLEDCDLFGPARDDVLAMAVKMANVLDEPGQDLEADFPKNPLDINPSVDFLFDCGLVGPEDVSTEQDLPRTMRKGQKRLVLSESCSRDSMSSQPSCTGLNYSYGVNAWKCWVQSKYANGETSKAKPMRIKEDILACSAAELNYGLAQFVREITRPNGERYEPDSIYYLCLGIQQYLLENNRMVNIFTDLYYLTFVQELNKSLSTWQPTLLPNNTGPGKRKREDEAPILEQRENRMNPLRCPVKFYEFYLSKCPESLRTRNDVFYLQPERSCIAESPLWYSVIPMDRSMLESMLNRILAVREIYEELGRPGEEDLD

SEQ ID NO: 152767 - protein, 1372 aa, Artificial Sequence
  derived and/or modified sequence
MDPSDFPSPFDPLTLPEKPLAGDLPVDMEFGEDLLESQTAPTRGWAPPGPSPSSGALDLLDTPAGLEKDPGVLDGATELLGLGGLLYKAPSPPEVDHGPEGTLAWDAGDQTLEPGPGGQTPEVVPPDPGAGANSCSPEGLLEPLAPDSPITLQSPHIEEEETTSIATARRGSPGQEEELPQGQPQSPNAPPSPSVGETLGDGINSSQTKPGGSSPPAHPSLPGDGLTAKASEKPPERVQKRSERVRRAEPPKPEVVDSTESIPVSDEDSDAMVDDPNDEDFVPFRPRRSPRMSLRSSVSQRAGRSAVGTKMTCAHCRTPLQKGQTAYQRKGLPQLFCSSSCLTTFSKKPSGKKTCTFCKKEIWNTKDSVVAQTGSGGSFHEFCTSVCLSLYEAQQQRPIPQSGDPADATRCSICQKTGEVLHEVSNGSVVHRLCSDSCFSKFRANKGLKTNCCDQCGAYIYTKTGSPGPELLFHEGQQKRFCNTTCLGAYKKKNTRVYPCVWCKTLCKNFEMLSHVDRNGKTSLFCSLCCTTSYKVKQAGLTGPPRPCSFCRRSLSDPCYYNKVDRTVYQFCSPSCWTKFQRTSPEGGIHLSCHYCHSLFSGKPEVLDWQDQVFQFCCRDCCEDFKRLRGVVSQCEHCRQEKLLHEKLRFSGVEKSFCSEGCVLLYKQDFTKKLGLCCITCTYCSQTCQRGVTEQLDGSTWDFCSEDCKSKYLLWYCKAARCHACKRQGKLLETIHWRGQIRHFCNQQCLLRFYSQQNQPNLDTQSGPESLLNSQSPESKPQTPSQTKVENSNTVRTPEENGNLGKIPVKTRSAPTAPTPPPPPPPATPRKNKAAMCKPLMQNRGVSCKVEMKSKGSQTEEWKPQVIVLPIPVPIFVPVPMHLYCQKVPVPFSMPIPVPVPMFLPTTLESTDKIVETIEELKVKIPSNPLEADILAMAEMIAEAEELDKASSDLCDLVSNQSAEGLLEDCDLFGPARDDVLAMAVKMANVLDEPGQDLEADFPKNPLDINPSVDFLFDCGLVGPEDVSTEQDLPRTMRKGQKRLVLSESCSRDSMSSQPSCTGLNYSYGVNAWKCWVQSKYANGETSKGDELRFGPKPMRIKEDILACSAAELNYGLAQFVREITRPNGERYEPDSIYYLCLGIQQYLLENNRMVNIFTDLYYLTFVQELNKSLSTWQPTLLPNNTVFSRVEEEHLWECKQLGVYSPFVLLNTLMFFNTKFFGLQTAEEHMQLSFTNVVRQSRKCTTPRGTTKVVSIRYYAPVRQRKGRDTGPGKRKREDEAPILEQRENRMNPLRCPVKFYEFYLSKCPESLRTRNDVFYLQPERSCIAESPLWYSVIPMDRSMLESMLNRILAVREIYEELGRPGEEDLD

SEQ ID NO: 152768 - DNA, 5611 bp, Artificial Sequence
  derived and/or modified sequence
attgaggggggcggacgccgagggggtgaacacgagtgggaagctaagagagacacggggagggggaggggaccgggaaccatttgaatgagaggaggggatcacgggtagagtgggctccaggaggtagggcgagcagggtgtgacgggggccagactcttgagccagtacatatccagccatactcatggaccccagtgatttccccagtccatttgacccattgaccctgccagagaagcccctggctggagacctaccagtagacatggaatttggagaggatctactggaatcccagactgccccaactcgaggatgggccccccctggcccttctccatcctcgggagccctggacctgcttgatacccctgctggcctggaaaaagaccctggagtcctggatggagccactgagttgctggggctgggggggctgctctataaagccccctctcccccggaggtggaccacggtcctgagggaaccctggcatgggatgcaggagatcagaccctagagcctggaccagggggccagacccctgaggtggtaccacctgatccaggggctggggcaaattcctgttcacctgaggggctactagagcctttggctccagattctccaataacactgcagtccccacatattgaagaggaggagaccacctccatagctactgcaagaaggggctcccctgggcaggaggaggagcttccccaagggcagccacagagcccaaatgccccgcctagcccttcagtgggagagactctgggggatggaatcaacagttctcagaccaaacctgggggctctagcccccctgcacatccttccttgccaggagatggcctgactgcgaaggcgagtgagaagccgcctgaacggaagagaagcgagcgcgttaggagagcagaacctccaaaacctgaggttgtagattccactgagagcattccagtgtcagatgaggattctgatgccatggtagatgaccccaatgatgaggactttgtgccattccggccccggcgctctcctcgcatgtccctacgctcaagtgtgtcacaaagggccgggcgctctgcagtgggcaccaagatgacttgtgcacattgccggacaccactgcagaaggggcagactgcctatcagcgcaaggggctgcctcagctcttctgctcgtcatcctgcctcaccactttctccaagaagccctcgggcaaaaagacctgtaccttctgcaagaaggagatctggaacaccaaggactcggttgtggcgcagactggttctggaggctccttccatgagttctgcacatccgtctgtctctccctgtatgaggcccagcagcagcgcccgatcccccagtctggggatcccgccgacgctactcgctgcagcatatgccagaagactggagaggtcctgcacgaggtcagcaatggcagcgtggtacaccggctctgcagcgattcttgcttctccaaattccgggccaacaagggactgaaaaccaactgttgtgaccagtgtggggcttacatctacaccaagaccgggagtcctggccctgagctcctcttccacgagggccaacaaaagcggttctgcaacacaacctgcttgggggcgtacaagaagaaaaacacacgtgtgtacccatgtgtctggtgcaagaccctgtgtaagaactttgagatgctatcacatgtggatcgtaatggcaagaccagcttgttctgttccctgtgctgtaccacttcttacaaagtgaagcaggcagggctcactggccctccccgaccctgcagcttctgccgccgcagcctctctgacccctgttactacaacaaggttgaccgcacagtctaccagttctgcagccccagctgctggaccaagttccagcgcacaagccctgaggggggcattcacctgagctgtcactactgtcacagcctcttcagtggcaagcctgaggtcttggactggcaggaccaagtgttccagttctgctgccgtgattgctgtgaggacttcaagcggcttcggggtgtggtgtcccagtgtgagcactgtcggcaggagaaactcttgcatgagaaactccgattcagcggagtggagaaaagcttctgcagcgaaggctgtgtgctgctgtacaaacaggacttcactaagaagctgggcttgtgctgtatcacttgtacttactgctcccagacctgccagcgcggagtcaccgagcaactggatggcagcacctgggacttctgcagtgaggactgtaagagcaagtacctgctgtggtactgcaaggctgcccggtgccatgcgtgtaagcgccaggggaagctgctggagaccatccactggcgtgggcagatccgtcatttctgcaaccagcagtgtcttctgcgtttctatagccagcagaaccaacccaacctggatacccagagtgggcccgagagcctcctgaacagtcagtctcctgagtcaaaaccccagacaccctctcaaaccaaagtggagaacagcaacacagtgaggaccccagaggaaaatgggaatttgggcaagatccctgtgaagacccgatcagctcccactgctcccacccctccacccccaccacccccagcaacaccccgcaaaaacaaggctgccatgtgtaagccactgatgcagaatcggggcgtctcctgcaaggtggagatgaagtccaaaggaagtcaaacagaagagtggaagccacaggtgatcgtgctgcccatcccagtgcccatcttcgtgccagtgcctatgcatctgtactgccagaaagtcccggtgcctttctcgatgcctatcccggtgcctgtgcccatgttcttgcccactaccttggagagcacagacaagattgtagagaccattgaggagctgaaggtgaagatcccttccaaccccttggaggccgacatcctggctatggcagaaatgattgcagaggctgaggagttagacaaggcctcatctgacctttgtgatcttgtgagcaaccagagtgcagagggactcctggaagactgtgacctgtttgggcctgctcgagatgatgtcctggccatggcagtcaagatggccaatgtcttggatgagcctgggcaagacttggaggcagacttccctaagaatcctctggacattaatcccagtgtagacttcctctttgattgtggcctggtagggcctgaggatgtgtctactgaacaagaccttccccgaaccatgaggaagggtcaaaagcggctggtgctttccgaaagctgctcccgggactccatgagcagtcagcctagttgtaccgggctcaactattcatatggtgtcaatgcttggaagtgctgggtgcagtcaaaatatgccaatggagaaaccagcaagggtgatgagctgcgctttggccccaaacccatgcgtatcaaagaggatattctcgcctgctcagctgctgagctcaactacggtctggcccagtttgtgagagaaatcactcggcccaatggtgaacgatatgaacctgacagtatctactatttgtgtcttggcatccagcagtacttgctggaaaataaccggatggtgaacattttcacggacctttactacctgacttttgttcaagaactcaacaagtctctgagtacctggcagcccacactcctccccaacaatacggtgttctctcgagtggaggaggagcacctctgggagtgtaagcaactgggggtctactcgccctttgtcctcctcaacaccctcatgttcttcaacactaagttttttgggctgcagacagctgaggaacacatgcaactctccttcaccaatgtggtgcggcagtcccgcaagtgtaccacccctcggggcaccaccaaggtggtgagcatccgctactatgccccagtccgccagaggaaagggcgagacacgggtcctggaaaacggaagagagaagatgaagcccctatcttagagcagcgtgagaaccgcatgaatcccctccgctgccctgtcaagttctatgaattctatctctcaaaatgtcctgaaagcctccggactcgcaacgatgtgttctacctgcaacctgaacggtcctgcatcgccgagtcacctctctggtattctgtgatccccatggaccgcagcatgttggagagcatgctcaatcgcatcctggctgtgcgcgagatttatgaggaactgggtcgtcctggggaggaagacctggactgagctcgtgtgccatccatatccatctttcacatcaatgtctgtcctgtggccatgtccctcagggtgacaggcccaggaaccaatgctactcattctgaagggccctgactgctcctttccgctcacccattccctgccttctctaggaaccctggcttttatcttcttccgtaccacttgacaaccatggggccctggtcttctgtactcaggggctggtctcccagtgatgggcaaaagccagcttgcccgttttctttatgcttcagagtaaacccctccttctgggtccagactctgggtggagtgttaatagctctggtgatcctgttggctttgggtttcctgacccatcccgcataggtagagcctcttgttcctaggcatgacctagggaaaaacccagctgccttctctgccctgtgcccactcccttctctactcttccccagcaccatgccaaaaggtcttatctgaaaggtaagaaataaacaatgaaagcgatgaggggaccatttacataaaacacagagcttagacactcttcccctcctatgaaataattggttgttggcaccatctcaccaccgcatatccctcaccccctcggcaagcaccaatccttggtgctgccgtttttaaaatcttccaaatgcctttttttcctcagaggcagagaatgactaagtacggggagcagactcctgttgtgcagactcctgtccccttggtttctgtgtttgtctctctgccatcttaggttgccatgagccatggtgtcaacatgcttagccccctctgtaactgcctccctttagttcaatggacagacctcccaaggcaaaaactaccttctgacttgggttgaggctgggttcccctctattgttcccctatcataagagctaggccaagcctatgggaccttgagtcatgcaggatgggatctgtggtcaaaggacaggcgaggagctgtgggcgcagggcctgccgccactgcctacatcttctctcttccccatcttgcattggaggtcccagaaaacaattagcttctggcaaagggggtacccacttctttccctgttgactttgctgtttcccaggctcctttttgtgtttttataactgtcaccagttagccactgtttaaattgtatatattgttctgaggcgcctggcctgtcccttcagtgagccatgcccacccttgtgttgtagtgagaagctgttgtcacgactaaccttctgtctctgaaattgtttgtttcaaataaagagttaaaattgtcaaaaaaaaaaaaaaaaaa

SEQ ID NO: 152769 - DNA, 4113 bp, Artificial Sequence
  derived and/or modified sequence
atggaccccagcgacttccccagccccttcgaccccctgaccctgcccgagaagcccctggccggcgacctgcccgtggacatggagttcggcgaggacctgctggagagccagaccgcccccaccagaggctgggccccccccggccccagccccagcagcggcgccctggacctgctggacacccccgccggcctggagaaggaccccggcgtgctggacggcgccaccgagctgctgggcctgggcggcctgctgtacaaggcccccagcccccccgaggtggaccacggccccgagggcaccctggcctgggacgccggcgaccagaccctggagcccggccccggcggccagacccccgaggtggtgccccccgaccccggcgccggcgccaacagctgcagccccgagggcctgctggagcccctggcccccgacagccccatcaccctgcagagcccccacatcgaggaggaggagaccaccagcatcgccaccgccagaagaggcagccccggccaggaggaggagctgccccagggccagccccagagccccaacgccccccccagccccagcgtgggcgagaccctgggcgacggcatcaacagcagccagaccaagcccggcggcagcagcccccccgcccaccccagcctgcccggcgacggcctgaccgccaaggccagcgagaagccccccgagagaaagagaagcgagagagtgagaagagccgagccccccaagcccgaggtggtggacagcaccgagagcatccccgtgagcgacgaggacagcgacgccatggtggacgaccccaacgacgaggacttcgtgcccttcagacccagaagaagccccagaatgagcctgagaagcagcgtgagccagagagccggcagaagcgccgtgggcaccaagatgacctgcgcccactgcagaacccccctgcagaagggccagaccgcctaccagagaaagggcctgccccagctgttctgcagcagcagctgcctgaccaccttcagcaagaagcccagcggcaagaagacctgcaccttctgcaagaaggagatctggaacaccaaggacagcgtggtggcccagaccggcagcggcggcagcttccacgagttctgcaccagcgtgtgcctgagcctgtacgaggcccagcagcagagacccatcccccagagcggcgaccccgccgacgccaccagatgcagcatctgccagaagaccggcgaggtgctgcacgaggtgagcaacggcagcgtggtgcacagactgtgcagcgacagctgcttcagcaagttcagagccaacaagggcctgaagaccaactgctgcgaccagtgcggcgcctacatctacaccaagaccggcagccccggccccgagctgctgttccacgagggccagcagaagagattctgcaacaccacctgcctgggcgcctacaagaagaagaacaccagagtgtacccctgcgtgtggtgcaagaccctgtgcaagaacttcgagatgctgagccacgtggacagaaacggcaagaccagcctgttctgcagcctgtgctgcaccaccagctacaaggtgaagcaggccggcctgaccggcccccccagaccctgcagcttctgcagaagaagcctgagcgacccctgctactacaacaaggtggacagaaccgtgtaccagttctgcagccccagctgctggaccaagttccagagaaccagccccgagggcggcatccacctgagctgccactactgccacagcctgttcagcggcaagcccgaggtgctggactggcaggaccaggtgttccagttctgctgcagagactgctgcgaggacttcaagagactgagaggcgtggtgagccagtgcgagcactgcagacaggagaagctgctgcacgagaagctgagattcagcggcgtggagaagagcttctgcagcgagggctgcgtgctgctgtacaagcaggacttcaccaagaagctgggcctgtgctgcatcacctgcacctactgcagccagacctgccagagaggcgtgaccgagcagctggacggcagcacctgggacttctgcagcgaggactgcaagagcaagtacctgctgtggtactgcaaggccgccagatgccacgcctgcaagagacagggcaagctgctggagaccatccactggagaggccagatcagacacttctgcaaccagcagtgcctgctgagattctacagccagcagaaccagcccaacctggacacccagagcggccccgagagcctgctgaacagccagagccccgagagcaagccccagacccccagccagaccaaggtggagaacagcaacaccgtgagaacccccgaggagaacggcaacctgggcaagatccccgtgaagaccagaagcgcccccaccgcccccacccccccccccccccccccccccgccacccccagaaagaacaaggccgccatgtgcaagcccctgatgcagaacagaggcgtgagctgcaaggtggagatgaagagcaagggcagccagaccgaggagtggaagccccaggtgatcgtgctgcccatccccgtgcccatcttcgtgcccgtgcccatgcacctgtactgccagaaggtgcccgtgcccttcagcatgcccatccccgtgcccgtgcccatgttcctgcccaccaccctggagagcaccgacaagatcgtggagaccatcgaggagctgaaggtgaagatccccagcaaccccctggaggccgacatcctggccatggccgagatgatcgccgaggccgaggagctggacaaggccagcagcgacctgtgcgacctggtgagcaaccagagcgccgagggcctgctggaggactgcgacctgttcggccccgccagagacgacgtgctggccatggccgtgaagatggccaacgtgctggacgagcccggccaggacctggaggccgacttccccaagaaccccctggacatcaaccccagcgtggacttcctgttcgactgcggcctggtgggccccgaggacgtgagcaccgagcaggacctgcccagaaccatgagaaagggccagaagagactggtgctgagcgagagctgcagcagagacagcatgagcagccagcccagctgcaccggcctgaactacagctacggcgtgaacgcctggaagtgctgggtgcagagcaagtacgccaacggcgagaccagcaagggcgacgagctgagattcggccccaagcccatgagaatcaaggaggacatcctggcctgcagcgccgccgagctgaactacggcctggcccagttcgtgagagagatcaccagacccaacggcgagagatacgagcccgacagcatctactacctgtgcctgggcatccagcagtacctgctggagaacaacagaatggtgaacatcttcaccgacctgtactacctgaccttcgtgcaggagctgaacaagagcctgagcacctggcagcccaccctgctgcccaacaacaccgtgttcagcagagtggaggaggagcacctgtgggagtgcaagcagctgggcgtgtacagccccttcgtgctgctgaacaccctgatgttcttcaacaccaagttcttcggcctgcagaccgccgaggagcacatgcagctgagcttcaccaacgtggtgagacagagcagaaagtgcaccacccccagaggcaccaccaaggtggtgagcatcagatactacgcccccgtgagacagagaaagggcagagacaccggccccggcaagagaaagagagaggacgaggcccccatcctggagcagagagagaacagaatgaaccccctgagatgccccgtgaagttctacgagttctacctgagcaagtgccccgagagcctgagaaccagaaacgacgtgttctacctgcagcccgagagaagctgcatcgccgagagccccctgtggtacagcgtgatccccatggacagaagcatgctggagagcatgctgaacagaatcctggccgtgagagagatctacgaggagctgggcagacccggcgaggaggacctggactag

SEQ ID NO: 152770 - DNA, 3843 bp, Artificial Sequence
  derived and/or modified sequence
atggaccccagcgacttccccagccccttcgaccccctgaccctgcccgagaagcccctggccggcgacctgcccgtggacatggagttcggcgaggacctgctggagagccagaccgcccccaccagaggctgggccccccccggccccagccccagcagcggcgccctggacctgctggacacccccgccggcctggagaaggaccccggcgtgctggacggcgccaccgagctgctgggcctgggcggcctgctgtacaaggcccccagcccccccgaggtggaccacggccccgagggcaccctggcctgggacgccggcgaccagaccctggagcccggccccggcggccagacccccgaggtggtgccccccgaccccggcgccggcgccaacagctgcagccccgagggcctgctggagcccctggcccccgacagccccatcaccctgcagagcccccacatcgaggaggaggagaccaccagcatcgccaccgccagaagaggcagccccggccaggaggaggagctgccccagggccagccccagagccccaacgccccccccagccccagcgtgggcgagaccctgggcgacggcatcaacagcagccagaccaagcccggcggcagcagcccccccgcccaccccagcctgcccggcgacggcctgaccgccaaggccagcgagaagccccccgagagagtgcagaagagaagcgagagagtgagaagagccgagccccccaagcccgaggtggtggacagcaccgagagcatccccgtgagcgacgaggacagcgacgccatggtggacgaccccaacgacgaggacttcgtgcccttcagacccagaagaagccccagaatgagcctgagaagcagcgtgagccagagagccggcagaagcgccgtgggcaccaagatgacctgcgcccactgcagaacccccctgcagaagggccagaccgcctaccagagaaagggcctgccccagctgttctgcagcagcagctgcctgaccaccttcagcaagaagcccagcggcaagaagacctgcaccttctgcaagaaggagatctggaacaccaaggacagcgtggtggcccagaccggcagcggcggcagcttccacgagttctgcaccagcgtgtgcctgagcctgtacgaggcccagcagcagagacccatcccccagagcggcgaccccgccgacgccaccagatgcagcatctgccagaagaccggcgaggtgctgcacgaggtgagcaacggcagcgtggtgcacagactgtgcagcgacagctgcttcagcaagttcagagccaacaagggcctgaagaccaactgctgcgaccagtgcggcgcctacatctacaccaagaccggcagccccggccccgagctgctgttccacgagggccagcagaagagattctgcaacaccacctgcctgggcgcctacaagaagaagaacaccagagtgtacccctgcgtgtggtgcaagaccctgtgcaagaacttcgagatgctgagccacgtggacagaaacggcaagaccagcctgttctgcagcctgtgctgcaccaccagctacaaggtgaagcaggccggcctgaccggcccccccagaccctgcagcttctgcagaagaagcctgagcgacccctgctactacaacaaggtggacagaaccgtgtaccagttctgcagccccagctgctggaccaagttccagagaaccagccccgagggcggcatccacctgagctgccactactgccacagcctgttcagcggcaagcccgaggtgctggactggcaggaccaggtgttccagttctgctgcagagactgctgcgaggacttcaagagactgagaggcgtggtgagccagtgcgagcactgcagacaggagaagctgctgcacgagaagctgagattcagcggcgtggagaagagcttctgcagcgagggctgcgtgctgctgtacaagcaggacttcaccaagaagctgggcctgtgctgcatcacctgcacctactgcagccagacctgccagagaggcgtgaccgagcagctggacggcagcacctgggacttctgcagcgaggactgcaagagcaagtacctgctgtggtactgcaaggccgccagatgccacgcctgcaagagacagggcaagctgctggagaccatccactggagaggccagatcagacacttctgcaaccagcagtgcctgctgagattctacagccagcagaaccagcccaacctggacacccagagcggccccgagagcctgctgaacagccagagccccgagagcaagccccagacccccagccagaccaaggtggagaacagcaacaccgtgagaacccccgaggagaacggcaacctgggcaagatccccgtgaagaccagaagcgcccccaccgcccccacccccccccccccccccccccccgccacccccagaaagaacaaggccgccatgtgcaagcccctgatgcagaacagaggcgtgagctgcaaggtggagatgaagagcaagggcagccagaccgaggagtggaagccccaggtgatcgtgctgcccatccccgtgcccatcttcgtgcccgtgcccatgcacctgtactgccagaaggtgcccgtgcccttcagcatgcccatccccgtgcccgtgcccatgttcctgcccaccaccctggagagcaccgacaagatcgtggagaccatcgaggagctgaaggtgaagatccccagcaaccccctggaggccgacatcctggccatggccgagatgatcgccgaggccgaggagctggacaaggccagcagcgacctgtgcgacctggtgagcaaccagagcgccgagggcctgctggaggactgcgacctgttcggccccgccagagacgacgtgctggccatggccgtgaagatggccaacgtgctggacgagcccggccaggacctggaggccgacttccccaagaaccccctggacatcaaccccagcgtggacttcctgttcgactgcggcctggtgggccccgaggacgtgagcaccgagcaggacctgcccagaaccatgagaaagggccagaagagactggtgctgagcgagagctgcagcagagacagcatgagcagccagcccagctgcaccggcctgaactacagctacggcgtgaacgcctggaagtgctgggtgcagagcaagtacgccaacggcgagaccagcaaggccaagcccatgagaatcaaggaggacatcctggcctgcagcgccgccgagctgaactacggcctggcccagttcgtgagagagatcaccagacccaacggcgagagatacgagcccgacagcatctactacctgtgcctgggcatccagcagtacctgctggagaacaacagaatggtgaacatcttcaccgacctgtactacctgaccttcgtgcaggagctgaacaagagcctgagcacctggcagcccaccctgctgcccaacaacaccggccccggcaagagaaagagagaggacgaggcccccatcctggagcagagagagaacagaatgaaccccctgagatgccccgtgaagttctacgagttctacctgagcaagtgccccgagagcctgagaaccagaaacgacgtgttctacctgcagcccgagagaagctgcatcgccgagagccccctgtggtacagcgtgatccccatggacagaagcatgctggagagcatgctgaacagaatcctggccgtgagagagatctacgaggagctgggcagacccggcgaggaggacctggactag

SEQ ID NO: 152771 - DNA, 4119 bp, Artificial Sequence
  derived and/or modified sequence
atggaccccagcgacttccccagccccttcgaccccctgaccctgcccgagaagcccctggccggcgacctgcccgtggacatggagttcggcgaggacctgctggagagccagaccgcccccaccagaggctgggccccccccggccccagccccagcagcggcgccctggacctgctggacacccccgccggcctggagaaggaccccggcgtgctggacggcgccaccgagctgctgggcctgggcggcctgctgtacaaggcccccagcccccccgaggtggaccacggccccgagggcaccctggcctgggacgccggcgaccagaccctggagcccggccccggcggccagacccccgaggtggtgccccccgaccccggcgccggcgccaacagctgcagccccgagggcctgctggagcccctggcccccgacagccccatcaccctgcagagcccccacatcgaggaggaggagaccaccagcatcgccaccgccagaagaggcagccccggccaggaggaggagctgccccagggccagccccagagccccaacgccccccccagccccagcgtgggcgagaccctgggcgacggcatcaacagcagccagaccaagcccggcggcagcagcccccccgcccaccccagcctgcccggcgacggcctgaccgccaaggccagcgagaagccccccgagagagtgcagaagagaagcgagagagtgagaagagccgagccccccaagcccgaggtggtggacagcaccgagagcatccccgtgagcgacgaggacagcgacgccatggtggacgaccccaacgacgaggacttcgtgcccttcagacccagaagaagccccagaatgagcctgagaagcagcgtgagccagagagccggcagaagcgccgtgggcaccaagatgacctgcgcccactgcagaacccccctgcagaagggccagaccgcctaccagagaaagggcctgccccagctgttctgcagcagcagctgcctgaccaccttcagcaagaagcccagcggcaagaagacctgcaccttctgcaagaaggagatctggaacaccaaggacagcgtggtggcccagaccggcagcggcggcagcttccacgagttctgcaccagcgtgtgcctgagcctgtacgaggcccagcagcagagacccatcccccagagcggcgaccccgccgacgccaccagatgcagcatctgccagaagaccggcgaggtgctgcacgaggtgagcaacggcagcgtggtgcacagactgtgcagcgacagctgcttcagcaagttcagagccaacaagggcctgaagaccaactgctgcgaccagtgcggcgcctacatctacaccaagaccggcagccccggccccgagctgctgttccacgagggccagcagaagagattctgcaacaccacctgcctgggcgcctacaagaagaagaacaccagagtgtacccctgcgtgtggtgcaagaccctgtgcaagaacttcgagatgctgagccacgtggacagaaacggcaagaccagcctgttctgcagcctgtgctgcaccaccagctacaaggtgaagcaggccggcctgaccggcccccccagaccctgcagcttctgcagaagaagcctgagcgacccctgctactacaacaaggtggacagaaccgtgtaccagttctgcagccccagctgctggaccaagttccagagaaccagccccgagggcggcatccacctgagctgccactactgccacagcctgttcagcggcaagcccgaggtgctggactggcaggaccaggtgttccagttctgctgcagagactgctgcgaggacttcaagagactgagaggcgtggtgagccagtgcgagcactgcagacaggagaagctgctgcacgagaagctgagattcagcggcgtggagaagagcttctgcagcgagggctgcgtgctgctgtacaagcaggacttcaccaagaagctgggcctgtgctgcatcacctgcacctactgcagccagacctgccagagaggcgtgaccgagcagctggacggcagcacctgggacttctgcagcgaggactgcaagagcaagtacctgctgtggtactgcaaggccgccagatgccacgcctgcaagagacagggcaagctgctggagaccatccactggagaggccagatcagacacttctgcaaccagcagtgcctgctgagattctacagccagcagaaccagcccaacctggacacccagagcggccccgagagcctgctgaacagccagagccccgagagcaagccccagacccccagccagaccaaggtggagaacagcaacaccgtgagaacccccgaggagaacggcaacctgggcaagatccccgtgaagaccagaagcgcccccaccgcccccacccccccccccccccccccccccgccacccccagaaagaacaaggccgccatgtgcaagcccctgatgcagaacagaggcgtgagctgcaaggtggagatgaagagcaagggcagccagaccgaggagtggaagccccaggtgatcgtgctgcccatccccgtgcccatcttcgtgcccgtgcccatgcacctgtactgccagaaggtgcccgtgcccttcagcatgcccatccccgtgcccgtgcccatgttcctgcccaccaccctggagagcaccgacaagatcgtggagaccatcgaggagctgaaggtgaagatccccagcaaccccctggaggccgacatcctggccatggccgagatgatcgccgaggccgaggagctggacaaggccagcagcgacctgtgcgacctggtgagcaaccagagcgccgagggcctgctggaggactgcgacctgttcggccccgccagagacgacgtgctggccatggccgtgaagatggccaacgtgctggacgagcccggccaggacctggaggccgacttccccaagaaccccctggacatcaaccccagcgtggacttcctgttcgactgcggcctggtgggccccgaggacgtgagcaccgagcaggacctgcccagaaccatgagaaagggccagaagagactggtgctgagcgagagctgcagcagagacagcatgagcagccagcccagctgcaccggcctgaactacagctacggcgtgaacgcctggaagtgctgggtgcagagcaagtacgccaacggcgagaccagcaagggcgacgagctgagattcggccccaagcccatgagaatcaaggaggacatcctggcctgcagcgccgccgagctgaactacggcctggcccagttcgtgagagagatcaccagacccaacggcgagagatacgagcccgacagcatctactacctgtgcctgggcatccagcagtacctgctggagaacaacagaatggtgaacatcttcaccgacctgtactacctgaccttcgtgcaggagctgaacaagagcctgagcacctggcagcccaccctgctgcccaacaacaccgtgttcagcagagtggaggaggagcacctgtgggagtgcaagcagctgggcgtgtacagccccttcgtgctgctgaacaccctgatgttcttcaacaccaagttcttcggcctgcagaccgccgaggagcacatgcagctgagcttcaccaacgtggtgagacagagcagaaagtgcaccacccccagaggcaccaccaaggtggtgagcatcagatactacgcccccgtgagacagagaaagggcagagacaccggccccggcaagagaaagagagaggacgaggcccccatcctggagcagagagagaacagaatgaaccccctgagatgccccgtgaagttctacgagttctacctgagcaagtgccccgagagcctgagaaccagaaacgacgtgttctacctgcagcccgagagaagctgcatcgccgagagccccctgtggtacagcgtgatccccatggacagaagcatgctggagagcatgctgaacagaatcctggccgtgagagagatctacgaggagctgggcagacccggcgaggaggacctggactag

SEQ ID NO: 152772 - DNA, 4113 bp, Artificial Sequence
  derived and/or modified sequence
atggatccgagtgatttcccctcacccttcgaccccctcacattacctgaaaaacctctggcaggggatctacctgtggatatggaatttggagaggacctcctagaaagccagacggccccaacgcgcgggtgggccccaccaggtccaagtccctcatcaggagctttagacctacttgatactcctgcaggactagagaaagatcccggggttttggatggagctaccgaactcctcgggctgggcggtctactgtacaaagctccaagtccacctgaggtcgatcacggtccagaaggaacacttgcttgggatgcaggggatcagacattggaacccgggccaggtggacagacgcctgaggtggtacccccggaccctggagccggagctaattcttgctcaccggaggggctactggaaccgcttgcccctgactctcctatcacactgcagtctccccacatcgaggaagaagaaactacctccatcgccactgcaagaaggggttcccctgggcaggaggaggaactcccccagggtcagcctcaatccccaaacgcccccccatctccttctgtcggagaaaccctcggcgatggcattaattctagtcagactaagcctggcggatccagcccccccgcccacccaagtcttcctggggacggtttgacggcgaaggcatctgagaaacctccagagcgcaagcggtcagaacgggtccgcagagctgagcccccaaaacccgaggtagtcgactccacggagtccatacccgtgtcagatgaagactcagatgccatggtcgatgaccctaatgacgaggacttcgttccatttagacccaggaggtctccccggatgtcattgcgatcgtccgtatcacaacgcgctggcaggtctgcagtggggacaaaaatgacctgcgcgcactgtagaacccctctgcagaagggacaaacagcttatcaacgaaaggggcttcctcaacttttctgtagcagctcttgcttgacgacattcagcaagaaaccctctggaaaaaaaacgtgcacattctgtaagaaggagatctggaacactaaggacagcgtggtggctcagaccggttctgggggctcctttcacgaattttgtacttcagtgtgcctctccttgtatgaagcgcaacaacaacgacctatcccccagagcggagaccccgcggatgccacccgctgctcaatttgtcaaaagactggggaagtcctgcacgaggtatcaaacgggtcagtggtgcaccgcctatgttccgactcatgctttagtaaatttcgggctaataagggccttaaaacgaattgttgtgaccagtgtggcgcctatatctataccaagactggctccccaggcccagagctgctgtttcatgaaggtcaacagaaacgcttttgcaatactacatgccttggagcgtataagaaaaaaaacacacgggtatatccttgcgtctggtgtaaaaccctttgtaaaaacttcgaaatgctttctcatgtagatcgcaacggcaaaacaagcctcttctgctctctgtgctgtacaaccagctataaagtgaagcaggcggggctgaccggtcctccgaggccttgtagcttctgccggaggagtctgtccgatccctgctactacaacaaggtggatcggacagtgtaccagttttgcagcccctcttgctggactaaattccagagaaccagccctgagggggggattcacctgtcatgtcattattgccactcactcttcagcggaaaacctgaggtcctcgactggcaagaccaggtgtttcaattttgctgtcgggactgctgcgaagatttcaaaaggctgaggggggtggtgtctcaatgcgagcactgcagacaggagaagctgcttcacgaaaaattgaggttctctggcgtcgagaaaagcttttgcagcgaaggttgtgtgctgctctacaagcaggactttacgaagaaactgggcctgtgttgcatcacttgtacttattgctctcagacgtgccaacggggagtcacagaacaactcgacgggagtacctgggacttctgcagcgaagactgcaagtctaaatacctgctgtggtactgtaaggcggcccgttgtcatgcttgtaagagacagggcaaactcttagagacaattcactggcgcgggcagattcgccacttttgtaaccagcagtgcttactgcgcttttacagccagcaaaaccaaccaaacctggatactcaaagcggtcctgaatccctgctaaacagccaatcgccggagagcaagccacagacaccgtctcagaccaaagttgagaacagtaatacagtgagaacccctgaggaaaacggaaacctaggcaagatccccgtaaaaacccgatcagcccctacagcccctacacctccgcctccccctcccccagccaccccaaggaagaacaaagccgccatgtgtaaaccacttatgcaaaacagaggcgtgtcctgtaaggtggagatgaaatctaagggtagccaaacagaggaatggaaaccccaagtgatagtcctgcctataccagtacctatcttcgtgcctgtcccgatgcacctgtactgtcaaaaagttcccgttcctttctcaatgcctattccagtgccggttcccatgttccttccgacgacgttggagtctacagataagatcgtggagacaattgaggaactgaaggtgaaaattcctagtaacccgctggaggccgacattctggctatggccgagatgattgcggaggctgaagaactcgataaggcaagttccgacttgtgcgatctcgtgtctaatcagtccgccgaaggcctcctcgaagactgtgatctcttcgggccagcccgagacgacgtcctggccatggcagtgaaaatggctaacgtcttagatgagcccgggcaagatctggaagcggacttcccgaagaatcccctggacataaatccatccgttgatttcctgtttgattgcggcctcgtgggcccagaagatgtgagcaccgaacaggatctgcctcgcaccatgcgcaaagggcaaaaaagactcgtcctaagcgagagttgctctagagacagtatgtcctcccagccctcttgtactggattgaattacagctacggcgtgaacgcttggaagtgctgggtgcagagcaagtatgcaaatggcgagactagcaaaggagatgaactgcggtttggccccaagccaatgaggattaaggaggacatcctagcatgctcagctgctgagctcaactacggcctcgcgcagttcgtgagagaaatcactaggcctaacggcgaacgatatgagcccgactccatttattacttatgcctcggtatacaacagtacctactggagaataatagaatggttaatatcttcacagacctatattaccttacattcgtgcaggagctcaacaaatcactatcaacgtggcagccgactctcctgcctaacaacacggtgttctctagagtggaagaggagcacctgtgggaatgcaaacagcttggtgtctactcaccttttgtcctgctaaacaccctgatgtttttcaataccaagtttttcgggcttcaaaccgcagaggagcacatgcagttatctttcacaaatgtcgtgagacagagcaggaaatgtaccacccccaggggcacaaccaaagttgtgtcaatccgatactatgcaccggtgcggcagcgaaaaggtcgggataccggtccaggaaaacgcaagcgcgaagatgaggcccccattttggaacagagagaaaatagaatgaaccccctgagatgtcccgttaaattttacgaattctacttgagcaagtgtccggagtcgctccgcactcggaatgacgtattctacttacaaccagagagatcttgtatcgcggagagtccattgtggtatagcgtgatcccaatggacagaagtatgcttgagtccatgcttaatagaatcttggcagtcagggagatttatgaagagttgggtaggcccggggaagaagacctggattag

SEQ ID NO: 152773 - DNA, 4113 bp, Artificial Sequence
  derived and/or modified sequence
atggacccaagcgactttccttctccattcgaccctctgactttgcctgagaagcctctcgctggcgatttacccgtggacatggagttcggggaagacctgctagaaagtcagacagcgccgaccaggggatgggctcctcccggcccgagtccctctagtggtgccctggacctactcgatacccccgctgggctcgagaaggaccctggggtgctagacggcgctactgaactgctgggtctcggcggattgctgtacaaagccccttccccacctgaggtagaccacggtcccgaaggcactttggcctgggatgccggcgaccagacactggagcccggtcccggcggccagactccagaggtggtgccgccagatcctggagccggcgcaaactcgtgttctcccgaaggactgcttgagcccctggcccctgattcacccatcaccctccagtctcctcacattgaggaggaggagacgacctcaattgccaccgccaggaggggtagccctggacaggaagaagagcttcctcagggccagccacagtcccccaacgctccgccatctccttctgttggtgagactctgggggacggcattaatagttcccagaccaagcctgggggatccagtccaccagctcaccctagcctgccaggcgacgggttaacagcaaaggcgtctgagaagcccccagaaaggaaaaggtccgagcgcgtgaggcgcgccgagcctcccaaacctgaagtggtggattccaccgagtccattccagtcagcgatgaggattcagatgctatggtggatgatcctaacgatgaggatttcgtgcctttccggcccaggcgcagtccccgaatgagcctgaggagcagcgtgtcacagcgagctggtagatcagccgtgggcaccaagatgacatgcgctcattgccgcacacctttgcagaaaggccaaacagcctaccagaggaaaggcttaccacaactcttttgttcaagtagttgtcttactacgtttagtaaaaagcccagcggaaagaaaacctgtactttttgtaagaaggagatttggaacacaaaagacagcgttgttgctcagaccgggtctggaggtagcttccatgaattttgtacttccgtctgcctgtcactttacgaggcgcagcaacaaagaccaatacctcagtccggagatccagccgacgcaacaagatgctccatctgtcaaaaaaccggagaggtgctccatgaagtgagtaatggttccgttgtgcacaggctctgttctgactcctgtttctctaagtttagggcaaataagggcttgaagactaattgttgcgaccagtgcggtgcctacatctatacaaagactggttcacctggtcctgagctgctctttcacgagggccaacagaagagattttgcaacacgacttgtttgggggcttataagaagaaaaacacgcgcgtgtacccatgtgtctggtgcaagactctctgtaaaaactttgaaatgctctcacatgtggatcgaaacggaaaaacaagcttattttgctccctctgttgtacaacaagttataaggtcaaacaggcaggccttaccgggcccccccgcccctgcagtttttgccgaaggtccttgtctgacccttgttattataataaggttgacagaaccgtgtaccaattctgttcccccagctgttggacaaaattccagagaacatcccccgagggaggcatccacctgtcatgccactactgccattctctattttctgggaagccagaggtcctcgattggcaagatcaggtttttcagttctgttgtcgcgactgctgtgaagatttcaagaggttaaggggtgtggtgtcacagtgtgaacattgtcgccaagaaaaattgttgcacgagaagctgcggttttccggggtggagaaaagcttttgtagcgaggggtgcgtcctgctctacaagcaggactttacgaagaaactgggcctttgttgcatcacctgcacgtactgctctcagacctgtcagcggggtgtaacggagcagctggatggaagcacgtgggacttctgctcagaggattgtaagtcaaaatacctcctatggtattgtaaagctgccagatgccacgcatgcaagaggcagggcaagctactagagactattcattggaggggacaaatccgccatttttgtaaccagcagtgcctactgcggttctattcacagcagaatcagcctaatctggatacccagagcggacctgagagccttctcaatagtcagagccctgagtccaagccacagaccccttcccagaccaaggtggagaactccaatacagttcggacacctgaagagaacggcaatctagggaaaatccctgtaaaaacccgcagtgcgccaaccgctcctacccctcctccccccccccctccggcaacacctagaaaaaataaagcggctatgtgtaaacccctcatgcagaataggggggtgtcctgcaaggtggaaatgaagtcgaagggatcacaaacagaagagtggaaaccccaagttatcgtgctgccaattccagtgcccatcttcgtgcccgtccctatgcacctgtactgccagaaggtaccagtacccttctcaatgccaatccccgtgccagtgccaatgttcctgccaactactctggaatccactgataagatcgtggagaccattgaggagctgaaggtgaagattcctagtaatccactcgaggccgatattcttgctatggctgagatgatagccgaagcggaggaactggataaagctagttccgatctgtgtgatctggtgtccaaccagagcgccgagggcctgctggaagattgcgacctgtttggaccagccagagacgacgtgctcgccatggctgttaaaatggccaacgtgttggacgagcccgggcaagacctcgaagccgactttcctaaaaatccgttggacattaacccatctgtggatttcctgttcgattgcggcctcgtgggtcccgaggacgtgagcactgaacaggatctgccccgcacgatgcggaagggacaaaaacgattggtgctgtccgagtcatgctctagagactcgatgagctcacaaccgagctgtaccggcctcaactactcatatggtgtgaacgcatggaagtgctgggttcaaagtaaatacgcaaacggcgagacttctaaaggggacgagctgcggttcggacccaaacccatgcgaatcaaggaggatatactggcctgcagcgccgccgaattaaattatggcctggctcagtttgtgcgagagattactcgtcctaatggtgaaagatatgaaccagacagtatatattatctgtgccttggtattcaacaatatctgctggaaaacaatagaatggtcaatattttcactgacctttattatctgacgtttgtgcaggagctgaataagtctctgtcaacatggcagcccaccctcctacctaacaacacggtcttttcgcgggtggaggaagagcatctctgggaatgtaagcagctgggggtttactctcctttcgttctgttgaataccctgatgttcttcaacaccaaattctttggtcttcaaaccgctgaggagcacatgcagctgagttttaccaacgttgtcagacagtctagaaaatgtactactccccgagggaccaccaaagtagtgagtattaggtactacgctcccgtcagacagaggaaggggcgagacacaggcccaggtaaaagaaagagagaagacgaggctcctatcctggaacagcgagagaatcggatgaatcctctgcgctgcccagtgaaattttacgagttttacctgagtaaatgccctgagtctttgaggacaaggaatgatgtattttatttgcagcccgagaggtcttgtatagccgaatcacctctttggtactccgtcatccccatggaccgctcgatgctcgagtccatgctaaaccggatcctggctgtcagggaaatctatgaagagctcgggaggccaggagaagaggacctcgattag

SEQ ID NO: 152774 - DNA, 3843 bp, Artificial Sequence
  derived and/or modified sequence
atggatcctagtgactttccctccccgttcgatcctctgaccttgcccgaaaaaccattggccggcgacttgcctgtggacatggagttcggagaagatttgctggagagtcagacggcacccacccgcgggtgggccccccctggtccatcacccagttccggcgctctggacctgctggatacccccgctgggctagagaaagacccgggtgtgctagacggcgccaccgagctgctggggctgggaggattgctgtacaaggctccatccccaccagaggtggatcatgggccagagggaactctggcctgggacgccggggaccaaacgttagaacctgggcctgggggccagaccccagaggtggtaccccccgacccgggcgccggtgcaaactcatgcagccctgagggtctgctggaacccttggcacctgattccccaatcaccctgcagtctccccatatcgaagaagaggagactaccagcattgcgacagcacgaagggggtccccaggccaggaggaggaactaccacagggccaacctcagtctccaaatgccccaccctcacccagcgtgggtgaaaccttaggcgatggaatcaacagttcccaaactaagcctggcggatcttccccccctgcccatccgtccctgccgggcgatggacttaccgcaaaagcaagcgagaaaccccctgagagggtccagaagagaagtgaacgcgtcaggagagcagagccacctaagccagaggttgtggatagcacagaatcaattcctgtgtctgacgaggactcagacgctatggttgatgatccgaacgacgaggacttcgtgcctttccgtcccaggaggagccctcgtatgagcctccgctcttccgtgagccagcgggctgggaggagcgcagtgggaaccaagatgacatgcgcacactgtagaaccccgttgcagaagggccaaacagcctatcaaaggaaagggctgccccaactcttctgttcttctagctgccttactacatttagtaagaagccctccggaaagaaaacctgcacgttctgtaagaaggagatctggaacaccaaagactctgtcgtggcccagacggggtccggcggctcattccatgagttctgcacatccgtatgcctgtccctctacgaggcgcagcagcagagacccataccccagagcggggaccctgctgacgccacccgctgcagcatttgccagaagaccggggaagttctacacgaggtgagtaatggatcagtcgtgcacagactttgcagtgactcttgcttttcaaaatttcgcgccaataagggcttaaagactaactgttgtgaccagtgtggagcgtacatttacaccaagacggggtctccaggtcccgaactgttattccacgagggccagcagaagcgtttttgtaacactacctgcctgggggcatacaagaagaaaaacactcgggtgtatccttgcgtctggtgcaaaacactgtgcaagaacttcgagatgctgagccacgtggatcgtaacgggaaaacctccctgttctgttccctgtgttgcaccacaagctacaaggtgaagcaagccggcctgaccggtccaccccgcccatgtagtttctgtcgacgcagcctttctgatccttgctattataacaaggtcgatcggaccgtctaccagttttgcagcccaagctgctggacaaagtttcagcggacttcccctgagggcggcatccacttgtcttgtcactactgtcacagcctcttctcaggcaaacccgaggtattggactggcaggaccaggtctttcagttctgctgcagggactgctgcgaggactttaaacgtctcaggggagtggttagtcagtgcgagcactgccggcaggaaaagctgttacatgagaagcttagatttagtggagtcgaaaagtcgttttgttcggagggttgcgtgctactgtataaacaggattttacaaaaaagttgggcctctgttgcatcacttgcacctattgttctcagacctgtcagcggggcgttacagaacagcttgatggttctacgtgggacttttgtagcgaggattgtaagagcaaatacttactatggtactgcaaagcggccaggtgccatgcttgtaaaagacagggcaaacttctggagacgattcattggcggggccagatcagacacttctgcaatcagcagtgcctactcagattttattcccagcagaaccagcctaatctggatacacaatctggccccgagtctttactaaattcccagtccccggagagcaagccgcagaccccatcacagacgaaggtagaaaactccaacacagtgcgaacccccgaggagaatgggaatttgggcaaaattcccgtgaaaactcggtccgctcccaccgctcccacccccccaccaccccccccgcccgcaacccctagaaagaataaggccgccatgtgcaagccactgatgcagaacaggggcgtatcttgcaaagtggagatgaagtcgaagggttctcagaccgaagaatggaagccacaggtcattgtgttgcccattcctgtaccaatcttcgttcctgttcccatgcatctgtactgccagaaagtacccgttccattttccatgccaatccctgtccccgtacccatgttccttcctactacactggagtccacagacaagatagtggagacaatcgaagagctgaaggtgaaaattccctctaatcccctagaggcagacattctagcaatggctgagatgattgctgaggccgaggaactagataaagccagcagcgatttgtgcgacctcgtgtccaaccagtccgcagagggactgcttgaagactgtgacctcttcggccctgcacgagacgatgtgctggccatggctgtcaagatggccaatgtcctggatgaaccaggccaagacctggaggcagacttcccaaagaatcccctcgatattaatcccagcgtagacttcctgttcgattgtggcctggtggggcctgaagacgtgagcactgagcaggatttaccccggacgatgaggaagggacagaaacggcttgtgttatccgagagttgttccagggatagcatgagttcccagcccagctgtacaggcctgaactactcatatggtgtgaatgcttggaagtgctgggtgcagagcaagtatgccaacggcgaaaccagtaaagcaaagccgatgcggattaaggaggatatcctagcctgctctgccgcagagttgaactatggactcgcacagtttgtgagggagatcacgcgcccaaacggggagcgatacgagcccgacagcatatactatttgtgcctcggtatccagcaatacttactcgagaacaataggatggtaaatatcttcacagacctgtactacctgacatttgtgcaggagctgaataagtcattgtctacctggcagcctaccttgctacccaataacactgggcctggaaagcggaaacgcgaagacgaggccccgatcctcgaacagagggagaaccgaatgaatcctttgcgttgccctgtcaaattctacgagttttacctctccaaatgtccggaaagcctgagaaccagaaacgatgttttctatttgcaacctgagcggtcttgtatcgcggaatcccccctgtggtattcagtgataccaatggatcgctccatgttggagagtatgttgaaccggattttggctgtaagagaaatttacgaggagcttggtcggcccggggaagaggacctggattag

SEQ ID NO: 152775 - DNA, 4119 bp, Artificial Sequence
  derived and/or modified sequence
atggaccccagcgatttcccatccccttttgatcccttaacgttgccagaaaaacccttggcgggggatctgccagtcgatatggagttcggtgaggatctccttgagtctcagactgcccccacccgtggctgggcgcccccagggccatccccaagtagcggtgctttggaccttctggatacacctgctggtctggagaaagacccgggcgtcctagacggcgccaccgagcttctgggcctgggcgggttgctatataaggccccttccccccctgaagtggatcatggtccagagggcacactggcttgggacgcaggcgatcaaaccctggagccaggtcctggaggacagactccggaggtagttcccccggatccgggcgctggcgccaactcgtgctcaccagagggactcctggaacccttagcgccagacagtcctatcacactccagtccccacacattgaggaagaggagactactagcattgctacagcgcgccgcggctcccctggtcaggaagaggaactgccccagggccaacctcagtcaccaaacgccccgcctagcccctctgttggcgaaacacttggcgacggcatcaattcatcacagacgaagcctggcggctcttcgccacctgcacatccaagcctaccaggcgacggcctgacggccaaggcctccgaaaagcccccagaacgtgtccagaaacgctcagagcgggtgagacgggcagagccacctaaaccagaggtggtcgattccaccgagtcaatccccgttagcgacgaagacagtgacgctatggtggacgatcctaatgacgaggactttgtcccctttcggccaaggagatccccacggatgtctctgaggagcagcgtctcccaacgagccggaagatcagctgtcggcaccaaaatgacctgcgctcactgccggaccccattgcaaaagggacagacagcttaccagcgaaaaggccttccacagcttttctgctccagtagctgtctgaccactttttccaaaaaaccatctggaaagaagacttgtactttctgtaagaaggagatttggaacaccaaggacagtgttgtggcccagaccggcagtgggggcagctttcacgagttctgtacatctgtttgtctgtccttgtatgaggcgcagcagcaacgtcccatcccacaatcgggagacccagcagatgctacccggtgtagcatctgccaaaagacgggcgaggtgctgcacgaagtcagtaacggatcagtggtccaccgactgtgctccgactcctgcttttcgaagttcagggctaacaagggtctgaagactaactgctgtgatcaatgtggtgcatatatatacactaaaactggctcccccggtccagagctcctgtttcacgaagggcagcagaaacgattctgcaacacaacctgccttggggcttacaaaaaaaagaacacgagggtttacccctgcgtatggtgcaaaaccctgtgcaaaaactttgaaatgcttagccacgtcgacaggaatggcaagacctccctgttctgcagcctgtgttgcacgacctcctataaggtgaagcaggccggcctgactggaccccccaggccatgttcattctgtcgcagaagcctctcagatccatgctattataacaaggttgaccggactgtttatcagttttgttcgcctagttgttggacgaagtttcaacgtactagtcccgagggaggaatccacctgtcgtgccattactgtcattcattgttttccggcaaacctgaggtgctggactggcaagatcaggttttccaattttgttgcagagactgctgtgaagatttcaaacgcctgcggggagtagtcagtcagtgcgagcattgccgccaggagaaactgcttcacgaaaagttgcgatttagtggtgtcgagaagagcttctgctctgaaggatgtgtgttactctacaaacaggatttcacgaaaaagctgggcttgtgttgcatcacctgtacctattgtagccagacatgccagagaggtgtcaccgaacagctggatgggtctacctgggacttctgtagcgaagattgtaaatcgaaatacctgctgtggtactgtaaggctgccagatgccacgcttgcaagaggcaggggaaactactcgagacaatccactggcgggggcagatccggcatttctgtaatcaacagtgtttgctgagattctactcccaacagaatcaacccaatctggacacccagtctggtcccgagtctctactaaattcacagtctccagaatccaagccccaaaccccgagtcagacaaaggtcgagaactcgaacactgtgagaacccccgaagagaatggcaatctgggaaagatacctgtgaagaccagatctgcaccaaccgcccccacacctccaccgccaccacctcccgctacaccccggaagaacaaagccgctatgtgcaaacctctcatgcaaaatcgaggcgtatcctgcaaggtcgagatgaaaagcaaggggtctcaaaccgaagagtggaagcctcaggttatagttctcccaatccccgtaccgattttcgtgcccgtgcctatgcatttgtattgccagaaagtgccagtgcccttctcgatgcccatccctgtccccgttcctatgttcttgccaactactctagaaagtacagacaagatcgtagagacaatcgaagaactcaaagttaagatccctagcaatccattggaggctgacattttggcaatggccgagatgatcgccgaagcggaggagctggacaaggcctcatccgacttgtgtgatctggtgtctaaccagtccgccgaagggctcctggaggactgcgacctgttcgggccagcacgtgatgatgtgttagccatggcagtgaaaatggcaaacgtcttggatgagccgggccaggatctggaggctgactttcctaagaatccactggatatcaacccttctgtggatttcctcttcgattgtggccttgtaggtcctgaagacgtaagtaccgagcaggatttgcctcgcacgatgaggaagggacagaagcgattggtacttagtgagtcatgctctagggatagcatgtcctcccaaccctcgtgtaccggactgaactattcctacggagttaatgcctggaaatgctgggtccaatccaaatacgccaatggagagaccagcaagggagatgagcttagatttggcccaaagcccatgcgaatcaaagaagatatcctggcatgcagcgcggcggaactgaattacggacttgctcagttcgttagagaaattaccaggccgaatggtgagaggtatgaacccgattcgatttattatctctgtttagggatccagcagtacctgctagaaaataatagaatggtcaacattttcactgacctgtactatctaacatttgtgcaggaactaaacaagtcgttgtctacctggcaacccaccctgctccccaacaataccgtgttctctcgggtggaggaagagcacctgtgggaatgtaagcaactgggtgtttatagccctttcgtgctcctaaacacccttatgttcttcaatacaaagttcttcggccttcaaactgccgaagagcatatgcagctgtcattcactaacgtagtccgtcaaagtaggaaatgtaccaccccacgagggaccactaaggtggtgtccatacgctactacgctcctgtgcgccagcgcaaaggccgggataccggcccaggaaagagaaagagagaagacgaggcgccaatccttgagcagcgggagaatagaatgaacccgctgagatgtcccgtgaaattttatgagttctatctctctaagtgccccgaaagcctccgcacaaggaacgatgtgttctatctgcagccagaaagatcttgcatcgcagagagtccactgtggtatagtgtgattcccatggacagatcaatgctggaatccatgctgaatcgtatcttggctgttcgagagatctatgaagagttggggaggcccggtgaggaagatctggactag

SEQ ID NO: 152776 - DNA, 4113 bp, Artificial Sequence
  derived and/or modified sequence
atggaccccagcgacttccccagcccctttgaccccctgaccctgcctgagaagcccctggccggggacctgcctgtggacatggagtttggagaggacctgctggagagccagacagcccccacccggggctgggcccctcctggccccagccccagcagcggggccctggacctgctggacaccccagctggcctggagaaggaccccggggtgctggatggagccacagagctgctgggcctgggcggcctgctgtacaaggcccccagccccccagaggtggaccacggccctgagggcaccctggcctgggatgctggggaccagaccctggagcccggccctgggggccagaccccagaggtggtgcccccagaccccggggccggggccaacagctgcagccctgagggcctgctggagcccctggccccagacagccccatcaccctgcagagcccccacatcgaggaggaggagaccaccagcatcgccacagcccggcggggcagccctggccaggaggaggagctgccccagggccagccccagagccccaatgccccacccagccccagcgtgggggagaccctgggagatggcatcaacagcagccagaccaagccaggcggcagcagccccccagcccaccccagcctgcctggagatggcctgacagccaaggccagcgagaagcccccagagaggaagaggtctgagcgggtgcggcgggcagagccccccaagccagaggtggtggacagcacagagagcatccctgtgtctgatgaagattctgatgccatggtggatgaccccaatgatgaagattttgtgcccttccggcccaggaggagccccaggatgagcctgcggagctctgtgtcccagagagctggccgctctgctgtgggcaccaagatgacctgtgcccactgcaggacccccctgcagaagggccagacagcctaccagaggaagggcctgccccagctgttctgcagcagcagctgcctgaccaccttcagcaagaagcccagcggcaagaagacctgcaccttctgcaagaaggagatctggaacaccaaggacagcgtggtggcccagacaggcagcggcggcagcttccacgagttctgcacctctgtgtgcctgagcctgtatgaggcccagcagcagaggcccatcccccagagcggggaccctgcagatgccacccgctgcagcatctgccagaagacaggagaggtgctgcacgaggtgtccaatggatctgtggtgcaccggctgtgcagcgacagctgcttcagcaagttccgggccaacaagggcctgaagaccaactgctgtgaccagtgtggggcctacatctacaccaagacaggcagccctggccctgagctgctcttccacgagggccagcagaagcgcttctgcaacaccacctgcctgggcgcctacaagaagaagaacaccagggtgtacccctgtgtgtggtgcaagaccctgtgcaagaactttgagatgctgagccacgtggacagaaatggcaagaccagcctcttctgcagcctgtgctgcaccaccagctacaaggtgaagcaggccggcctgaccggccccccccggccctgcagcttctgccgccgcagcctgagtgacccctgctactacaacaaggtggacagaacagtgtaccagttctgcagccccagctgctggaccaagttccagaggaccagccctgagggcggcatccacctgagctgccactactgccacagcctcttcagcggcaagccagaggtgctggactggcaggaccaggtgttccagttctgctgccgggactgctgtgaggacttcaagaggctgcggggcgtggtgtcccagtgtgagcactgccggcaggagaagctgctgcacgagaagctgcgcttctctggagtggagaagagcttctgcagcgagggctgtgtgctgctgtacaagcaggacttcaccaagaagctgggcctgtgctgcatcacctgcacctactgcagccagacctgccagaggggcgtgacagagcagctggatggcagcacctgggacttctgcagcgaggactgcaagagcaagtacctgctgtggtactgcaaggccgcccgctgccacgcctgcaagaggcagggcaagctgctggagaccatccactggaggggccagatccgccacttctgcaaccagcagtgcctgctgcgcttctacagccagcagaaccagcccaacctggacacccagagcggccctgagagcctgctgaacagccagagccctgagagcaagccccagacccccagccagaccaaggtggagaacagcaacacagtgaggaccccagaggagaatggaaacctgggcaagatccctgtgaagaccaggtctgcccccacagcccccaccccacctcctcctcctcctccagccacccccaggaagaacaaggccgccatgtgcaagcccctgatgcagaacagaggagtgtcctgcaaggtggagatgaagagcaagggcagccagacagaggagtggaagccccaggtgattgtgctgcccatccctgtgcccatctttgtgcctgtgcccatgcacctgtactgccagaaggtgcctgtgcccttctccatgcccatccctgtgcctgtgcccatgttcctgcccaccaccctggagagcacagacaagatcgtggagaccatcgaggagctgaaggtgaagatccccagcaaccccctggaggccgacatcctggccatggccgagatgattgctgaggccgaggagctggacaaggccagcagtgacctgtgtgacctggtgagcaaccagagcgctgagggcctgctggaggactgtgacctgtttggacctgccagagatgatgtgctggccatggctgtgaagatggccaacgtgctggatgagcccggccaggacctggaggccgacttccccaagaaccccctggacatcaaccccagcgtggacttcctgtttgactgtggcctggtgggcccagaagatgtgtccacagagcaggacctgcccaggaccatgaggaagggccagaagaggctggtgctgtctgagagctgcagccgggacagcatgagcagccagcccagctgcaccggcctgaactacagctatggagtgaatgcctggaagtgctgggtgcagagcaaatatgccaatggagagaccagcaaaggagatgagctgcgcttcggccccaagcccatgaggatcaaggaggacatcctggcctgcagcgctgctgagctgaactacggcctggcccagtttgtgcgggagatcacccggcccaacggggagagatatgagccagacagcatctactacctgtgcctgggcatccagcagtacctgctggagaacaacaggatggtgaacatcttcacagacctgtactacctgacctttgtgcaggagctgaacaagagcctgagcacctggcagcccaccctgctgcccaacaacacagtgttcagccgggtggaggaggagcacctgtgggagtgcaagcagctgggcgtgtacagcccctttgtgctgctgaacaccctgatgttcttcaacaccaagttcttcggcctgcagacagctgaggagcacatgcagctgtccttcaccaacgtggtgcggcagagcaggaagtgcaccaccccccggggcaccaccaaggtggtgtccatccgctactatgcccctgtgcggcagaggaagggccgggacaccggccctgggaagaggaagagagaagatgaggcccccatcctggagcagagagaaaataggatgaaccccctgcgctgccctgtgaagttctatgagttctacctgagcaagtgcccagagagcctgcggaccagaaatgatgtgttctacctgcagcctgagaggagctgcatcgccgagagccccctgtggtacagcgtcatccccatggaccgctccatgctggagagcatgctgaaccgcatcctggccgtgcgggagatctatgaggagctgggccggcctggagaggaggacctggactag

SEQ ID NO: 152777 - DNA, 3843 bp, Artificial Sequence
  derived and/or modified sequence
atggaccccagcgacttccccagcccctttgaccccctgaccctgcctgagaagcccctggccggggacctgcctgtggacatggagtttggagaggacctgctggagagccagacagcccccacccggggctgggcccctcctggccccagccccagcagcggggccctggacctgctggacaccccagctggcctggagaaggaccccggggtgctggatggagccacagagctgctgggcctgggcggcctgctgtacaaggcccccagccccccagaggtggaccacggccctgagggcaccctggcctgggatgctggggaccagaccctggagcccggccctgggggccagaccccagaggtggtgcccccagaccccggggccggggccaacagctgcagccctgagggcctgctggagcccctggccccagacagccccatcaccctgcagagcccccacatcgaggaggaggagaccaccagcatcgccacagcccggcggggcagccctggccaggaggaggagctgccccagggccagccccagagccccaatgccccacccagccccagcgtgggggagaccctgggagatggcatcaacagcagccagaccaagccaggcggcagcagccccccagcccaccccagcctgcctggagatggcctgacagccaaggccagcgagaagcccccagagcgggtgcagaagaggtctgagcgggtgcggcgggcagagccccccaagccagaggtggtggacagcacagagagcatccctgtgtctgatgaagattctgatgccatggtggatgaccccaatgatgaagattttgtgcccttccggcccaggaggagccccaggatgagcctgcggagctctgtgtcccagagagctggccgctctgctgtgggcaccaagatgacctgtgcccactgcaggacccccctgcagaagggccagacagcctaccagaggaagggcctgccccagctgttctgcagcagcagctgcctgaccaccttcagcaagaagcccagcggcaagaagacctgcaccttctgcaagaaggagatctggaacaccaaggacagcgtggtggcccagacaggcagcggcggcagcttccacgagttctgcacctctgtgtgcctgagcctgtatgaggcccagcagcagaggcccatcccccagagcggggaccctgcagatgccacccgctgcagcatctgccagaagacaggagaggtgctgcacgaggtgtccaatggatctgtggtgcaccggctgtgcagcgacagctgcttcagcaagttccgggccaacaagggcctgaagaccaactgctgtgaccagtgtggggcctacatctacaccaagacaggcagccctggccctgagctgctcttccacgagggccagcagaagcgcttctgcaacaccacctgcctgggcgcctacaagaagaagaacaccagggtgtacccctgtgtgtggtgcaagaccctgtgcaagaactttgagatgctgagccacgtggacagaaatggcaagaccagcctcttctgcagcctgtgctgcaccaccagctacaaggtgaagcaggccggcctgaccggccccccccggccctgcagcttctgccgccgcagcctgagtgacccctgctactacaacaaggtggacagaacagtgtaccagttctgcagccccagctgctggaccaagttccagaggaccagccctgagggcggcatccacctgagctgccactactgccacagcctcttcagcggcaagccagaggtgctggactggcaggaccaggtgttccagttctgctgccgggactgctgtgaggacttcaagaggctgcggggcgtggtgtcccagtgtgagcactgccggcaggagaagctgctgcacgagaagctgcgcttctctggagtggagaagagcttctgcagcgagggctgtgtgctgctgtacaagcaggacttcaccaagaagctgggcctgtgctgcatcacctgcacctactgcagccagacctgccagaggggcgtgacagagcagctggatggcagcacctgggacttctgcagcgaggactgcaagagcaagtacctgctgtggtactgcaaggccgcccgctgccacgcctgcaagaggcagggcaagctgctggagaccatccactggaggggccagatccgccacttctgcaaccagcagtgcctgctgcgcttctacagccagcagaaccagcccaacctggacacccagagcggccctgagagcctgctgaacagccagagccctgagagcaagccccagacccccagccagaccaaggtggagaacagcaacacagtgaggaccccagaggagaatggaaacctgggcaagatccctgtgaagaccaggtctgcccccacagcccccaccccacctcctcctcctcctccagccacccccaggaagaacaaggccgccatgtgcaagcccctgatgcagaacagaggagtgtcctgcaaggtggagatgaagagcaagggcagccagacagaggagtggaagccccaggtgattgtgctgcccatccctgtgcccatctttgtgcctgtgcccatgcacctgtactgccagaaggtgcctgtgcccttctccatgcccatccctgtgcctgtgcccatgttcctgcccaccaccctggagagcacagacaagatcgtggagaccatcgaggagctgaaggtgaagatccccagcaaccccctggaggccgacatcctggccatggccgagatgattgctgaggccgaggagctggacaaggccagcagtgacctgtgtgacctggtgagcaaccagagcgctgagggcctgctggaggactgtgacctgtttggacctgccagagatgatgtgctggccatggctgtgaagatggccaacgtgctggatgagcccggccaggacctggaggccgacttccccaagaaccccctggacatcaaccccagcgtggacttcctgtttgactgtggcctggtgggcccagaagatgtgtccacagagcaggacctgcccaggaccatgaggaagggccagaagaggctggtgctgtctgagagctgcagccgggacagcatgagcagccagcccagctgcaccggcctgaactacagctatggagtgaatgcctggaagtgctgggtgcagagcaaatatgccaatggagagaccagcaaggccaagcccatgaggatcaaggaggacatcctggcctgcagcgctgctgagctgaactacggcctggcccagtttgtgcgggagatcacccggcccaatggagagagatatgagccagacagcatctactacctgtgcctgggcatccagcagtacctgctggagaacaacaggatggtgaacatcttcacagacctgtactacctgacctttgtgcaggagctgaacaagagcctgagcacctggcagcccaccctgctgcccaacaacacaggccctgggaagaggaagagagaagatgaggcccccatcctggagcagagagaaaataggatgaaccccctgcgctgccctgtgaagttctatgagttctacctgagcaagtgcccagagagcctgcggaccagaaatgatgtgttctacctgcagcctgagaggagctgcatcgccgagagccccctgtggtacagcgtcatccccatggaccgctccatgctggagagcatgctgaaccgcatcctggccgtgcgggagatctatgaggagctgggccggcctggagaggaggacctggactag

SEQ ID NO: 152778 - DNA, 4119 bp, Artificial Sequence
  derived and/or modified sequence
atggaccccagcgacttccccagcccctttgaccccctgaccctgcctgagaagcccctggccggggacctgcctgtggacatggagtttggagaggacctgctggagagccagacagcccccacccggggctgggcccctcctggccccagccccagcagcggggccctggacctgctggacaccccagctggcctggagaaggaccccggggtgctggatggagccacagagctgctgggcctgggcggcctgctgtacaaggcccccagccccccagaggtggaccacggccctgagggcaccctggcctgggatgctggggaccagaccctggagcccggccctgggggccagaccccagaggtggtgcccccagaccccggggccggggccaacagctgcagccctgagggcctgctggagcccctggccccagacagccccatcaccctgcagagcccccacatcgaggaggaggagaccaccagcatcgccacagcccggcggggcagccctggccaggaggaggagctgccccagggccagccccagagccccaatgccccacccagccccagcgtgggggagaccctgggagatggcatcaacagcagccagaccaagccaggcggcagcagccccccagcccaccccagcctgcctggagatggcctgacagccaaggccagcgagaagcccccagagcgggtgcagaagaggtctgagcgggtgcggcgggcagagccccccaagccagaggtggtggacagcacagagagcatccctgtgtctgatgaagattctgatgccatggtggatgaccccaatgatgaagattttgtgcccttccggcccaggaggagccccaggatgagcctgcggagctctgtgtcccagagagctggccgctctgctgtgggcaccaagatgacctgtgcccactgcaggacccccctgcagaagggccagacagcctaccagaggaagggcctgccccagctgttctgcagcagcagctgcctgaccaccttcagcaagaagcccagcggcaagaagacctgcaccttctgcaagaaggagatctggaacaccaaggacagcgtggtggcccagacaggcagcggcggcagcttccacgagttctgcacctctgtgtgcctgagcctgtatgaggcccagcagcagaggcccatcccccagagcggggaccctgcagatgccacccgctgcagcatctgccagaagacaggagaggtgctgcacgaggtgtccaatggatctgtggtgcaccggctgtgcagcgacagctgcttcagcaagttccgggccaacaagggcctgaagaccaactgctgtgaccagtgtggggcctacatctacaccaagacaggcagccctggccctgagctgctcttccacgagggccagcagaagcgcttctgcaacaccacctgcctgggcgcctacaagaagaagaacaccagggtgtacccctgtgtgtggtgcaagaccctgtgcaagaactttgagatgctgagccacgtggacagaaatggcaagaccagcctcttctgcagcctgtgctgcaccaccagctacaaggtgaagcaggccggcctgaccggccccccccggccctgcagcttctgccgccgcagcctgagtgacccctgctactacaacaaggtggacagaacagtgtaccagttctgcagccccagctgctggaccaagttccagaggaccagccctgagggcggcatccacctgagctgccactactgccacagcctcttcagcggcaagccagaggtgctggactggcaggaccaggtgttccagttctgctgccgggactgctgtgaggacttcaagaggctgcggggcgtggtgtcccagtgtgagcactgccggcaggagaagctgctgcacgagaagctgcgcttctctggagtggagaagagcttctgcagcgagggctgtgtgctgctgtacaagcaggacttcaccaagaagctgggcctgtgctgcatcacctgcacctactgcagccagacctgccagaggggcgtgacagagcagctggatggcagcacctgggacttctgcagcgaggactgcaagagcaagtacctgctgtggtactgcaaggccgcccgctgccacgcctgcaagaggcagggcaagctgctggagaccatccactggaggggccagatccgccacttctgcaaccagcagtgcctgctgcgcttctacagccagcagaaccagcccaacctggacacccagagcggccctgagagcctgctgaacagccagagccctgagagcaagccccagacccccagccagaccaaggtggagaacagcaacacagtgaggaccccagaggagaatggaaacctgggcaagatccctgtgaagaccaggtctgcccccacagcccccaccccacctcctcctcctcctccagccacccccaggaagaacaaggccgccatgtgcaagcccctgatgcagaacagaggagtgtcctgcaaggtggagatgaagagcaagggcagccagacagaggagtggaagccccaggtgattgtgctgcccatccctgtgcccatctttgtgcctgtgcccatgcacctgtactgccagaaggtgcctgtgcccttctccatgcccatccctgtgcctgtgcccatgttcctgcccaccaccctggagagcacagacaagatcgtggagaccatcgaggagctgaaggtgaagatccccagcaaccccctggaggccgacatcctggccatggccgagatgattgctgaggccgaggagctggacaaggccagcagtgacctgtgtgacctggtgagcaaccagagcgctgagggcctgctggaggactgtgacctgtttggacctgccagagatgatgtgctggccatggctgtgaagatggccaacgtgctggatgagcccggccaggacctggaggccgacttccccaagaaccccctggacatcaaccccagcgtggacttcctgtttgactgtggcctggtgggcccagaagatgtgtccacagagcaggacctgcccaggaccatgaggaagggccagaagaggctggtgctgtctgagagctgcagccgggacagcatgagcagccagcccagctgcaccggcctgaactacagctatggagtgaatgcctggaagtgctgggtgcagagcaaatatgccaatggagagaccagcaaaggagatgagctgcgcttcggccccaagcccatgaggatcaaggaggacatcctggcctgcagcgctgctgagctgaactacggcctggcccagtttgtgcgggagatcacccggcccaacggggagagatatgagccagacagcatctactacctgtgcctgggcatccagcagtacctgctggagaacaacaggatggtgaacatcttcacagacctgtactacctgacctttgtgcaggagctgaacaagagcctgagcacctggcagcccaccctgctgcccaacaacacagtgttcagccgggtggaggaggagcacctgtgggagtgcaagcagctgggcgtgtacagcccctttgtgctgctgaacaccctgatgttcttcaacaccaagttcttcggcctgcagacagctgaggagcacatgcagctgtccttcaccaacgtggtgcggcagagcaggaagtgcaccaccccccggggcaccaccaaggtggtgtccatccgctactatgcccctgtgcggcagaggaagggccgggacaccggccctgggaagaggaagagagaagatgaggcccccatcctggagcagagagaaaataggatgaaccccctgcgctgccctgtgaagttctatgagttctacctgagcaagtgcccagagagcctgcggaccagaaatgatgtgttctacctgcagcctgagaggagctgcatcgccgagagccccctgtggtacagcgtcatccccatggaccgctccatgctggagagcatgctgaaccgcatcctggccgtgcgggagatctatgaggagctgggccggcctggagaggaggacctggactag

SEQ ID NO: 152779 - DNA, 4113 bp, Artificial Sequence
  derived and/or modified sequence
atggaccccagcgacttccccagccccttcgaccccctgaccctgcccgaaaagccccttgccggagatctgccagttgatatggagtttggcgaagatttgttggagtcccagaccgcacccacacggggctgggcccctcccgggccttcccctagtagcggggctttagatcttcttgatacccccgccggcttagagaaagaccccggcgtcttggacggggccacagagctcctgggtttggggggcctgctatataaagctcctagtccaccagaggtggatcatggtccagagggcaccctggcatgggacgccggtgaccagactttggagccaggtcccggggggcaaactcctgaagttgtgccaccagaccctggggccggagccaacagctgttctcctgaaggacttctggagcctctggctcccgatagtcctatcacactgcagagtccacatatcgaagaggaggagaccacttccatcgctaccgcccgacgcggctctcctggccaggaagaggagttaccccagggacaaccacagagccccaacgctccgcctagtcctagtgtgggggaaaccctcggggatggaataaacagctcacagaccaaacctgggggcagttcacctcccgcacacccatcactgccgggagatgggctgacggcgaaggcaagcgagaagcccccagagagaaaaaggtctgaaagggtgcgacgagccgaaccgcctaagcccgaagtggtcgattcgactgaatcaattccagttagtgatgaggattcagatgcgatggtggatgatcccaatgacgaggacttcgtgccattcagacctaggcgcagcccccgcatgagtcttagatcttcggtgagccagcgggcaggccgtagtgctgtgggtaccaaaatgacatgcgctcattgcaggactccgttgcagaaggggcagaccgcataccagagaaaaggcttgccgcagttgttctgttcgtccagctgtctgacgacattctccaagaagccttccggcaaaaagacatgcaccttttgcaagaaggagatatggaacacaaaggattcggtggttgcacagacaggctcaggagggagctttcacgagttctgtacctcagtttgcctgagcctttacgaagcccagcagcagcgaccgattccacaatctggggaccctgccgacgctactcggtgctcgatatgccagaagacaggcgaggtgttgcacgaagtcagtaatgggtcagtggtacataggctgtgctcagacagctgtttcagtaagttccgagcaaataaaggtcttaaaacaaattgctgcgaccagtgcggtgcatacatctataccaaaacaggctcccccggtccagaactgttgtttcacgaaggccaacagaagcggttctgcaataccacctgcctaggtgcgtataagaagaagaacacccgcgtgtacccatgcgtttggtgtaagactttgtgcaagaatttcgaaatgctttcccatgttgacagaaacggaaagacttccttgttctgttctctgtgctgcaccaccagctataaagtcaaacaggctggcctgactggacctccccggccttgtagtttctgccggcgatccctgagtgacccgtgctattacaacaaggtggacaggactgtctaccagttctgttcaccgagctgctggacaaagttccagcgaacctccccagagggaggcatccaccttagctgccactattgccatagtttgttcagcggaaagcctgaggtcctagactggcaggaccaggtctttcagttctgctgtagagattgttgtgaggattttaaaagactgcggggcgttgtgagccagtgtgagcactgcagacaggagaagctgttgcacgaaaaactgcgtttcagcggagtagagaaaagcttctgttctgagggatgcgttctcctatacaaacaggatttcaccaaaaagttgggactgtgctgcatcacctgcacctattgcagccagacctgtcagagaggagttaccgaacagctggatggcagcacctgggacttttgcagtgaggattgtaagagtaagtatctactgtggtactgtaaagcagcgcggtgccacgcgtgtaagcgccaaggcaagctgttggaaaccattcactggcgcgggcagatccggcacttttgtaaccagcagtgtctgctgcggttttactctcaacagaaccagcccaatctcgacactcagtccgggcccgaatccctgctcaattcacagagccctgagagcaagccccagacaccgagtcaaactaaggtggaaaactctaacaccgtgaggaccccggaagagaacgggaatctcgggaaaatccctgtaaaaacccgctccgcccctactgcacccacccctcctcctccacccccgcctgctactccccgcaaaaataaggcggctatgtgcaagcctttgatgcaaaataggggagtcagctgcaaggtggaaatgaagtctaaagggtcgcagacggaagagtggaagccacaggtgatcgtactgccaattcccgtgcctatttttgtccccgtgcccatgcacctctattgccagaaggtccctgtgcccttttctatgcctatccccgtgcccgttcctatgttcctcccaacaacattggagtcgaccgacaagatcgtggagactatagaggagctgaaagtaaaaatcccttcgaatccactagaagctgatattctggctatggccgagatgattgcagaggctgaggagctagacaaggccagttcagatctgtgcgacctggtctcaaaccagtcggccgaggggctcttagaggactgcgacctgttcggccctgcacgagatgatgtgctggctatggctgtgaagatggctaatgttctggatgagcctggtcaagacctagaggctgattttcccaagaatccattggacattaaccccagcgtcgactttctgttcgactgtggactggttggtcccgaggacgtttccactgagcaagatcttccacgaacaatgcgcaagggtcagaagaggctggtgctatccgaaagctgctctcgggattcaatgagcagtcagccgagttgtacaggccttaactattcatatggagtgaacgcttggaagtgttgggtacaatccaaatatgccaatggcgaaaccagtaagggcgacgagctacgttttggtcctaaacctatgcggatcaaggaagacatacttgcctgctcagcagctgaactgaattacggccttgcacagttcgtacgggaaataacccgacctaacggagaaagatatgaacccgacagtatctactacctgtgtttaggaattcagcagtatctcctcgaaaataaccggatggtgaatatcttcactgatctgtattacctcacattcgttcaggagttaaacaagagcctgtcaacctggcagcccaccctcctgccaaataatactgttttttctcgggtggaggaggaacacctctgggagtgcaagcagcttggggtctacagtccttttgtgctgctcaacacacttatgtttttcaataccaagttcttcggcctgcagacagctgaggaacatatgcagttgtcttttacgaatgttgtcagacagtctcggaagtgtactacccccagaggcacaacgaaggtggtctccattaggtattacgccccggtgcgccaacgtaaagggcgagataccggtcccggcaaaagaaagagagaagacgaagccccgatactggagcaaagggagaacagaatgaatcccctgcgttgcccagtcaaattttatgaattttatctaagcaagtgccctgaaagcctgcgaactcggaacgatgttttctacctgcagccagagcgatcttgtatcgctgaatcccccctctggtattcggtgattcccatggaccgatccatgctggagagcatgttaaaccgaatcctggccgtgcgggaaatctacgaggaactgggccgaccgggcgaggaagatttggactag

SEQ ID NO: 152780 - DNA, 4113 bp, Artificial Sequence
  derived and/or modified sequence
atggaccccagcgacttccccagccccttcgaccccctgaccctgcccgaaaaaccactcgcaggagacctgccggttgatatggagtttggtgaggatctcctggaaagccagacagctccaaccagaggatgggccccccccggccccagtccgtccagcggggccttggacttgctggacacacccgccggactcgaaaaggaccccggcgttttagatggggccacagagctactaggactgggcggtctattatacaaagccccttcccctccagaggtggatcacggccccgagggaacactggcctgggatgccggtgaccagacacttgagccaggcccgggcggacagacccctgaagtggtcccacctgacccgggcgccggtgccaactcatgtagcccagaaggattgctggaacccctggcccccgatagccccattaccctgcagagccctcacatcgaagaagaggagacaaccagcatcgccacagccaggcgtgggtccccggggcaggaggaggagctgccccagggacaaccacagtctcctaacgcccctccgtctcccagtgtgggggagaccctcggggacggaattaactcaagtcaaaccaagccgggcggtagtagccccccagcccaccctagcttaccaggcgacgggctgactgcaaaagcatcggagaaaccacctgagagaaaaagatccgagagggtgaggcgtgcggagccaccaaaacctgaggtggtggacagcaccgaaagtattccagtgagcgacgaggatagcgacgccatggttgatgaccccaatgacgaggatttcgtgccctttcgaccaagaagatcacctcgaatgagcctgcgaagctctgtgagccagcgtgctggccgatctgccgtaggcacgaagatgacttgcgcgcattgtcgcacccccctgcagaaggggcagactgcctaccaacggaaagggttgccgcagctcttttgctcaagtagctgtcttacaaccttctccaagaagccctctggcaaaaaaacttgcacattctgcaagaaggaaatttggaatacaaaagactcagtggtcgctcagaccggctccggcggaagcttccatgagttctgtacatctgtgtgcctgagcctgtatgaagctcagcagcagcgccctatcccccagtccggggacccagccgatgccaccagatgttcaatctgtcagaaaaccggcgaggtgctgcacgaggttagtaacggatcagtggtccaccggctctgctctgattcttgcttttcgaaattccgggcgaacaagggcctgaagactaactgttgtgatcagtgtggggcctatatatatacgaagactggaagccctgggccagaactgttgttccacgagggccagcagaaacggttctgtaacacaacttgcctgggagcctataaaaagaagaacacgagggtgtacccatgcgtgtggtgtaaaactctgtgcaagaatttcgaaatgctctcccatgtagatagaaacggcaagactagcctgttctgctccctttgttgcactacttcttacaaagtgaaacaagcaggcttaactggcccaccacggccctgtagcttttgtagacggtctctgtccgacccctgctattacaacaaggtggaccgtacagtgtaccaattttgctccccttcctgctggaccaagttccagaggacaagtcccgagggagggatccacctctcatgccattactgccactccttgttcagtggtaaacccgaggtacttgattggcaggaccaggtgtttcagttctgttgcagggactgctgtgaggactttaaaagactgcgtggcgtagtctctcagtgtgagcattgtagacaggaaaagctgcttcatgagaagttgaggttctcaggagtcgaaaaatcattctgctctgaaggatgtgtgctgctgtacaagcaggatttcaccaaaaagctaggcctgtgctgtatcacatgtacctattgcagccagacatgccaaagaggcgtgactgagcagctggatgggtcaacttgggatttttgttctgaggactgcaaatctaagtaccttctttggtactgcaaggctgccagatgccacgcctgtaaacggcagggcaagttgctcgaaactatccactggagagggcagatcaggcatttctgtaatcaacagtgcctgcttagattttattcccagcaaaatcagcccaatctggacacacagagtgggcccgaaagtttgctgaactctcagagccccgagagtaagcctcagaccccgtctcaaacaaaggttgaaaattctaacaccgtccggaccccagaggagaacggaaacctgggcaagatccccgtgaagacacgctctgctcccacagcccccactcctccgccgcctccaccacctgctactccacgtaaaaacaaggccgctatgtgcaagcccctcatgcagaacaggggtgtcagctgcaaagtggaaatgaaatcgaagggttcccagactgaagagtggaaacctcaggtgatcgttttgcctatccccgtcccgatatttgtgccagtgcccatgcatctttactgtcagaaagtaccagtcccattctccatgcccattcccgtgcctgtccctatgtttctccccacaacgttggagtcgaccgacaagattgtggagacaatcgaggaactcaaggtgaagatcccatctaatcctctcgaggccgatatcttggcgatggctgaaatgatcgccgaagccgaggagctggataaagcaagttctgatctctgtgacctcgtttcaaatcaaagtgccgaaggcttgctggaagattgtgatttatttgggccagcccgtgacgacgttctagccatggcggtgaaaatggctaacgttctggacgagcccggacaagacctcgaagcagatttccctaagaatcccttagatattaaccctagtgttgacttcctcttcgactgtgggctcgttgggccagaagatgtgtccaccgagcaagacttgcccagaaccatgcggaagggacaaaagcgcctggtgcttagtgagtcctgttcgagggacagcatgagttcacagcccagttgcacaggcctgaattactcttacggggttaacgcctggaaatgttgggtgcagtccaaatatgcgaatggcgaaactagcaagggagatgagttaagattcggacccaaaccgatgagaattaaggaggatatccttgcgtgtagcgccgccgaactcaactacggattggcacagtttgttagggaaattactagaccaaacggtgagagatatgaacctgattccatctattacctgtgccttggtattcagcagtatttgctggaaaacaaccggatggtgaatatattcacggacctgtattaccttaccttcgttcaagaactcaataagtccctatccacttggcagcctaccctcctaccaaacaacaccgtgtttagccgtgtggaggaagaacatctgtgggagtgcaagcagctgggtgtgtacagtccattcgtattgctgaatacactcatgttttttaatactaaattctttgggttgcagaccgccgaagaacatatgcaactctcgtttactaatgtcgttcgccaaagtaggaaatgcacaactccccggggcacaaccaaagtggtctctatcaggtactatgccccagtgagacagagaaaaggccgggacaccggtcccggcaaaagaaagagggaggacgaagctcctatcctggagcagagggagaataggatgaatccactacgatgccccgtgaaattttatgaattctatctgtccaaatgtcccgagagtctgagaactcgcaatgacgtgttctatctgcaaccagagcgctcctgtattgctgagtctcccctttggtactcagtgatccctatggacagatcgatgttggagtctatgctgaaccgaattctcgccgtgcgggaaatctacgaagaactgggcaggcccggagaggaggatctggactag

SEQ ID NO: 152781 - DNA, 3843 bp, Artificial Sequence
  derived and/or modified sequence
atggaccccagcgacttccccagccccttcgaccccctgaccctgcccgagaagccattggcgggggatctgccagtagatatggagtttggggaggatctgctggaatctcaaactgctcctacgaggggatgggcccctcctggaccttcaccttcaagcggggctctggacctcctggatacacctgccgggctcgagaaggatcctggagtattagatggagctactgagctgttgggcctgggcgggctgctctacaaagcccccagcccacccgaggttgaccacggtcctgaagggactttggcgtgggacgccggcgaccaaaccctcgaacccggcccaggggggcaaacacccgaggtggtgcctcctgatcccggtgctggggctaatagctgttctcctgagggccttctagaacctctagccccagactcgcctatcaccctgcagtcgccgcatattgaggaagaagaaacgacttcgatcgccaccgcccggagaggttcaccagggcaagaggaagagttgcctcaggggcagcctcagtcccccaacgctcctccaagtcctagcgtgggggagacactcggcgatgggattaattcatcccagacaaagcccggagggagctctcctccagcacatccttcattgcccggcgacggactgaccgccaaagcgagtgaaaagccccctgaaagggtgcagaagcggtcagaaagagttcgccgagccgaacctccgaagccagaagtggtggactccactgaatccatccctgtgtccgatgaagattcagatgccatggttgatgaccccaacgatgaggacttcgtccccttccgaccgcgccgcagtcctagaatgtcccttaggagctccgtgtcccagcgcgctgggcggagtgccgtgggtactaaaatgacatgtgcccattgtcgcacacctctgcaaaagggacagaccgcttaccagaggaaggggctgcctcagctgttctgctccagtagttgtctgaccacattcagtaagaaaccctcaggaaaaaaaacctgcaccttttgtaagaaagagatttggaataccaaggattccgtcgtggcccagactggttcgggcggaagctttcacgaattctgcaccagcgtgtgtctttcattgtatgaagctcaacagcagcgtccaattcctcagtcaggtgatcccgcggatgctacacgttgcagcatctgccagaagaccggtgaagtgcttcatgaagtatccaacggctccgtggttcatagactgtgctcagactcctgtttcagcaagttccgcgcgaataagggcctgaaaaccaactgctgtgatcagtgcggcgcttacatttacaccaagaccgggagcccaggcccagagctactgtttcatgaaggtcagcagaaacgcttttgcaacactacctgtcttggtgcttataaaaaaaagaacacaagggtgtacccctgtgtgtggtgcaagaccctctgcaaaaatttcgaaatgctttcccacgtcgacaggaacggaaaaacgagcctattctgctcactgtgttgcaccacctcttacaaggtgaaacaggcgggcctcactggaccaccacgaccatgcagtttttgtcgaagaagccttagcgacccgtgctactataacaaggtagatagaaccgtctaccaattctgctctccatcctgctggacaaagttccaaagaacaagccctgaaggcggaatacatctgtcttgccactattgccactctctattctcaggcaagcctgaagtgctcgattggcaggatcaggttttccagttttgctgtcgcgactgttgtgaggacttcaagcggctcaggggcgttgtgagtcagtgcgagcattgccgccaggaaaagctgttgcacgagaagcttcggtttagcggcgttgagaagtcattttgctcagagggatgtgttctactatataagcaggactttacaaaaaagctgggcttgtgctgcatcacgtgcacatactgtagccagacctgccaaagaggggttaccgaacagctcgacggatccacttgggatttctgctccgaagattgtaagtccaagtatttactttggtactgtaaggctgccagatgccatgcttgcaagagacaggggaagctcctcgaaaccattcattggaggggccagatcagacacttttgcaaccaacagtgtctcctgcggttttatagtcaacagaatcagcccaacctggatactcagtcaggacctgagtcactcctcaactcccagagcccagagtcaaagcctcagactccatcgcagaccaaggtggagaatagcaacacagtcagaactcccgaagaaaatggtaatctcgggaaaataccagtgaagacacgctctgctcctactgctcctacgcctccccccccgcccccccccgccacacctcggaaaaacaaggcggccatgtgcaagcctctcatgcagaatcgcggcgtgagctgcaaagtagagatgaaatctaagggctctcagaccgaggagtggaagccgcaggtaatagtactgccaatccctgtgcctattttcgtcccagtgccaatgcacctgtactgccagaaggttccagtgcccttttctatgccgattccggtacccgttcccatgttcctgcctactactctggagagcaccgacaaaattgttgagacgatcgaagagttgaaagttaaaatccccagcaatcccttagaagctgacattttagcgatggctgaaatgattgcggaggccgaagagttagataaggcatcctcagacctgtgtgatcttgtatccaaccagtcagccgaaggtctgctggaggactgtgaccttttcggacccgccagagacgacgtcctggctatggctgttaaaatggctaacgtcctcgatgagccggggcaggatcttgaggcggactttccaaagaacccgttggatattaaccctagtgtggacttcctgtttgactgtggtctcgtgggcccggaagacgtgagcacagagcaggatctccccagaactatgcgcaaaggtcagaagcgacttgttctgtccgaatcatgcagccgcgactctatgtcgtctcagccctcatgtaccggactgaactacagttacggggtcaacgcctggaaatgctgggtgcaatctaagtacgcaaatggggagacctctaaagcaaaacctatgcgtatcaaggaagatatactggcttgctccgcggcagaactgaattacgggctcgcccaatttgtacgggagattacgagacccaatggggaacggtatgagccggattccatctactacctgtgtctgggcattcagcaatacctgctggagaataatcgcatggtaaatatcttcaccgatttgtattacttaactttcgttcaggaactgaataaaagcctgtcaacatggcaaccaaccctgctgccgaacaacaccggacctggcaagcggaagagagaggatgaggcccccatcctggagcagcgggagaaccggatgaaccccttgcgttgcccagtgaaattttatgaattttacctgtccaaatgccccgagtcactaaggactaggaatgacgttttctacctgcagcccgagcgatcttgtattgctgagtcaccactttggtatagcgtaatcccgatggacagatctatgttggagtctatgctcaatagaatcctggccgtgagagaaatttacgaagaactgggtaggccgggcgaggaagatctggattag

SEQ ID NO: 152782 - DNA, 4119 bp, Artificial Sequence
  derived and/or modified sequence
atggaccccagcgacttccccagccccttcgaccccctgaccctgcctgaaaaaccgctcgctggggatctgccagtggatatggaattcggcgaagatttattagagtctcagaccgctccgacccgaggatgggctcccccggggccctccccgagtagcggtgccttggacctgttagacacgcccgctgggctcgaaaaggaccctggcgtcctggatggggccaccgaactcctgggtctaggcggtcttctatacaaagctccctcaccccccgaggtggaccatggtccagaggggacactggcttgggatgcaggagaccagaccttggaacctggtccaggcggacagacccccgaagtcgtccccccggatccgggcgcaggggcgaattcctgctcccccgagggtctgctcgagccccttgctcctgacagcccgatcactcttcaatctcctcatatcgaagaggaagagaccaccagtatcgcaacagccagacgcgggagccccgggcaggaagaagagctcccacaggggcagccccaaagccctaacgctcctccttctccctcagtcggagaaaccctgggggatggtattaacagttcacagactaaacctggcggcagtagcccaccagcccacccttccctgcctggagacgggcttacggctaaggcttcggagaagccccctgaacgcgtccagaagcgaagcgagagggtgcggcgtgccgaaccacctaaacccgaagtggtggattcaacggaatccattccagtcagcgatgaggacagtgatgccatggtggacgatcctaatgacgaggacttcgtgccgttccggcccaggaggtctccccgcatgagcctgcgctcaagcgtgagccagcgggccgggcgatcggccgtgggtaccaaaatgacttgtgcccactgccgcacccccttgcagaaagggcaaaccgcttatcagaggaagggtctcccacaactgttctgtagctccagctgcctgactacatttagcaaaaaaccaagcggaaagaaaacttgcactttttgtaagaaagagatctggaataccaaggattctgtggtcgcacagactgggtcgggcggctcctttcatgagttctgcacaagtgtgtgcctgtcgttgtacgaagcccagcagcagagaccaattcctcaaagtggcgatcccgccgatgctacccgttgttcaatatgccagaagaccggcgaggtgctacacgaggtctccaacggatctgtggtgcatcggttatgttcagattcttgtttcagcaagttccgagcaaacaagggactgaagaccaattgttgcgatcaatgcggtgcatatatctataccaagaccggtagtccagggcccgagcttctgttccacgaaggccagcagaagaggttctgcaatactacgtgccttggtgcatataaaaagaagaatacccgggtctacccctgtgtgtggtgcaagacattgtgcaaaaactttgagatgctgtcacacgtggatagaaacgggaaaacttctctgttctgctccctgtgctgcacgacaagttataaggtgaagcaagcaggcctgaccggccctccccggccatgttctttttgtcgtagaagtctctcggacccctgctactataataaagtggatcggactgtatatcagttttgtagcccatcatgttggacaaaattccagagaacatctccagagggcggtatccacttgagctgccactattgtcactcactgtttagtgggaaacccgaagtgctcgactggcaagaccaggtctttcagttttgctgtcgcgactgctgtgaggatttcaagcgcctgagaggggtcgtgtcccagtgcgagcattgccggcaagaaaagctcctgcacgaaaaactgaggttcagcggagtagaaaagagcttctgctccgaaggatgcgtgctgctgtataagcaggactttacgaagaagttgggcttgtgctgcatcacatgtacttactgttcccaaacatgccaacgtggcgtaactgagcagcttgatgggtccacctgggacttctgtagtgaggattgcaaatccaagtaccttctgtggtattgtaaggctgcccgttgtcacgcctgcaagcgccagggaaagttgttagagacgattcattggcgaggccagatcaggcatttttgcaatcagcagtgtcttctgagattctatagtcaacaaaaccagcccaacctggatacacagagcggccccgaaagccttttgaatagtcagagcccagaaagcaagccacaaacaccatctcagaccaaagtagaaaatagtaacacggtgaggacaccggaggagaacgggaacctaggcaaaatcccagtaaagacacgttcggcccccactgctcctacccccccgccccctcccccacctgcaactcctcgaaagaataaagccgcgatgtgcaagcctctgatgcaaaataggggagtcagctgtaaggtggaaatgaagtctaaaggaagccagaccgaggaatggaaaccacaggtgatagtcctaccaatccccgtgccaatatttgttcccgttcccatgcacctgtactgccagaaagttccagtccccttctccatgccgattcccgtgcctgtgcctatgtttctgcctactacccttgagagcacggacaaaattgtggaaacaatcgaagaactgaaagtaaaaataccaagcaacccgctggaagcagacatcctcgcgatggcagagatgatcgctgaggctgaggagctagataaagcgtctagcgatctgtgcgatctcgtgtcaaaccagtccgcagaaggcctgctcgaggactgtgatctttttggccccgccagggacgacgttctggctatggcagtcaagatggcgaacgtcctggatgaacccggacaggatttggaagccgacttccctaagaatccattagatataaatccatctgtggattttctcttcgactgcggcctagtaggccccgaagatgtctctacagagcaggatctaccaaggacgatgcggaagggccagaaacggttggtgctgtccgagagctgtagcagagactctatgagcagccaacctagctgcaccggtctaaactactcatatggggtgaacgcttggaagtgctgggtgcagtcaaagtatgcaaacggcgaaactagtaagggtgacgagcttcgctttggacctaagccaatgaggatcaaagaggatatactggcctgctccgccgccgagctgaattacggcctagcacagtttgtgagagagattacccgcccaaatggagagagatacgagccggactccatctactacctgtgccttggcatacaacagtacctcctggaaaacaaccgtatggtgaacattttcaccgacctgtactatctgacatttgtacaggagttgaacaaaagtctgagcacgtggcagccaaccctgttacccaacaatactgtgttttctcgggtcgaggaggagcatttatgggagtgtaaacagttgggggtgtacagtccctttgtccttcttaacactttgatgttctttaacacgaaattctttggactgcagacagccgaagagcatatgcaattgagttttaccaacgtagtgaggcaaagtcggaagtgcacaactccgagaggcacgacaaaggtggtgtccatccggtattatgcaccagtgcgccaaagaaaaggcagggataccggcccaggcaagcggaagagggaagacgaggcccccatcctggaacagagggagaacagaatgaaccccctgaggtgtcctgtgaaattctacgagttctatctgagtaaatgccctgaaagccttcggacccgaaatgatgtcttctatctgcagcctgaacgaagctgtattgctgagagcccactgtggtatagcgtaatccctatggaccgctcaatgctcgaaagcatgctgaacaggatcttggcggtgcgcgagatctatgaagagctggggagaccaggcgaagaggatctggactag

SEQ ID NO: 152783 - DNA, 4113 bp, Artificial Sequence
  derived and/or modified sequence
atggacccaagtgatttccctagccccttcgatcctctcacattacctgagaagccccttgcaggggacctgccagtggacatggagtttggagaggatctcttagagagccagacggcgccaacccgcggttgggcccctccaggaccatcaccttcctctggcgctctggacctcctcgacacccctgccggactggagaaggaccctggggtgctggatggggcaacagaattgctgggattgggaggcttgctgtataaagcccctagcccacctgaagtcgaccatggtcctgagggaaccctcgcttgggatgccggagaccaaacacttgaacccggtcctggaggacagactccggaggtcgtgccacccgatccgggagccggagcgaattcttgttcccccgagggcctactggaaccccttgcgccagactctcctattacactgcaatctccccacatagaggaggaagaaacaaccagtattgccaccgctagaagaggatctcccggtcaagaggaagagctgccacagggtcagccccagtctcccaatgcaccaccgagccccagtgtcggagagacactgggagacggtattaactcaagccagactaagcccggagggagtagcccccctgcacatccatcattacccggagacggcctgacagctaaagcttcggagaagcccccagaaagaaagaggtctgagagagtgcggagagcagagcccccaaagccagaagtcgtggatagcactgaaagcatccctgttagtgatgaggactctgatgctatggtggacgaccctaatgacgaggacttcgtgcccttccgaccccgtcgcagtcccaggatgtccctgcggagtagtgtaagtcagcgtgctggcagaagcgcagttggaactaagatgacgtgcgctcattgcaggacaccactgcagaagggccagaccgcttatcagcgcaaggggttgccccaactgttctgctcgagttcttgcctgactactttctcaaagaagcccagtggtaaaaaaacatgcaccttttgcaagaaagaaatctggaataccaaggatagcgtggtggctcaaactggatctgggggatcatttcacgagttttgcacatccgtgtgtttgtccttatatgaggcccaacagcagaggcctattccccagtccggggatcccgcagacgccacgcgctgttcaatatgtcagaaaaccggcgaggtgctgcatgaggtgtcaaatggctccgtcgtccacagactatgcagtgattcttgcttctccaagttccgggctaataaggggctgaaaaccaattgttgtgaccagtgcggagcttatatttacaccaagaccggctcacctgggcctgaattactatttcacgagggccagcagaaacggttctgtaataccacctgtttaggcgcatataaaaagaagaatacccgggtctacccgtgcgtgtggtgtaaaacactgtgcaagaatttcgagatgctgtctcatgtagaccggaacggaaaaacaagcctgttctgctctctgtgctgcaccacatcatataaagtgaagcaagcaggcctgaccggccctcccaggccttgttctttttgtcggcgaagcttgagcgatccctgctactacaacaaggtagacaggacagtttatcagttttgtagcccttcctgttggaccaaattccaacggacttctcctgaggggggaatccacctgtcatgccattactgtcacagcctgttctctggaaaaccagaagtgctggattggcaagatcaagtgttccagttctgctgtagagattgttgtgaagactttaagcggctgcgcggagtggtgtctcagtgtgagcactgcagacaagagaagcttctgcacgagaagcttcgtttctcgggagtggagaagagcttctgctcagaagggtgtgttctcctctacaagcaggatttcactaaaaaactgggactctgctgtatcacctgcacttactgtagtcagacatgtcagagaggtgtgacagaacaactggatgggagcacatgggatttctgctcagaagattgtaaatcaaagtacctgttgtggtactgtaaggccgctcgctgccacgcctgtaagcgtcagggtaaactgttagagactattcactggcggggacagattcgtcacttctgtaatcagcagtgcctcttaaggttctactcacaacagaaccagcccaatctcgacactcaatccggcccagagagcctactcaacagtcagtcacctgagtcaaagccccagacaccttcgcagaccaaggtggagaacagcaacacggtgagaacccctgaggaaaatgggaacctgggcaaaatccccgtcaagacaaggagcgcacctactgcccctactcccccaccacctccccctccagcgacccccaggaagaacaaggcagccatgtgtaaacccctgatgcagaaccggggagtttcctgcaaggtggagatgaagtcaaaaggatcacagaccgaggagtggaagccccaggtgatcgttctccctattccagttcccatattcgtacctgtacccatgcatctgtattgccagaaagtcccggtgccatttagtatgcccattcctgtgcctgtcccaatgtttcttcctactacgcttgagagcactgataagattgttgagactattgaagagctcaaggtcaagatcccttctaacccgctggaagcagacatcctcgctatggcggagatgatcgcagaggcagaggagctggacaaggcatcctcagacctgtgtgacctcgtctcaaaccaatccgcagaaggtctcttggaagattgcgacctgttcggaccggctcgggacgatgtccttgctatggctgtgaaaatggccaatgtgctggacgaacctggtcaggatctcgaggctgattttcctaaaaatcccttagatattaacccatcggtggattttctgttcgattgcggactggtgggtcccgaggacgtaagtactgagcaggacctgccaagaacaatgcgtaagggtcagaaaagactcgtgttgtcagaaagttgtagccgggactcaatgtccagccagccaagctgtactggcctcaactactcctacggcgtgaacgcatggaagtgctgggtccagtcaaagtacgccaatggagagaccagcaaaggcgatgagttacggttcggccctaagcctatgagaattaaagaggatatcctagcctgctcagcagcagagcttaattacggcctcgcgcagttcgtgagagagataacccgccctaacggcgagaggtatgagcccgattcgatttactacctgtgcctgggcatccagcagtacttgctggaaaataaccgaatggtaaatatctttaccgacctgtattacttgacgtttgtgcaggaactgaacaagagcctatcaacctggcagcccacgctcttacccaacaatactgtgttctctcgcgtagaagaggagcatctttgggagtgtaagcagctgggcgtgtactcaccctttgtgctgctcaacactctgatgttttttaacacgaaattctttggtctgcagactgctgaagaacacatgcagctctcgttcactaatgtggtgaggcaatctcggaagtgtacgactcctcgaggcacgacaaaggtcgtgtcaattaggtattatgcccctgttaggcagcggaaaggacgcgacaccgggcctggaaaacggaaacgagaggacgaagcacctatcctagagcagagagaaaatcgaatgaacccattgcgctgcccagtgaagttttatgaattttacctgtccaaatgcccagagtcccttcgcactcgcaacgatgtcttctatctgcaaccggaaaggtcctgcattgccgagtcccccctctggtattcggtcattcctatggatcggtccatgctggagagcatgctgaacagaattctagctgtccgagaaatttatgaggagctcggccgaccaggagaagaggacttagactag

SEQ ID NO: 152784 - DNA, 4113 bp, Artificial Sequence
  derived and/or modified sequence
atggatccatcagattttccttctcccttcgaccctctgacactgccagaaaagccactggcaggcgatctccccgtagacatggaatttggagaagacctgcttgagtctcagaccgctcctacccggggatgggccccacctgggccaagtcctagctcaggcgcactcgatctgcttgatacccctgcgggactggagaaggatccaggggtgttagatggcgctacggagctcctggggcttgggggactactgtacaaggcaccaagccctccggaagttgatcacgggccagaaggcaccctcgcatgggacgccggtgaccagacattagagccaggtccagggggacagactcccgaggtcgttccccctgacccaggggctggcgctaacagctgctccccagaggggcttctggaacccttggccccagatagcccaataacgttacaatccccacatattgaagaagaggagaccactagtatcgccacagcgagacgcggttccccaggacaggaagaggagttgccgcaagggcaacctcagtcgccaaacgcaccgccatccccttcggttggagagactttaggagacggtatcaatagctcgcagacaaaaccgggtggtagcagccctcctgcccatccatcactgcctggggatggcttgactgcgaaagccagtgaaaagcctcccgagcgaaaaagaagcgaaagagtacggagggccgaacccccaaaaccagaggttgtagattcaactgaatccatcccggtatcggacgaggattccgacgccatggtggatgaccctaacgatgaggactttgtcccgttccggccaagacgctctccacgtatgtctctgagaagtagcgtctcacagcgcgctggaagatccgccgtgggaaccaagatgacttgtgcacactgtcggactcctcttcaaaaagggcagactgcctatcaacgaaaggggcttccacaattgttctgcagttcttcttgcctgacaaccttctccaagaagccttctggcaaaaagacctgcaccttttgcaaaaaggaaatctggaacacaaaagactcagtggtagctcagacaggatcgggcggatcattccacgagttctgcactagtgtatgtctgtctctctatgaggcacagcagcagagaccaatccctcagtctggcgatcctgcggatgcaacccgctgcagcatttgtcaaaagacgggcgaggtgctgcacgaagtctcaaacgggtctgtggtgcatcggctctgcagcgactcctgcttttctaagtttcgagcgaataaggggttaaaaaccaattgctgcgaccagtgcggcgcttatatctatacgaaaacaggaagtccaggccctgagctcctgttccatgaagggcaacagaagcggttctgcaatactacgtgccttggggcttataaaaaaaaaaacacgcgggtatacccttgcgtgtggtgtaaaactctctgtaagaacttcgagatgctctcccatgtggaccggaatggaaaaacctcccttttctgcagcctgtgctgcacaacatcgtacaaagtgaagcaggcaggactcaccggcccaccgagaccctgcagtttctgtcggagatcactgtccgatccatgttattacaataaggtagatcggaccgtgtatcagttctgtagtcccagctgctggacaaaatttcaacgaactagcccggaagggggaattcatctttcctgccattattgccactcgcttttttcagggaagccagaggttcttgattggcaggaccaagtcttccagttctgttgccgggactgctgtgaggacttcaaacgattgcggggagtggtcagccagtgcgaacactgccgacaagagaaattgcttcacgagaaacttagattcagcggggtggaaaagtccttctgctccgaaggctgtgttctgctttataaacaagattttaccaaaaagctaggtctatgctgtattacctgtacgtactgcagtcagacttgccagagaggagtgacggaacagctggacggaagtacatgggatttttgctcagaggattgtaagtccaagtatctcctttggtattgcaaagcagcgaggtgccacgcctgcaagagacaggggaaactcctggaaaccattcactggaggggacaaataaggcatttttgcaaccagcagtgtctccttcgattctattcccagcaaaatcaacctaacctcgatacccagagtggacccgagtcacttttaaattctcagtcaccagaaagtaagccgcagaccccctcccagacgaaagtggaaaatagcaacaccgtgcgtactcccgaggagaacggaaacctgggaaaaatacctgtcaagactcggagtgctcccactgcccctaccccacccccaccgcctcccccagccacccccaggaagaataaagcagccatgtgcaagcccttaatgcagaataggggggtgagctgcaaggttgagatgaaatcaaaaggctcccagacagaagaatggaagccccaggtcattgtgctgcctatccccgttccaatttttgttcctgttccgatgcacctttactgccaaaaggtcccggtccctttctcaatgccaattcctgtacccgtgcccatgttcctgcccactactctagaatctactgataagatcgtcgagacaattgaggaactgaaagtgaaaatacctagtaaccctttggaagcagacatattggcaatggccgaaatgattgccgaagccgaggagctggacaaagccagctccgacctctgcgaccttgtctcaaaccagagcgcagagggtttgctcgaggactgtgacttgttcggcccagctcgggatgacgtcttggctatggccgtgaagatggctaatgtgctggacgaacccggacaggatctcgaggctgatttcccaaagaatcctctagacattaacccctcggtggatttcctcttcgattgtggccttgttggtcctgaggacgtatccactgaacaggacctacccaggacaatgcggaagggacagaagcgacttgtgctgtcagagtcttgttcccgagactcaatgagctcacagcctagctgtacaggactgaactattcttacggagtgaatgcctggaagtgttgggtgcaatccaagtatgctaacggggaaacatctaagggcgacgaactgcggtttggtcctaagcccatgaggataaaagaggatatactcgcctgttccgccgctgagctgaattacggactggctcagtttgtgagagagatcacccgtccgaacggggagagatacgagccagattcaatttactacctttgcctgggcatccagcaatacttgctggagaataacaggatggtaaacatttttactgacctgtactatctgacctttgtccaggagctcaataaaagcctctctacctggcagccaaccttgctgccgaacaatacggtcttttctcgcgttgaggaggagcacctgtgggagtgcaagcagctcggagtgtatagcccttttgttctgttaaatactctcatgttcttcaatacaaagttcttcggactccagacggcggaagaacacatgcagctgtcctttactaatgtggtacgacaatcccgaaagtgcaccacaccaaggggtacaactaaggtggtgtctatcaggtactacgcaccggtgaggcagagaaagggtagggacactggacctggaaaacggaaacgagaagacgaggccccaattctagagcagcgagagaatcgcatgaatcctctgcgatgtcctgtcaagttctatgagttttatttaagtaagtgcccagagtctcttaggaccagaaacgacgtcttttatctgcagccagaacggtcatgtattgcggagtcccccttgtggtacagtgtcatccctatggatagaagtatgctggagtcaatgctgaacagaatcctggcagtgagggagatctatgaagaactgggacgcccaggggaggaagatcttgattag

SEQ ID NO: 152785 - DNA, 3843 bp, Artificial Sequence
  derived and/or modified sequence
atggacccaagcgacttcccatctccctttgaccccctgaccctgcccgaaaaacccctggctggcgacctgcctgtggacatggaatttggagaggacctcctcgagtcacagaccgctcctacaagaggatgggctccaccaggcccttcgccctcgtcaggtgcactggatctccttgacacaccagccggactggaaaaggaccccggagtgttagatggagccaccgaactgctcggattaggagggcttctgtataaggccccttcaccacctgaggtggatcacggacctgaaggaaccctggcttgggacgccggagatcagacactcgaaccaggcccagggggtcagaccccagaggtagtccccccagatcctggggctggcgcaaattcatgctcccctgaaggcctgttagaaccactggcaccagattctcctattactttacagtcacctcacattgaggaggaggagactacctctattgcaaccgccagacggggaagccccggtcaggaagaagagctgccacaagggcagccccagagccccaatgctcccccaagcccgtctgtgggagagactctgggtgacgggatcaattccagtcaaactaaaccagggggaagctcacccccagcccacccttcactgccgggtgacggactcaccgccaaggccagcgaaaagcccccagaacgggtgcaaaagcggtccgagagggtcaggagggctgagccgccaaaacctgaagttgtcgatagcaccgagagcatcccagtctccgatgaagattccgacgcaatggtcgatgaccccaatgacgaggatttcgtgccatttcggcctcggcgatcacctaggatgtccttgcggagctcagtgagtcagagggctggccgatccgcggtgggtactaagatgacctgcgctcattgcaggactcctctgcagaagggccaaaccgcttaccagaggaagggcctgccacagttgttttgttcctcctcctgccttactaccttttccaagaaacctagtggtaagaaaacatgcactttctgcaaaaaagagatatggaacacaaaggacagcgtggtggcccaaaccgggtcaggagggagtttccatgaattctgcaccagtgtgtgcttaagtctgtatgaagctcagcagcagaggccaatacctcagtccggcgatcccgctgatgcaacccgatgctccatttgtcagaagaccggggaggtcttgcatgaagtaagcaatggctcggtggttcacaggctctgtagcgattcttgcttctccaagtttcgcgcaaacaaagggctcaaaacaaattgctgcgatcagtgtggcgcatatatatacaccaagacaggcagtcccggacccgagctgcttttccacgagggacaacaaaagagattttgcaatactacctgcttaggtgcctataaaaaaaagaacactagggtgtatccttgtgtgtggtgcaagactctctgtaagaacttcgagatgctcagccacgtggatcgcaacggaaagacttctctcttttgctccctctgttgtacaacctcatataaagtcaagcaagcaggtctgaccggcccaccacggccttgctctttctgtcgccgatccctctcagatccgtgttactataataaggtcgacaggaccgtctaccagttttgcagcccctcctgttggacgaagtttcagcgtaccagccccgaagggggaatccatctgtcctgccactattgtcacagtctcttcagcggaaagcccgaggtgctggattggcaggatcaggttttccagttctgctgcagggattgctgcgaggatttcaaacgactcagaggggtagtatctcaatgtgaacactgtcggcaggagaagcttctacatgagaagttgagattctccggtgtcgaaaaatctttctgttccgagggatgtgtgttgctgtacaaacaggatttcacgaaaaagttggggctgtgttgcatcacatgcacatattgtagccagacgtgtcagcgaggcgtgaccgaacagctggacggcagtacttgggatttttgttctgaagattgcaagtccaagtatcttctctggtattgcaaggccgcaagatgccatgcctgtaagcggcaaggtaaactcctggagacaatccactggagaggacagatccgacatttctgcaatcaacagtgcttgctccgcttctattctcagcagaaccagccgaacctggacactcagtctggtcccgaatctctgcttaactcccagtctcctgaaagcaaaccacagacgccttcccagacaaaagtggagaacagtaacaccgttcgcacccctgaagaaaacggaaaccttggtaagatcccggttaagaccagatctgcccctacagcgccaaccccacctccaccacctcctcctgctactcctaggaaaaacaaagctgcgatgtgcaagcccctcatgcagaatcgcggagtaagctgcaaagtggagatgaaatccaaaggaagccagaccgaggagtggaaaccccaggtcattgtgctcccaattccagtccctatcttcgtccctgtgccaatgcacttgtattgtcagaaggtcccggtccctttttctatgccaattcccgtacccgtaccaatgttcctccctacgactttagaatctaccgataaaatcgtagagaccatcgaggaactaaaagttaaaatcccttcgaacccattggaggcagatattctggcaatggccgagatgatagctgaggctgaagagcttgacaaagcttcaagcgacttgtgtgacctggtatccaaccaaagtgctgagggactgctggaggattgcgatttgttcgggcctgcccgagacgacgtcctggccatggccgtgaagatggcgaacgttttagacgaacccggacaggatttggaagccgacttccctaaaaatccactcgatataaaccccagtgtggattttctgtttgattgtggtctggtggggccagaagacgtgtccacagagcaggatctaccacgtacaatgcgcaagggacaaaagagacttgtcctgtcggagagctgctctcgggattcaatgagctcccagccctcctgcactggattgaattactcatacggcgtcaacgcctggaagtgttgggtacaatcaaagtatgctaatggagagacgagtaaagctaaacctatgcggatcaaggaggacattctggcctgttctgccgctgagctgaactacgggctggcccagttcgtaagagagataacacgacctaatggcgaaaggtatgaacctgacagcatttattacctttgtctgggtattcagcagtacctgctcgagaacaacagaatggtaaacatcttcacagatctctactacctcaccttcgtccaagagctgaacaaatcactgtccacctggcagccgacactgctgccaaacaacactggtccgggtaaacgaaagcgtgaggacgaggcaccaatccttgagcagcgagagaaccgtatgaaccccctgaggtgcccagtcaaattttacgagttttacctctctaaatgccccgaaagtctccgcacccgcaatgatgtgttttatttacagcctgaaaggagctgtattgccgagtctcccctctggtacagcgtaatccctatggatcgctcaatgttagagagtatgctaaataggatcttggctgtgcgggagatctacgaagaactggggcgtcccggagaggaagacttggactag

SEQ ID NO: 152786 - DNA, 4119 bp, Artificial Sequence
  derived and/or modified sequence
atggacccaagtgattttccgtccccctttgacccactgacattgcccgaaaagccactggccggtgatcttcctgtggacatggaatttggagaggatcttttggagagtcagaccgctcctacacggggatgggcaccaccagggccaagcccctcatccggcgctctggatctcctcgacacccccgctggccttgagaaggaccctggagtgttggacggggctactgaacttctcggtctcggcggtcttctatataaagcaccctcgccacccgaagttgaccatggccctgaaggtacattagcttgggatgccggagatcagactcttgaaccagggcctggaggtcaaactccggaagtagtccccccagatcccggtgcgggtgcgaatagttgttctcctgagggcctgctggaaccacttgctcctgatagccccatcaccctgcagtcccctcacattgaggaagaagagacgacatctatcgcaacggcacgacgaggcagcccaggacaagaggaagagttaccgcagggtcagccacagtctccaaacgctcctccgagtcctagtgtaggtgagactttaggtgatgggatcaactccagccagactaagcccggaggctcatcaccacctgcacacccctccctgccaggcgacggcctgacagcgaaggcttctgagaagcctcctgagcgagtccagaaacggagcgaacgggtccgaagggccgaacctccgaagccagaagtcgtggatagcacggagtctatccccgtgtctgacgaggatagcgatgccatggtggacgatcctaatgatgaggacttcgtgccctttaggcccagacgaagtcctcggatgtctttgcgttcctccgtctctcaaagggccggaagatctgctgttggcacaaagatgacatgtgcacattgcagaacgcctttgcagaaaggccagaccgcataccagcgcaagggtcttccacaactcttctgtagcagcagctgtctcacaactttctccaaaaagcccagcggaaaaaagacctgcacattttgcaagaaggagatttggaataccaaggactctgtggtcgcacaaactggaagtgggggatcgttccacgaattctgcactagcgtctgtctgtccttgtacgaagcccaacagcagcgccctataccccagtccggagaccctgccgatgccacccggtgttcgatctgtcagaagactggagaagtccttcatgaagtctctaatggttccgtcgtccatcggctatgctccgatagttgcttctccaagttccgcgcaaacaagggcctaaaaaccaactgctgtgatcaatgtggagcatacatatacaccaaaactggttcacccggaccagagctcctcttccatgaggggcaacaaaaaaggttttgtaacactacttgcttgggcgcttataagaaaaaaaacaccagagtatacccatgcgtctggtgcaagacactctgtaaaaacttcgagatgctgtcccacgtggacaggaacggtaaaacttcactgttctgttctctgtgctgcacaacttcctataaagtaaagcaggcaggcctcacaggtcccccacgaccttgtagcttttgcagacgttccttgtctgacccttgttactacaacaaagttgatcgcaccgtgtatcagttttgctctccctcatgttggaccaagtttcagcgcactagtcccgagggaggcatccacctgtcctgccactactgccactccctctttagcggcaagccggaagtcttggactggcaagaccaggttttccaattttgctgccgcgattgttgtgaggattttaaaaggctgcggggtgttgttagtcagtgcgagcattgccgacaggagaaattactgcatgagaagctgagattctcaggcgtggagaaatcattttgctccgaaggttgtgtcctgttgtataagcaggacttcacaaaaaaactcggcctgtgttgcatcacctgcacttactgctcacagacatgtcaacggggagtaacagagcagctggacggctcaacctgggacttttgctctgaggattgcaaaagtaaatatcttctctggtactgtaaggcagctcgatgccatgcctgcaaacggcagggcaaattgctagagacaattcactggagaggtcagatccggcacttctgtaatcaacagtgtctgctgcgcttctactcgcaacagaaccaaccaaacctggacactcaatcaggacccgagtccctcttaaattcccaatcccctgagtccaagccacaaaccccttcccaaactaaggtcgaaaacagcaatacggtgagaactcctgaggaaaatggcaatttgggcaaaatccccgtgaagactcggtcagctcccacggcccctacaccgccaccgccaccgcctcccgctactcccaggaagaataaggcggctatgtgtaaacctttaatgcagaatcgcggtgtcagctgcaaggtcgaaatgaagtccaagggctctcaaaccgaagaatggaagccacaagtgatagtcctgccaatccccgtgcccattttcgtcccggtacccatgcacctctattgccaaaaggtcccagtgcctttttctatgccaatccccgttcctgtgcccatgttcttgcccaccactttagaaagcaccgacaagattgtagaaactatcgaggagcttaaagtgaaaataccctcgaatcctcttgaagccgatattctcgcaatggctgaaatgattgccgaggccgaggaacttgacaaagcctcttccgatctgtgcgacttggtctctaaccagtccgctgagggcctgctcgaggactgtgaccttttcggaccagccagagatgacgtgctggctatggctgtaaagatggctaacgtgcttgacgagccaggccaggacctcgaagctgattttccgaaaaaccctcttgatatcaacccatcggtggactttctgtttgactgcggactcgtggggcctgaagacgttagtacagagcaggatttacccaggactatgcgaaaaggacaaaaacggttagtgctcagcgagtcctgctctcgagacagcatgagcagccagccatcctgcacaggcctcaactatagctatggtgtgaatgcatggaagtgctgggtccaatctaagtatgcgaatggggaaacttcaaagggcgacgagctgagattcgggccaaagccaatgagaataaaggaagacatcctagcgtgctccgccgctgagctgaactatggcctggcccagtttgtgagggagatcaccagacctaatggcgagcgctacgagcccgacagtatttactacctgtgcctcgggatccagcagtatctattggagaataaccgtatggtcaatatctttaccgatctctattatcttacttttgtccaggaacttaataaatctctctccacctggcaacccactctgctaccaaacaacacagtctttagtcgagtcgaagaagaacatctgtgggagtgtaagcagttgggcgtctacagccccttcgtcctcctgaatactctcatgttctttaacactaaattctttgggctccagacggcagaggagcacatgcagctcagtttcaccaatgtggtgaggcagtcccggaagtgcacaacaccacggggaacgacaaaagtagtctcaatacgttactacgctccagtgcgacagagaaaaggacgggatactggtcctggcaagagaaagagagaagacgaggcacctatcctggaacagcgggagaaccggatgaatcccctgaggtgtcccgtcaagttctacgaattttatctgagcaaatgtccagagtccctaaggacgcgcaacgacgtattctacctgcaaccagaacggtcctgtatagccgagtcccctttatggtatagtgtcatacccatggaccgctcaatgctggaatcaatgctaaataggatactcgccgttcgggaaatttatgaggagctggggaggcctggggaagaggatctggattag

SEQ ID NO: 152787 - DNA, 5536 bp, Artificial Sequence
  derived and/or modified sequence
aaaggggccgcgacccctgtcccggctgctagggagggaggtagagaaggagcgcggggccgtcgctgtctgcagttctaggcttgtagcctttgcactaaccctgccgcagtacatatccagccatactcatggaccccagtgatttccccagtccatttgacccattgaccctgccagagaagcccctggctggagacctaccagtagacatggaatttggagaggatctactggaatcccagactgccccaactcgaggatgggccccccctggcccttctccatcctcgggagccctggacctgcttgatacccctgctggcctggaaaaagaccctggagtcctggatggagccactgagttgctggggctgggggggctgctctataaagccccctctcccccggaggtggaccacggtcctgagggaaccctggcatgggatgcaggagatcagaccctagagcctggaccagggggccagacccctgaggtggtaccacctgatccaggggctggggcaaattcctgttcacctgaggggctactagagcctttggctccagattctccaataacactgcagtccccacatattgaagaggaggagaccacctccatagctactgcaagaaggggctcccctgggcaggaggaggagcttccccaagggcagccacagagcccaaatgccccgcctagcccttcagtgggagagactctgggggatggaatcaacagttctcagaccaaacctgggggctctagcccccctgcacatccttccttgccaggagatggcctgactgcgaaggcgagtgagaagccgcctgaacggaagagaagcgagcgcgttaggagagcagaacctccaaaacctgaggttgtagattccactgagagcattccagtgtcagatgaggattctgatgccatggtagatgaccccaatgatgaggactttgtgccattccggccccggcgctctcctcgcatgtccctacgctcaagtgtgtcacaaagggccgggcgctctgcagtgggcaccaagatgacttgtgcacattgccggacaccactgcagaaggggcagactgcctatcagcgcaaggggctgcctcagctcttctgctcgtcatcctgcctcaccactttctccaagaagccctcgggcaaaaagacctgtaccttctgcaagaaggagatctggaacaccaaggactcggttgtggcgcagactggttctggaggctccttccatgagttctgcacatccgtctgtctctccctgtatgaggcccagcagcagcgcccgatcccccagtctggggatcccgccgacgctactcgctgcagcatatgccagaagactggagaggtcctgcacgaggtcagcaatggcagcgtggtacaccggctctgcagcgattcttgcttctccaaattccgggccaacaagggactgaaaaccaactgttgtgaccagtgtggggcttacatctacaccaagaccgggagtcctggccctgagctcctcttccacgagggccaacaaaagcggttctgcaacacaacctgcttgggggcgtacaagaagaaaaacacacgtgtgtacccatgtgtctggtgcaagaccctgtgtaagaactttgagatgctatcacatgtggatcgtaatggcaagaccagcttgttctgttccctgtgctgtaccacttcttacaaagtgaagcaggcagggctcactggccctccccgaccctgcagcttctgccgccgcagcctctctgacccctgttactacaacaaggttgaccgcacagtctaccagttctgcagccccagctgctggaccaagttccagcgcacaagccctgaggggggcattcacctgagctgtcactactgtcacagcctcttcagtggcaagcctgaggtcttggactggcaggaccaagtgttccagttctgctgccgtgattgctgtgaggacttcaagcggcttcggggtgtggtgtcccagtgtgagcactgtcggcaggagaaactcttgcatgagaaactccgattcagcggagtggagaaaagcttctgcagcgaaggctgtgtgctgctgtacaaacaggacttcactaagaagctgggcttgtgctgtatcacttgtacttactgctcccagacctgccagcgcggagtcaccgagcaactggatggcagcacctgggacttctgcagtgaggactgtaagagcaagtacctgctgtggtactgcaaggctgcccggtgccatgcgtgtaagcgccaggggaagctgctggagaccatccactggcgtgggcagatccgtcatttctgcaaccagcagtgtcttctgcgtttctatagccagcagaaccaacccaacctggatacccagagtgggcccgagagcctcctgaacagtcagtctcctgagtcaaaaccccagacaccctctcaaaccaaagtggagaacagcaacacagtgaggaccccagaggaaaatgggaatttgggcaagatccctgtgaagacccgatcagctcccactgctcccacccctccacccccaccacccccagcaacaccccgcaaaaacaaggctgccatgtgtaagccactgatgcagaatcggggcgtctcctgcaaggtggagatgaagtccaaaggaagtcaaacagaagagtggaagccacaggtgatcgtgctgcccatcccagtgcccatcttcgtgccagtgcctatgcatctgtactgccagaaagtcccggtgcctttctcgatgcctatcccggtgcctgtgcccatgttcttgcccactaccttggagagcacagacaagattgtagagaccattgaggagctgaaggtgaagatcccttccaaccccttggaggccgacatcctggctatggcagaaatgattgcagaggctgaggagttagacaaggcctcatctgacctttgtgatcttgtgagcaaccagagtgcagagggactcctggaagactgtgacctgtttgggcctgctcgagatgatgtcctggccatggcagtcaagatggccaatgtcttggatgagcctgggcaagacttggaggcagacttccctaagaatcctctggacattaatcccagtgtagacttcctctttgattgtggcctggtagggcctgaggatgtgtctactgaacaagaccttccccgaaccatgaggaagggtcaaaagcggctggtgctttccgaaagctgctcccgggactccatgagcagtcagcctagttgtaccgggctcaactattcatatggtgtcaatgcttggaagtgctgggtgcagtcaaaatatgccaatggagaaaccagcaagggtgatgagctgcgctttggccccaaacccatgcgtatcaaagaggatattctcgcctgctcagctgctgagctcaactacggtctggcccagtttgtgagagaaatcactcggcccaatggtgaacgatatgaacctgacagtatctactatttgtgtcttggcatccagcagtacttgctggaaaataaccggatggtgaacattttcacggacctttactacctgacttttgttcaagaactcaacaagtctctgagtacctggcagcccacactcctccccaacaatacggtgttctctcgagtggaggaggagcacctctgggagtgtaagcaactgggggtctactcgccctttgtcctcctcaacaccctcatgttcttcaacactaagttttttgggctgcagacagctgaggaacacatgcaactctccttcaccaatgtggtgcggcagtcccgcaagtgtaccacccctcggggcaccaccaaggtggtgagcatccgctactatgccccagtccgccagaggaaagggcgagacacgggtcctggaaaacggaagagagaagatgaagcccctatcttagagcagcgtgagaaccgcatgaatcccctccgctgccctgtcaagttctatgaattctatctctcaaaatgtcctgaaagcctccggactcgcaacgatgtgttctacctgcaacctgaacggtcctgcatcgccgagtcacctctctggtattctgtgatccccatggaccgcagcatgttggagagcatgctcaatcgcatcctggctgtgcgcgagatttatgaggaactgggtcgtcctggggaggaagacctggactgagctcgtgtgccatccatatccatctttcacatcaatgtctgtcctgtggccatgtccctcagggtgacaggcccaggaaccaatgctactcattctgaagggccctgactgctcctttccgctcacccattccctgccttctctaggaaccctggcttttatcttcttccgtaccacttgacaaccatggggccctggtcttctgtactcaggggctggtctcccagtgatgggcaaaagccagcttgcccgttttctttatgcttcagagtaaacccctccttctgggtccagactctgggtggagtgttaatagctctggtgatcctgttggctttgggtttcctgacccatcccgcataggtagagcctcttgttcctaggcatgacctagggaaaaacccagctgccttctctgccctgtgcccactcccttctctactcttccccagcaccatgccaaaaggtcttatctgaaaggtaagaaataaacaatgaaagcgatgaggggaccatttacataaaacacagagcttagacactcttcccctcctatgaaataattggttgttggcaccatctcaccaccgcatatccctcaccccctcggcaagcaccaatccttggtgctgccgtttttaaaatcttccaaatgcctttttttcctcagaggcagagaatgactaagtacggggagcagactcctgttgtgcagactcctgtccccttggtttctgtgtttgtctctctgccatcttaggttgccatgagccatggtgtcaacatgcttagccccctctgtaactgcctccctttagttcaatggacagacctcccaaggcaaaaactaccttctgacttgggttgaggctgggttcccctctattgttcccctatcataagagctaggccaagcctatgggaccttgagtcatgcaggatgggatctgtggtcaaaggacaggcgaggagctgtgggcgcagggcctgccgccactgcctacatcttctctcttccccatcttgcattggaggtcccagaaaacaattagcttctggcaaagggggtacccacttctttccctgttgactttgctgtttcccaggctcctttttgtgtttttataactgtcaccagttagccactgtttaaattgtatatattgttctgaggcgcctggcctgtcccttcagtgagccatgcccacccttgtgttgtagtgagaagctgttgtcacgactaaccttctgtctctgaaattgtttgtttcaaataaagagttaaaattgtc

SEQ ID NO: 152788 - DNA, 5593 bp, Artificial Sequence
  derived and/or modified sequence
attgaggggggcggacgccgagggggtgaacacgagtgggaagctaagagagacacggggagggggaggggaccgggaaccatttgaatgagaggaggggatcacgggtagagtgggctccaggaggtagggcgagcagggtgtgacgggggccagactcttgagccagtacatatccagccatactcatggaccccagtgatttccccagtccatttgacccattgaccctgccagagaagcccctggctggagacctaccagtagacatggaatttggagaggatctactggaatcccagactgccccaactcgaggatgggccccccctggcccttctccatcctcgggagccctggacctgcttgatacccctgctggcctggaaaaagaccctggagtcctggatggagccactgagttgctggggctgggggggctgctctataaagccccctctcccccggaggtggaccacggtcctgagggaaccctggcatgggatgcaggagatcagaccctagagcctggaccagggggccagacccctgaggtggtaccacctgatccaggggctggggcaaattcctgttcacctgaggggctactagagcctttggctccagattctccaataacactgcagtccccacatattgaagaggaggagaccacctccatagctactgcaagaaggggctcccctgggcaggaggaggagcttccccaagggcagccacagagcccaaatgccccgcctagcccttcagtgggagagactctgggggatggaatcaacagttctcagaccaaacctgggggctctagcccccctgcacatccttccttgccaggagatggcctgactgcgaaggcgagtgagaagccgcctgaacggaagagaagcgagcgcgttaggagagcagaacctccaaaacctgaggttgtagattccactgagagcattccagtgtcagatgaggattctgatgccatggtagatgaccccaatgatgaggactttgtgccattccggccccggcgctctcctcgcatgtccctacgctcaagtgtgtcacaaagggccgggcgctctgcagtgggcaccaagatgacttgtgcacattgccggacaccactgcagaaggggcagactgcctatcagcgcaaggggctgcctcagctcttctgctcgtcatcctgcctcaccactttctccaagaagccctcgggcaaaaagacctgtaccttctgcaagaaggagatctggaacaccaaggactcggttgtggcgcagactggttctggaggctccttccatgagttctgcacatccgtctgtctctccctgtatgaggcccagcagcagcgcccgatcccccagtctggggatcccgccgacgctactcgctgcagcatatgccagaagactggagaggtcctgcacgaggtcagcaatggcagcgtggtacaccggctctgcagcgattcttgcttctccaaattccgggccaacaagggactgaaaaccaactgttgtgaccagtgtggggcttacatctacaccaagaccgggagtcctggccctgagctcctcttccacgagggccaacaaaagcggttctgcaacacaacctgcttgggggcgtacaagaagaaaaacacacgtgtgtacccatgtgtctggtgcaagaccctgtgtaagaactttgagatgctatcacatgtggatcgtaatggcaagaccagcttgttctgttccctgtgctgtaccacttcttacaaagtgaagcaggcagggctcactggccctccccgaccctgcagcttctgccgccgcagcctctctgacccctgttactacaacaaggttgaccgcacagtctaccagttctgcagccccagctgctggaccaagttccagcgcacaagccctgaggggggcattcacctgagctgtcactactgtcacagcctcttcagtggcaagcctgaggtcttggactggcaggaccaagtgttccagttctgctgccgtgattgctgtgaggacttcaagcggcttcggggtgtggtgtcccagtgtgagcactgtcggcaggagaaactcttgcatgagaaactccgattcagcggagtggagaaaagcttctgcagcgaaggctgtgtgctgctgtacaaacaggacttcactaagaagctgggcttgtgctgtatcacttgtacttactgctcccagacctgccagcgcggagtcaccgagcaactggatggcagcacctgggacttctgcagtgaggactgtaagagcaagtacctgctgtggtactgcaaggctgcccggtgccatgcgtgtaagcgccaggggaagctgctggagaccatccactggcgtgggcagatccgtcatttctgcaaccagcagtgtcttctgcgtttctatagccagcagaaccaacccaacctggatacccagagtgggcccgagagcctcctgaacagtcagtctcctgagtcaaaaccccagacaccctctcaaaccaaagtggagaacagcaacacagtgaggaccccagaggaaaatgggaatttgggcaagatccctgtgaagacccgatcagctcccactgctcccacccctccacccccaccacccccagcaacaccccgcaaaaacaaggctgccatgtgtaagccactgatgcagaatcggggcgtctcctgcaaggtggagatgaagtccaaaggaagtcaaacagaagagtggaagccacaggtgatcgtgctgcccatcccagtgcccatcttcgtgccagtgcctatgcatctgtactgccagaaagtcccggtgcctttctcgatgcctatcccggtgcctgtgcccatgttcttgcccactaccttggagagcacagacaagattgtagagaccattgaggagctgaaggtgaagatcccttccaaccccttggaggccgacatcctggctatggcagaaatgattgcagaggctgaggagttagacaaggcctcatctgacctttgtgatcttgtgagcaaccagagtgcagagggactcctggaagactgtgacctgtttgggcctgctcgagatgatgtcctggccatggcagtcaagatggccaatgtcttggatgagcctgggcaagacttggaggcagacttccctaagaatcctctggacattaatcccagtgtagacttcctctttgattgtggcctggtagggcctgaggatgtgtctactgaacaagaccttccccgaaccatgaggaagggtcaaaagcggctggtgctttccgaaagctgctcccgggactccatgagcagtcagcctagttgtaccgggctcaactattcatatggtgtcaatgcttggaagtgctgggtgcagtcaaaatatgccaatggagaaaccagcaagggtgatgagctgcgctttggccccaaacccatgcgtatcaaagaggatattctcgcctgctcagctgctgagctcaactacggtctggcccagtttgtgagagaaatcactcggcccaatggtgaacgatatgaacctgacagtatctactatttgtgtcttggcatccagcagtacttgctggaaaataaccggatggtgaacattttcacggacctttactacctgacttttgttcaagaactcaacaagtctctgagtacctggcagcccacactcctccccaacaatacggtgttctctcgagtggaggaggagcacctctgggagtgtaagcaactgggggtctactcgccctttgtcctcctcaacaccctcatgttcttcaacactaagttttttgggctgcagacagctgaggaacacatgcaactctccttcaccaatgtggtgcggcagtcccgcaagtgtaccacccctcggggcaccaccaaggtggtgagcatccgctactatgccccagtccgccagaggaaagggcgagacacgggtcctggaaaacggaagagagaagatgaagcccctatcttagagcagcgtgagaaccgcatgaatcccctccgctgccctgtcaagttctatgaattctatctctcaaaatgtcctgaaagcctccggactcgcaacgatgtgttctacctgcaacctgaacggtcctgcatcgccgagtcacctctctggtattctgtgatccccatggaccgcagcatgttggagagcatgctcaatcgcatcctggctgtgcgcgagatttatgaggaactgggtcgtcctggggaggaagacctggactgagctcgtgtgccatccatatccatctttcacatcaatgtctgtcctgtggccatgtccctcagggtgacaggcccaggaaccaatgctactcattctgaagggccctgactgctcctttccgctcacccattccctgccttctctaggaaccctggcttttatcttcttccgtaccacttgacaaccatggggccctggtcttctgtactcaggggctggtctcccagtgatgggcaaaagccagcttgcccgttttctttatgcttcagagtaaacccctccttctgggtccagactctgggtggagtgttaatagctctggtgatcctgttggctttgggtttcctgacccatcccgcataggtagagcctcttgttcctaggcatgacctagggaaaaacccagctgccttctctgccctgtgcccactcccttctctactcttccccagcaccatgccaaaaggtcttatctgaaaggtaagaaataaacaatgaaagcgatgaggggaccatttacataaaacacagagcttagacactcttcccctcctatgaaataattggttgttggcaccatctcaccaccgcatatccctcaccccctcggcaagcaccaatccttggtgctgccgtttttaaaatcttccaaatgcctttttttcctcagaggcagagaatgactaagtacggggagcagactcctgttgtgcagactcctgtccccttggtttctgtgtttgtctctctgccatcttaggttgccatgagccatggtgtcaacatgcttagccccctctgtaactgcctccctttagttcaatggacagacctcccaaggcaaaaactaccttctgacttgggttgaggctgggttcccctctattgttcccctatcataagagctaggccaagcctatgggaccttgagtcatgcaggatgggatctgtggtcaaaggacaggcgaggagctgtgggcgcagggcctgccgccactgcctacatcttctctcttccccatcttgcattggaggtcccagaaaacaattagcttctggcaaagggggtacccacttctttccctgttgactttgctgtttcccaggctcctttttgtgtttttataactgtcaccagttagccactgtttaaattgtatatattgttctgaggcgcctggcctgtcccttcagtgagccatgcccacccttgtgttgtagtgagaagctgttgtcacgactaaccttctgtctctgaaattgtttgtttcaaataaagagttaaaattgtc

SEQ ID NO: 152789 - DNA, 5253 bp, Artificial Sequence
  derived and/or modified sequence
gacccctgtcccggctgctagggagggaggtagagaaggagcgcggggccgtcgctgtctgcagttctaggcttgtagcctttgcactaaccctgccgcagtacatatccagccatactcatggaccccagtgatttccccagtccatttgacccattgaccctgccagagaagcccctggctggagacctaccagtagacatggaatttggagaggatctactggaatcccagactgccccaactcgaggatgggccccccctggcccttctccatcctcgggagccctggacctgcttgatacccctgctggcctggaaaaagaccctggagtcctggatggagccactgagttgctggggctgggggggctgctctataaagccccctctcccccggaggtggaccacggtcctgagggaaccctggcatgggatgcaggagatcagaccctagagcctggaccagggggccagacccctgaggtggtaccacctgatccaggggctggggcaaattcctgttcacctgaggggctactagagcctttggctccagattctccaataacactgcagtccccacatattgaagaggaggagaccacctccatagctactgcaagaaggggctcccctgggcaggaggaggagcttccccaagggcagccacagagcccaaatgccccgcctagcccttcagtgggagagactctgggggatggaatcaacagttctcagaccaaacctgggggctctagcccccctgcacatccttccttgccaggagatggcctgactgcgaaggcgagtgagaagccgcctgaacgggtacagaagagaagcgagcgcgttaggagagcagaacctccaaaacctgaggttgtagattccactgagagcattccagtgtcagatgaggattctgatgccatggtagatgaccccaatgatgaggactttgtgccattccggccccggcgctctcctcgcatgtccctacgctcaagtgtgtcacaaagggccgggcgctctgcagtgggcaccaagatgacttgtgcacattgccggacaccactgcagaaggggcagactgcctatcagcgcaaggggctgcctcagctcttctgctcgtcatcctgcctcaccactttctccaagaagccctcgggcaaaaagacctgtaccttctgcaagaaggagatctggaacaccaaggactcggttgtggcgcagactggttctggaggctccttccatgagttctgcacatccgtctgtctctccctgtatgaggcccagcagcagcgcccgatcccccagtctggggatcccgccgacgctactcgctgcagcatatgccagaagactggagaggtcctgcacgaggtcagcaatggcagcgtggtacaccggctctgcagcgattcttgcttctccaaattccgggccaacaagggactgaaaaccaactgttgtgaccagtgtggggcttacatctacaccaagaccgggagtcctggccctgagctcctcttccacgagggccaacaaaagcggttctgcaacacaacctgcttgggggcgtacaagaagaaaaacacacgtgtgtacccatgtgtctggtgcaagaccctgtgtaagaactttgagatgctatcacatgtggatcgtaatggcaagaccagcttgttctgttccctgtgctgtaccacttcttacaaagtgaagcaggcagggctcactggccctccccgaccctgcagcttctgccgccgcagcctctctgacccctgttactacaacaaggttgaccgcacagtctaccagttctgcagccccagctgctggaccaagttccagcgcacaagccctgaggggggcattcacctgagctgtcactactgtcacagcctcttcagtggcaagcctgaggtcttggactggcaggaccaagtgttccagttctgctgccgtgattgctgtgaggacttcaagcggcttcggggtgtggtgtcccagtgtgagcactgtcggcaggagaaactcttgcatgagaaactccgattcagcggagtggagaaaagcttctgcagcgaaggctgtgtgctgctgtacaaacaggacttcactaagaagctgggcttgtgctgtatcacttgtacttactgctcccagacctgccagcgcggagtcaccgagcaactggatggcagcacctgggacttctgcagtgaggactgtaagagcaagtacctgctgtggtactgcaaggctgcccggtgccatgcgtgtaagcgccaggggaagctgctggagaccatccactggcgtgggcagatccgtcatttctgcaaccagcagtgtcttctgcgtttctatagccagcagaaccaacccaacctggatacccagagtgggcccgagagcctcctgaacagtcagtctcctgagtcaaaaccccagacaccctctcaaaccaaagtggagaacagcaacacagtgaggaccccagaggaaaatgggaatttgggcaagatccctgtgaagacccgatcagctcccactgctcccacccctccacccccaccacccccagcaacaccccgcaaaaacaaggctgccatgtgtaagccactgatgcagaatcggggcgtctcctgcaaggtggagatgaagtccaaaggaagtcaaacagaagagtggaagccacaggtgatcgtgctgcccatcccagtgcccatcttcgtgccagtgcctatgcatctgtactgccagaaagtcccggtgcctttctcgatgcctatcccggtgcctgtgcccatgttcttgcccactaccttggagagcacagacaagattgtagagaccattgaggagctgaaggtgaagatcccttccaaccccttggaggccgacatcctggctatggcagaaatgattgcagaggctgaggagttagacaaggcctcatctgacctttgtgatcttgtgagcaaccagagtgcagagggactcctggaagactgtgacctgtttgggcctgctcgagatgatgtcctggccatggcagtcaagatggccaatgtcttggatgagcctgggcaagacttggaggcagacttccctaagaatcctctggacattaatcccagtgtagacttcctctttgattgtggcctggtagggcctgaggatgtgtctactgaacaagaccttccccgaaccatgaggaagggtcaaaagcggctggtgctttccgaaagctgctcccgggactccatgagcagtcagcctagttgtaccgggctcaactattcatatggtgtcaatgcttggaagtgctgggtgcagtcaaaatatgccaatggagaaaccagcaaggccaaacccatgcgtatcaaagaggatattctcgcctgctcagctgctgagctcaactacggtctggcccagtttgtgagagaaatcactcggcccaatggtgaacgatatgaacctgacagtatctactatttgtgtcttggcatccagcagtacttgctggaaaataaccggatggtgaacattttcacggacctttactacctgacttttgttcaagaactcaacaagtctctgagtacctggcagcccacactcctccccaacaacacgggtcctggaaaacggaagagagaagatgaagcccctatcttagagcagcgtgagaaccgcatgaatcccctccgctgccctgtcaagttctatgaattctatctctcaaaatgtcctgaaagcctccggactcgcaacgatgtgttctacctgcaacctgaacggtcctgcatcgccgagtcacctctctggtattctgtgatccccatggaccgcagcatgttggagagcatgctcaatcgcatcctggctgtgcgcgagatttatgaggaactgggtcgtcctggggaggaagacctggactgagctcgtgtgccatccatatccatctttcacatcaatgtctgtcctgtggccatgtccctcagggtgacaggcccaggaaccaatgctactcattctgaagggccctgactgctcctttccgctcacccattccctgccttctctaggaaccctggcttttatcttcttccgtaccacttgacaaccatggggccctggtcttctgtactcaggggctggtctcccagtgatgggcaaaagccagcttgcccgttttctttatgcttcagagtaaacccctccttctgggtccagactctgggtggagtgttaatagctctggtgatcctgttggctttgggtttcctgacccatcccgcataggtagagcctcttgttcctaggcatgacctagggaaaaacccagctgccttctctgccctgtgcccactcccttctctactcttccccagcaccatgccaaaaggtcttatctgaaaggtaagaaataaacaatgaaagcgatgaggggaccatttacataaaacacagagcttagacactcttcccctcctatgaaataattggttgttggcaccatctcaccaccgcatatccctcaccccctcggcaagcaccaatccttggtgctgccgtttttaaaatcttccaaatgcctttttttcctcagaggcagagaatgactaagtacggggagcagactcctgttgtgcagactcctgtccccttggtttctgtgtttgtctctctgccatcttaggttgccatgagccatggtgtcaacatgcttagccccctctgtaactgcctccctttagttcaatggacagacctcccaaggcaaaaactaccttctgacttgggttgaggctgggttcccctctattgttcccctatcataagagctaggccaagcctatgggaccttgagtcatgcaggatgggatctgtggtcaaaggacaggcgaggagctgtgggcgcagggcctgccgccactgcctacatcttctctcttccccatcttgcattggaggtcccagaaaacaattagcttctggcaaagggggtacccacttctttccctgttgactttgctgtttcccaggctcctttttgtgtttttataactgtcaccagttagccactgtttaaattgtatatattgttctgaggcgcctggcctgtcccttcagtgagccatgcccacccttgtgttgtagtgagaagctgttgtcacgactaaccttctgtctctgaaattgtttgtttcaaataaagagttaaaattg

SEQ ID NO: 152790 - DNA, 6021 bp, Artificial Sequence
  derived and/or modified sequence
tccatagataatacagggagctcctgcaggaagactcagggagaagatcccagaacttaccctaagactgttgagagagtagggggtagctttgcaggacctggtttgggggtcatcaagcagtaacggttactgcacaggcgttgccactgagccagagccatttaacccgacctgtgtggctggggatcaagcttcagataccccataactctgactctcagactgttttgggggccccgtggctgcagacaagggaaggaggggcacgtgagggctgggtccctgcctccccccgtcctccgctgtcactcactaccccaacagtcgcccagggggcgggacccggagaggtggggatgggggagggtaatcttggcaggcgcctgctgcatggcgtaggtagggactattgaggggggcggacgccgagggggtgaacacgagtgggaagctaagagagacacggggagggggaggggaccgggaaccatttgaatgagaggaggggatcacgggtagagtgggctccaggaggtagggcgagcagggtgtgacgggggccagactcttgagccaggtaaggggagcagtacatatccagccatactcatggaccccagtgatttccccagtccatttgacccattgaccctgccagagaagcccctggctggagacctaccagtagacatggaatttggagaggatctactggaatcccagactgccccaactcgaggatgggccccccctggcccttctccatcctcgggagccctggacctgcttgatacccctgctggcctggaaaaagaccctggagtcctggatggagccactgagttgctggggctgggggggctgctctataaagccccctctcccccggaggtggaccacggtcctgagggaaccctggcatgggatgcaggagatcagaccctagagcctggaccagggggccagacccctgaggtggtaccacctgatccaggggctggggcaaattcctgttcacctgaggggctactagagcctttggctccagattctccaataacactgcagtccccacatattgaagaggaggagaccacctccatagctactgcaagaaggggctcccctgggcaggaggaggagcttccccaagggcagccacagagcccaaatgccccgcctagcccttcagtgggagagactctgggggatggaatcaacagttctcagaccaaacctgggggctctagcccccctgcacatccttccttgccaggagatggcctgactgcgaaggcgagtgagaagccgcctgaacgggtacagaagagaagcgagcgcgttaggagagcagaacctccaaaacctgaggttgtagattccactgagagcattccagtgtcagatgaggattctgatgccatggtagatgaccccaatgatgaggactttgtgccattccggccccggcgctctcctcgcatgtccctacgctcaagtgtgtcacaaagggccgggcgctctgcagtgggcaccaagatgacttgtgcacattgccggacaccactgcagaaggggcagactgcctatcagcgcaaggggctgcctcagctcttctgctcgtcatcctgcctcaccactttctccaagaagccctcgggcaaaaagacctgtaccttctgcaagaaggagatctggaacaccaaggactcggttgtggcgcagactggttctggaggctccttccatgagttctgcacatccgtctgtctctccctgtatgaggcccagcagcagcgcccgatcccccagtctggggatcccgccgacgctactcgctgcagcatatgccagaagactggagaggtcctgcacgaggtcagcaatggcagcgtggtacaccggctctgcagcgattcttgcttctccaaattccgggccaacaagggactgaaaaccaactgttgtgaccagtgtggggcttacatctacaccaagaccgggagtcctggccctgagctcctcttccacgagggccaacaaaagcggttctgcaacacaacctgcttgggggcgtacaagaagaaaaacacacgtgtgtacccatgtgtctggtgcaagaccctgtgtaagaactttgagatgctatcacatgtggatcgtaatggcaagaccagcttgttctgttccctgtgctgtaccacttcttacaaagtgaagcaggcagggctcactggccctccccgaccctgcagcttctgccgccgcagcctctctgacccctgttactacaacaaggttgaccgcacagtctaccagttctgcagccccagctgctggaccaagttccagcgcacaagccctgaggggggcattcacctgagctgtcactactgtcacagcctcttcagtggcaagcctgaggtcttggactggcaggaccaagtgttccagttctgctgccgtgattgctgtgaggacttcaagcggcttcggggtgtggtgtcccagtgtgagcactgtcggcaggagaaactcttgcatgagaaactccgattcagcggagtggagaaaagcttctgcagcgaaggctgtgtgctgctgtacaaacaggacttcactaagaagctgggcttgtgctgtatcacttgtacttactgctcccagacctgccagcgcggagtcaccgagcaactggatggcagcacctgggacttctgcagtgaggactgtaagagcaagtacctgctgtggtactgcaaggctgcccggtgccatgcgtgtaagcgccaggggaagctgctggagaccatccactggcgtgggcagatccgtcatttctgcaaccagcagtgtcttctgcgtttctatagccagcagaaccaacccaacctggatacccagagtgggcccgagagcctcctgaacagtcagtctcctgagtcaaaaccccagacaccctctcaaaccaaagtggagaacagcaacacagtgaggaccccagaggaaaatgggaatttgggcaagatccctgtgaagacccgatcagctcccactgctcccacccctccacccccaccacccccagcaacaccccgcaaaaacaaggctgccatgtgtaagccactgatgcagaatcggggcgtctcctgcaaggtggagatgaagtccaaaggaagtcaaacagaagagtggaagccacaggtgatcgtgctgcccatcccagtgcccatcttcgtgccagtgcctatgcatctgtactgccagaaagtcccggtgcctttctcgatgcctatcccggtgcctgtgcccatgttcttgcccactaccttggagagcacagacaagattgtagagaccattgaggagctgaaggtgaagatcccttccaaccccttggaggccgacatcctggctatggcagaaatgattgcagaggctgaggagttagacaaggcctcatctgacctttgtgatcttgtgagcaaccagagtgcagagggactcctggaagactgtgacctgtttgggcctgctcgagatgatgtcctggccatggcagtcaagatggccaatgtcttggatgagcctgggcaagacttggaggcagacttccctaagaatcctctggacattaatcccagtgtagacttcctctttgattgtggcctggtagggcctgaggatgtgtctactgaacaagaccttccccgaaccatgaggaagggtcaaaagcggctggtgctttccgaaagctgctcccgggactccatgagcagtcagcctagttgtaccgggctcaactattcatatggtgtcaatgcttggaagtgctgggtgcagtcaaaatatgccaatggagaaaccagcaagggtgatgagctgcgctttggccccaaacccatgcgtatcaaagaggatattctcgcctgctcagctgctgagctcaactacggtctggcccagtttgtgagagaaatcactcggcccaatggtgaacgatatgaacctgacagtatctactatttgtgtcttggcatccagcagtacttgctggaaaataaccggatggtgaacattttcacggacctttactacctgacttttgttcaagaactcaacaagtctctgagtacctggcagcccacactcctccccaacaatacggtgttctctcgagtggaggaggagcacctctgggagtgtaagcaactgggggtctactcgccctttgtcctcctcaacaccctcatgttcttcaacactaagttttttgggctgcagacagctgaggaacacatgcaactctccttcaccaatgtggtgcggcagtcccgcaagtgtaccacccctcggggcaccaccaaggtggtgagcatccgctactatgccccagtccgccagaggaaagggcgagacacgggtcctggaaaacggaagagagaagatgaagcccctatcttagagcagcgtgagaaccgcatgaatcccctccgctgccctgtcaagttctatgaattctatctctcaaaatgtcctgaaagcctccggactcgcaacgatgtgttctacctgcaacctgaacggtcctgcatcgccgagtcacctctctggtattctgtgatccccatggaccgcagcatgttggagagcatgctcaatcgcatcctggctgtgcgcgagatttatgaggaactgggtcgtcctggggaggaagacctggactgagctcgtgtgccatccatatccatctttcacatcaatgtctgtcctgtggccatgtccctcagggtgacaggcccaggaaccaatgctactcattctgaagggccctgactgctcctttccgctcacccattccctgccttctctaggaaccctggcttttatcttcttccgtaccacttgacaaccatggggccctggtcttctgtactcaggggctggtctcccagtgatgggcaaaagccagcttgcccgttttctttatgcttcagagtaaacccctccttctgggtccagactctgggtggagtgttaatagctctggtgatcctgttggctttgggtttcctgacccatcccgcataggtagagcctcttgttcctaggcatgacctagggaaaaacccagctgccttctctgccctgtgcccactcccttctctactcttccccagcaccatgccaaaaggtcttatctgaaaggtaagaaataaacaatgaaagcgatgaggggaccatttacataaaacacagagcttagacactcttcccctcctatgaaataattggttgttggcaccatctcaccaccgcatatccctcaccccctcggcaagcaccaatccttggtgctgccgtttttaaaatcttccaaatgcctttttttcctcagaggcagagaatgactaagtacggggagcagactcctgttgtgcagactcctgtccccttggtttctgtgtttgtctctctgccatcttaggttgccatgagccatggtgtcaacatgcttagccccctctgtaactgcctccctttagttcaatggacagacctcccaaggcaaaaactaccttctgacttgggttgaggctgggttcccctctattgttcccctatcataagagctaggccaagcctatgggaccttgagtcatgcaggatgggatctgtggtcaaaggacaggcgaggagctgtgggcgcagggcctgccgccactgcctacatcttctctcttccccatcttgcattggaggtcccagaaaacaattagcttctggcaaagggggtacccacttctttccctgttgactttgctgtttcccaggctcctttttgtgtttttataactgtcaccagttagccactgtttaaattgtatatattgttctgaggcgcctggcctgtcccttcagtgagccatgcccacccttgtgttgtagtgagaagctgttgtcacgactaaccttctgtctctgaaattgtttgtttcaaataaagagttaaaattg

SEQ ID NO: 152791 - protein, 557 aa, Artificial Sequence
  derived and/or modified sequence
MESERSKRMGNACIPLKRIAYFLCLLSALLLTEGKKPAKPKCPAVCTCTKDNALCENARSIPRTVPPDVISLSFVRSGFTEISEGSFLFTPSLQLLLFTSNSFDVISDDAFIGLPHLEYLFIENNNIKSISRHTFRGLKSLIHLSLANNNLQTLPKDIFKGLDSLTNVDLRGNSFNCDCKLKWLVEWLGHTNATVEDIYCEGPPEYKKRKINSLSSKDFDCIITEFAKSQDLPYQSLSIDTFSYLNDEYVVIAQPFTGKCIFLEWDHVEKTFRNYDNITGTSTVVCKPIVIETQLYVIVAQLFGGSHIYKRDSFANKFIKIQDIEILKIRKPNDIETFKIENNWYFVVADSSKAGFTTIYKWNGNGFYSHQSLHAWYRDTDVEYLEIVRTPQTLRTPHLILSSSSQRPVIYQWNKATQLFTNQTDIPNMEDVYAVKHFSVKGDVYICLTRFIGDSKVMKWGGSSFQDIQRMPSRGSMVFQPLQINNYQYAILGSDYSFTQVYNWDAEKAKFVKFQELNVQAPRSFTHVSINKRNFLFASSFKGNTQIYKHVIVDLSA

SEQ ID NO: 152792 - DNA, 1674 bp, Artificial Sequence
  derived and/or modified sequence
atggagtccgaaagaagcaagaggatgggtaatgcttgtataccactgaaacgaatcgcctattttctgtgcctcctctcagccctgctacttactgagggaaaaaagcctgccaagcccaagtgtccagcagtctgcacttgtacaaaagacaacgccttatgtgaaaacgcaaggtcaatcccccggacggtgccaccagacgtcatcagcttatccttcgtcagatccgggtttacagagatatccgagggctcctttctctttactccatcgcttcaactacttcttttcactagtaactccttcgatgtgatctccgatgacgcctttataggcctgccccacctggaatacctgttcatcgagaacaacaacatcaaaagcatatcaagacacacctttagagggcttaaatccctgatacatctcagtctggctaacaataacctgcagactctacccaaggacatcttcaaaggcctcgactctctgacaaatgtggatttgaggggcaattcctttaactgcgattgcaagctcaaatggttggtcgagtggctgggacataccaatgccacggtagaggatatttattgtgagggccctcccgaatataagaaacggaaaatcaacagtctgagttcaaaagatttcgactgcatcatcacagaatttgctaagagccaggatttaccttaccaaagtctgagtatcgacacctttagttatctgaacgacgagtatgtggttatcgcccagcctttcaccggcaaatgcatttttctggaatgggatcacgtggagaagacattcagaaattacgataacataaccggcacctccacggtcgtgtgtaagcctattgtgattgaaacacagctctacgtcatcgtggcacaactgttcggaggatcacatatttacaagcgggacagtttcgccaacaaattcatcaaaattcaagatatcgagattcttaagattcgcaagcccaacgatattgaaaccttcaaaattgaaaacaactggtatttcgttgtggcagacagtagcaaagctggcttcactactatctataagtggaacggtaacgggttctattcacatcaatctctccatgcctggtatcgtgataccgacgtggaatatctagagattgtcaggacgccgcagacactgcgtacaccccaccttattttgtcttcctccagccagcgtccagtgatctaccagtggaataaagccacccagctcttcaccaatcaaaccgatatacccaacatggaagatgtctacgccgtcaagcatttcagcgtgaaaggggatgtgtacatctgcctgactcgattcatcggtgatagtaaggtcatgaagtggggaggcagttcctttcaggatatacagaggatgcctagccgtgggagcatggtgttccagcccctccagatcaataattaccaatatgcaatattaggcagcgactattcgttcacacaagtgtacaactgggacgccgaaaaagccaagtttgtgaagttccaggagctcaacgtgcaggcccccaggtcctttactcacgtgtcgataaacaaaaggaactttctcttcgcctcctcattcaaagggaacactcagatctacaagcacgtgatcgtcgatctgtctgcctag

SEQ ID NO: 152793 - DNA, 1674 bp, Artificial Sequence
  derived and/or modified sequence
atggagagcgagaggagcaagaggatgggaaatgcctgcatccccctgaagagaattgcctacttcctgtgcctgctgagcgccctgctgctgacagagggcaagaagccagccaagcccaagtgcccagctgtgtgcacctgcaccaaggacaatgccctgtgtgaaaatgcccggagcatccccaggacagtgcccccagatgtgatcagcctgagctttgtgcgcagcggcttcacagagatcagcgagggcagcttcctgttcacccccagcctgcagctgctgctcttcaccagcaacagctttgatgtgatcagtgatgatgccttcatcggcctgccccacctggagtacctgttcatcgagaacaacaacatcaagagcatcagccgccacaccttccggggcctgaagagcctcatccacctgagcctggccaacaacaacctgcagaccctgcccaaggacatcttcaagggcctggacagcctgaccaacgtggacctgcggggcaacagcttcaactgtgactgcaagctgaagtggctggtggagtggctgggccacaccaatgccaccgtggaggacatctactgtgagggccccccagagtacaagaagaggaagatcaacagcctgagcagcaaggactttgactgcatcatcacagaatttgccaagagccaggacctgccctaccagagcctgagcattgacaccttctcctacctgaatgatgaatatgtggtgattgcccagcccttcaccgggaagtgcatcttcctggagtgggaccacgtggagaagaccttcagaaattatgacaacatcaccggcaccagcacagtggtgtgcaagcccatcgtgattgagacccagctgtatgtgattgtggcccagctgtttggaggcagccacatctacaagagggacagctttgccaacaagttcatcaagatccaggacatcgagatcctgaagatcaggaagcccaatgacatcgagaccttcaagattgagaacaactggtactttgtggtggccgacagcagcaaggccggcttcaccaccatctacaagtggaatggaaatggcttctacagccaccagagcctgcacgcctggtacagagacacagatgtggagtacctggagatcgtgaggaccccccagaccctgcggaccccccacctgatcctgagcagcagcagccagaggcctgtgatctaccagtggaacaaggccacccagctgttcaccaaccagacagacatccccaacatggaggatgtgtatgctgtgaagcacttctctgtgaagggagatgtgtacatctgcctgacccgcttcatcggggacagcaaggtgatgaagtggggcggcagcagcttccaggacatccagaggatgcccagccggggctccatggtgttccagcccctgcagatcaacaactaccagtatgccatcctgggcagtgactacagcttcacccaggtgtacaactgggatgctgagaaggccaagtttgtgaagttccaggagctgaatgtgcaggcccccaggagcttcacccacgtgtccatcaacaagaggaacttcctgtttgccagcagcttcaagggcaacacccagatctacaagcacgtgattgtggacctgagcgcctag

SEQ ID NO: 152794 - DNA, 2290 bp, Artificial Sequence
  derived and/or modified sequence
gtggtgatgcaagtcggctctctcctccagcagttggatccctcccatctcacagtacctcacaggtctcttcccccgagcagtgcattgctggagcgaggagaagctcacgaatcagctgcaggtctctgttttgaaaaagcagagatacagaggcagaggaaaagggtggactcctatgtgacctgttcttagagcaagacaatcaccatctgaattccagaagccctgttcatggttggggatattttctcgactgcatggaatcagaaagaagcaaaaggatgggaaatgcctgcattcccctgaaaagaattgcttatttcctatgtctcttatctgcgcttttgctgactgaggggaagaaaccagcgaagccaaaatgccctgccgtgtgtacttgtaccaaagataatgctttatgtgagaatgccagatccattccacgcaccgttcctcctgatgttatctcattatcctttgtgagatctggttttactgaaatctcagaagggagttttttattcacgccatcgctgcagctcttgttattcacatcgaactcctttgatgtgatcagtgatgatgcttttattggtcttccacatctagagtatttattcatagaaaacaacaacatcaagtcaatttcaagacatactttccggggactaaagtcattaattcacttgagccttgcaaacaacaatctccagacactcccaaaagatattttcaaaggcctggattctttaacaaatgtggacctgaggggtaattcatttaattgtgactgtaaactgaaatggctagtggaatggcttggccacaccaatgcaactgttgaagacatctactgcgaaggccccccagaatacaagaagcgcaaaatcaatagtctctcctcgaaggattttgattgcatcattacagaatttgcaaagtctcaagacctgccttatcaatcattgtccatagacactttttcttatttgaatgatgagtatgtagtcatcgctcagccttttactggaaaatgcattttccttgaatgggaccatgtggaaaagaccttccggaattatgacaacattacaggcacatccactgtagtatgcaagcctatagtcattgaaactcagctctatgttattgtggcccagctgtttggtggctctcacatctataagcgagacagttttgcaaataaattcataaaaatccaggatattgaaattctcaaaatccgaaaacccaatgacattgaaacattcaagattgaaaacaactggtactttgttgttgctgacagttcaaaagctggttttactaccatttacaaatggaacggaaacggattctactcccatcaatccttacacgcgtggtacagggacactgatgtggaatatctagaaatagtcagaacacctcagacactcagaacgcctcatttaattctgtctagtagttcccagcgtcctgtaatttatcagtggaacaaagcaacacaattattcactaaccaaactgacattcctaacatggaggatgtgtacgcagtgaagcacttctcagtgaaaggggacgtgtacatttgcttgacaagattcattggtgattccaaagtcatgaaatggggaggctcctcgttccaggatattcagaggatgccatcgcgaggatccatggtgttccagcctcttcaaataaataattaccaatatgcaattcttggaagtgattactcctttactcaagtgtataactgggatgcagagaaagccaaatttgtgaaatttcaggaattaaatgttcaggcaccaagatcattcacacatgtgtccattaataagcgtaattttctttttgcttccagttttaagggaaatacacagatttacaaacatgtcatagttgacttaagcgcatgagacaccaaattctgtggctgccatcagaaattttctacagtacatgacccggatgaactcaatgcatgatgactcttcttatcacacttgcaaatgaatgcctttcaaacattgagactgctagaaccaagcactaccagtatctccatccttaactgtccagtccagtgatgtgggaagttaccttttataagacaaaatttaattgtgtaactgttctttgcagtgaagatgtgtaaataagcgtttaatggtatctgttactccaaaaagaaatattaatatgtacttttccatttatttattcatgtgtacagaaacaactgccaaataaaatgtttacattttctttcata

SEQ ID NO: 152795 - DNA, 1674 bp, Artificial Sequence
  derived and/or modified sequence
atggagagcgagcggagcaagcggatgggcaacgcctgcatccccctgaagagaatcgcttactttctgtgtctattgagcgctctgcttctcacggaaggtaagaaacctgccaaaccaaaatgtccagccgtctgcacctgcactaaggacaatgcactatgtgagaatgccaggtccattcctcgcacagtcccccctgacgtcatctccttaagcttcgtgcggagtgggttcacagagatatcagaagggtctttcttgttcacaccttcgctgcaattattgctctttacgtccaattcttttgacgtgattagtgacgacgcctttattggactgcctcatttagaatatctcttcatcgagaataacaacatcaaatccatatcaagacatacttttaggggattgaagtcactcatccacctgtccctcgctaacaataatctacaaacactgcctaaagacatctttaagggactcgatagtctgactaacgtcgatctgcgcggaaactcgttcaactgtgattgcaaattaaaatggctggtggagtggctcggtcacaccaatgccacagtcgaagacatctactgtgaagggccgccagagtacaagaaaaggaaaattaatagcctgtctagcaaggattttgactgtatcataacagagttcgccaagtcacaggatctcccttaccagtccttatccatcgataccttctcttatctgaacgacgagtacgtggtgattgcacagccatttacggggaaatgtatctttcttgagtgggatcacgttgagaagaccttcagaaactacgacaacattaccggcactagtactgtggtctgtaaacctatcgtcatagagactcaactttatgtgatagtggcccagctcttcggcggatctcacatctataagcgggatagtttcgcaaacaaattcatcaagattcaggacattgaaatcctgaaaatacgcaagcctaatgatatcgaaacttttaaaatcgaaaataactggtatttcgtggtcgctgatagttccaaggccgggtttaccacaatttacaaatggaacggtaatggcttctacagtcatcagtcactccatgcatggtaccgcgatacggacgtggaatatctcgaaatagtccgcactccacagacactgcgtacaccacacttaatactcagctcttcttcgcaacgccccgtgatctaccaatggaataaggcaacccagctcttcaccaaccagactgacataccgaacatggaggatgtgtacgcagttaaacacttcagcgtaaagggtgacgtttacatctgtctgacgagattcattggcgactccaaggtcatgaagtggggcggaagttcattccaggacatccagcgaatgcccagtagagggagcatggtattccagcccctgcaaataaacaattaccaatacgccattctggggagcgactactcctttactcaggtttacaattgggacgctgaaaaggccaagtttgtgaagttccaggagttgaacgtacaagcgcctcgaagcttcacacacgtttccataaacaaacgtaacttcctgttcgcgtccagcttcaagggaaatacccaaatatataagcatgtaatcgtagacctgagcgcctag

SEQ ID NO: 152796 - DNA, 1674 bp, Artificial Sequence
  derived and/or modified sequence
atggaaagcgagcgttctaagcgcatgggcaacgcttgtatcccactgaagcgaatagcgtattttttatgcctgttgagcgccctcctgttaacagagggcaaaaagcctgccaagcctaagtgcccagcagtttgtacttgcacgaaggataacgccctgtgcgagaacgccagaagtatccctcggaccgtccccccagacgtgatttccctttcctttgtgcgttctggcttcaccgagatcagtgaaggaagcttcctttttactccctcactgcaactgctgctttttacctcaaatagctttgacgtcatctcagatgatgcctttatcggattgccccacctagaatacctgtttattgaaaataacaacattaagtccatctctcgacacacctttcgcggtctgaaaagtctgatccacctcagcttggcgaataataacctgcagaccctgcctaaggacatattcaagggacttgacagcctgacgaacgtcgacctcaggggcaattcattcaattgcgattgtaaactgaaatggctggtggagtggctagggcacaccaatgccaccgttgaggatatctattgcgaaggtcctcccgaatataagaaaagaaagatcaatagtctttcctcaaaggattttgattgcatcattaccgaatttgctaagtcccaggatctgccctatcagtcactgtcaatcgatacattttcttatctcaatgatgaatatgttgtgatcgctcagccattcactggtaagtgcattttcctagagtgggaccatgtggagaaaaccttccggaattatgataatattacggggacaagcacagttgtgtgtaagccaattgtcatcgaaacccaactgtatgtgatcgtggcccagctcttcggaggatctcatatctataaacgtgattcctttgcaaacaaattcatcaagatacaggatatcgagattctgaaaatccgaaaacctaatgatatcgagacttttaagattgagaataactggtatttcgttgttgcggatagttctaaggccggatttacaactatatataaatggaatgggaatggcttctatagccaccagagcctgcatgcttggtacagggataccgacgtcgagtatctggagatcgtcaggacgccacagacacttcgtactcctcatttaatcctgagctcaagttctcagaggccagtgatctatcaatggaacaaggcgacccagttatttactaaccaaacagatattccaaatatggaggatgtgtatgccgtgaaacatttctctgtgaagggggatgtctatatttgtctaactcgattcattggtgactctaaagtaatgaaatggggtgggagttctttccaagatatccaacgcatgcccagccgaggttcaatggtgttccagcccctgcagatcaacaactaccagtacgccatcctggggtcagactactcatttacacaggtctacaactgggacgctgagaaggctaagttcgtaaagttccaggagctcaatgtgcaggcacctcgcagttttacacacgtttccatcaataaacggaattttttgttcgcttcctccttcaaagggaacacccaaatttacaagcatgttattgttgacctctcagcatag

SEQ ID NO: 152797 - DNA, 1674 bp, Artificial Sequence
  derived and/or modified sequence
atggagagcgagagaagcaagagaatgggcaacgcctgcatccccctgaagagaatcgcctacttcctgtgcctgctgagcgccctgctgctgaccgagggcaagaagcccgccaagcccaagtgccccgccgtgtgcacctgcaccaaggacaacgccctgtgcgagaacgccagaagcatccccagaaccgtgccccccgacgtgatcagcctgagcttcgtgagaagcggcttcaccgagatcagcgagggcagcttcctgttcacccccagcctgcagctgctgctgttcaccagcaacagcttcgacgtgatcagcgacgacgccttcatcggcctgccccacctggagtacctgttcatcgagaacaacaacatcaagagcatcagcagacacaccttcagaggcctgaagagcctgatccacctgagcctggccaacaacaacctgcagaccctgcccaaggacatcttcaagggcctggacagcctgaccaacgtggacctgagaggcaacagcttcaactgcgactgcaagctgaagtggctggtggagtggctgggccacaccaacgccaccgtggaggacatctactgcgagggcccccccgagtacaagaagagaaagatcaacagcctgagcagcaaggacttcgactgcatcatcaccgagttcgccaagagccaggacctgccctaccagagcctgagcatcgacaccttcagctacctgaacgacgagtacgtggtgatcgcccagcccttcaccggcaagtgcatcttcctggagtgggaccacgtggagaagaccttcagaaactacgacaacatcaccggcaccagcaccgtggtgtgcaagcccatcgtgatcgagacccagctgtacgtgatcgtggcccagctgttcggcggcagccacatctacaagagagacagcttcgccaacaagttcatcaagatccaggacatcgagatcctgaagatcagaaagcccaacgacatcgagaccttcaagatcgagaacaactggtacttcgtggtggccgacagcagcaaggccggcttcaccaccatctacaagtggaacggcaacggcttctacagccaccagagcctgcacgcctggtacagagacaccgacgtggagtacctggagatcgtgagaaccccccagaccctgagaaccccccacctgatcctgagcagcagcagccagagacccgtgatctaccagtggaacaaggccacccagctgttcaccaaccagaccgacatccccaacatggaggacgtgtacgccgtgaagcacttcagcgtgaagggcgacgtgtacatctgcctgaccagattcatcggcgacagcaaggtgatgaagtggggcggcagcagcttccaggacatccagagaatgcccagcagaggcagcatggtgttccagcccctgcagatcaacaactaccagtacgccatcctgggcagcgactacagcttcacccaggtgtacaactgggacgccgagaaggccaagttcgtgaagttccaggagctgaacgtgcaggcccccagaagcttcacccacgtgagcatcaacaagagaaacttcctgttcgccagcagcttcaagggcaacacccagatctacaagcacgtgatcgtggacctgagcgcctag

SEQ ID NO: 152798 - protein, 206 aa, Artificial Sequence
  derived and/or modified sequence
MSTGSVSDPEEMELRGLQREYPVPASKRPPLRGVERSYASPSDNSSAEEEDPDGEEERCALGTAGSAEGCKRKRPRVAGGGGAGGSAGGGGKKPLPAKGSAAECKQSQRNAANARERARMRVLSKAFSRLKTSLPWVPPDTKLSKLDTLRLASSYIAHLRQLLQEDRYENGYVHPVNLTWPFVVSGRPDSDTKEVSAANRLCGTTA

SEQ ID NO: 152799 - DNA, 621 bp, Artificial Sequence
  derived and/or modified sequence
atgtccaccggttccgtgtccgaccccgaagagatggagctgcggggcctgcagcgggagtaccctgtgccagcatctaaacgtcctccactccgaggggtggagagaagctatgcgtcaccttctgataattcatcagccgaagaagaggatcctgacggagaggaggagaggtgtgcacttggaacagctggatctgccgagggctgcaaacgaaagaggcccagagtggccggaggcggcggtgccgggggatcagccggcggaggcggcaaaaagcccttgcccgctaagggaagcgcggccgaatgcaagcaatcccagaggaacgcggctaacgcccgtgaacgagcccggatgagagtgctcagcaaagccttctcacgcctgaagacctccctaccctgggttcctcctgacacaaagctatctaaacttgacaccctgcgtctcgctagctcgtatattgctcatctcaggcagctcctgcaagaagatagatatgaaaacggctatgtacatccagtcaatctgacatggccgttcgtcgtttctgggagaccagacagcgatacaaaagaggtttcagctgccaatcgcctctgtgggactaccgcatag

SEQ ID NO: 152800 - DNA, 2023 bp, Artificial Sequence
  derived and/or modified sequence
tttgttccaaggagtacagatagccttttcaaaaggcgcagcttaccgcggtgcgcgcggattctggacttgggcgccaactcgtagtccacgctccccggggtcagcagaggggcgctcacgctctcgccacccacctcgctttctcaccccgcgcttcccggcctgggtttttagtcttccttggagcgctctctggcctccgcctccgccagggagcggaaggcggagacagcgagactggccaggggggaggaaagaggacgcgtgtgggcaagggggacaacgggatgtccacgggctcggtgagtgatccggaggagatggagcttcgggggctgcagcgggagtacccggtccccgcctccaagaggccgcccctccgcggcgtagagcgcagctacgcctcgcccagtgacaactcgtcggcagaggaggaggaccccgacggcgaggaggagcgctgcgctctgggcacagccggcagcgcggaaggctgcaagaggaagcggccccgtgtggctgggggcggcggcgcaggtggtagcgcgggcggtggtggcaagaagcccctcccggccaagggctcagccgcagagtgcaagcagtcgcagcggaacgcggccaacgcccgtgagcgtgcccggatgcgcgtgctgagcaaagccttctccaggctcaagaccagcctgccctgggtgccccccgacactaagctctccaagctggacacgctccggctggcttccagttacatcgctcacctgcggcagctgttgcaggaggaccgctatgagaacggctacgtgcacccagtgaacctgacatggccattcgtggtctcgggaagaccggactctgacaccaaagaagtttccgcagccaacagactatgtggaaccaccgcttaaatcggactggaactcacttgatgggattattcgttaaatgcgagtgtttgggggccacggagagaagggagagctcgtgagatgggaagaagtttccgctggattctccttgacccttcccctttccctggaactgtgatcgtgacaggtggcgggtgtggctgtcactgcacagcgcccacggctacagctgcgccggatctgggcgaccacgttttgcctctccaaaaagagcttcctttcgtgacgagacgcggacgcaggtccaccctcgggccctagctctgtagactaactctcggctgctgccccagcccgcgccagacagcccacggatccgttctcagcggagccagattcatcgcacacgtgcgggacggttccacacagccccggcctttcgcggtgacacaatggttagggaacggttagaacgcgctctacatccgctttaaagacagaggtctagacgtgagatccgcgtcgggacagggttttaagtgacaaagaagggcgagtggcttctctgggccgggttcgtactccagcacagcgcccttctaacgggcgggaggaaggccgctgctcgcagggctaggtggagacacacttcccagatcaccgcaggcgggttttacccggagagctctgggccgttcggcctccctgccgggtggcttcttcaatcccgtctccttcccaagctcccggctttttctaatcaggcaggcgtctgtcaaccctctccacttctgggctgaagcctccccaagccccgctgcgccaacctgtgtggggtcttcttcgggcctccctctccgccccgctcctgctcctacctgcagcacccccagctccgactccagactctctgcatcaggtctccccactccacgctccgggcgccccaactccaacaccacgtcctgccgcgcaggttcttccccgcgcggaggagcgcgcagggtgggcggcttaccatagcaagtgatcctgcgatagggaacgcgcccttgccccgaggctgcactaccacaggaaataacatatgtaaataaatttatttttttatgaataataaaacgcgctgtaaaaaccgtgtgccccttgga

SEQ ID NO: 152801 - DNA, 621 bp, Artificial Sequence
  derived and/or modified sequence
atgagcactggatctgtgtctgaccctgaggagatggagctgcggggcctgcagcgggagtaccctgtgcctgccagcaagaggcctcccctgcggggcgtggagaggagctatgccagccccagcgacaacagcagcgctgaggaggaggaccctgatggagaggaggagcgctgtgccctgggcacagctggcagcgctgagggctgcaagaggaagaggccccgggtggccggcggcggcggggccggcggcagcgctgggggcggcggcaagaagcccctgcctgccaagggcagcgctgctgagtgcaagcagagccagagaaatgctgccaatgcccgggagcgggccaggatgagggtgctgagcaaggccttcagccggctgaagaccagcctgccctgggtgcccccagacaccaagctgagcaagctggacaccctgcggctggccagcagctacatcgcccacctgcggcagctgctgcaggaggacagatatgaaaatggctacgtgcaccctgtgaacctgacctggccctttgtggtgtctggccgcccagacagcgacaccaaggaggtgtctgctgccaaccggctgtgtggcaccacagcctag

SEQ ID NO: 152802 - DNA, 621 bp, Artificial Sequence
  derived and/or modified sequence
atgagcaccggcagcgtgagcgaccccgaggagatggagctgcggggcttacagcgggagtaccccgtgccagcatctaagagacccccgctgcgcggagtggagcggtcctacgcgagcccatccgataactccagcgctgaggaggaagacccggacggtgaagaagaaaggtgcgcacttggaacagccggctcagcagaaggttgcaaacggaaacggccaagagtagctggtggggggggagcgggcgggagtgccggcggaggcggaaaaaagccgttaccagcaaaaggatctgccgccgaatgtaagcagtctcaacgcaacgcagcaaacgccagagagcgcgcccgtatgcgagtgctgagcaaggcattcagcagactcaaaacctctctaccatgggtgcccccggataccaagctcagcaagctggatacactcaggttggccagctcttatattgcccacctcaggcagctcctgcaagaagacaggtatgagaacgggtacgtgcatcccgtcaacttaacatggcctttcgtggtgagcggccgacctgacagcgatactaaggaggtcagtgcagccaaccggctctgtggtacaactgcttag

SEQ ID NO: 152803 - DNA, 621 bp, Artificial Sequence
  derived and/or modified sequence
atgagtactggctccgtgagcgatcctgaggagatggagttacgcggtctccagagagaatatcctgtgcccgcttctaagaggcctcctctgagaggcgttgagcgctcctacgccagtccatctgataatagcagtgccgaggaggaagaccctgacggggaagaggaaagatgtgctttaggcacagcaggaagcgccgagggctgcaaacggaagagacctcgcgtggctggaggaggcggagcaggcggatccgccggtggtggaggaaagaagcctctgccagccaaggggtccgccgcagaatgcaaacaaagccaacgcaacgctgccaacgcgagagaaagggctaggatgcgcgtgctgagcaaagcattcagtaggttgaagaccagccttccatgggtacctccagatactaaactctcgaagctggacaccctgcgtctcgcgagcagttatatcgcacacctgagacagctgctccaggaagaccgctatgagaatggctatgtgcaccccgtcaacctgacctggccctttgtggtgagtgggcgtccagattcagatacaaaagaggtgtctgctgcgaaccggctctgcggtacaacagcatag

SEQ ID NO: 152804 - DNA, 621 bp, Artificial Sequence
  derived and/or modified sequence
atgagcaccggcagcgtgagcgaccccgaggagatggagctgagaggcctgcagagagagtaccccgtgcccgccagcaagagaccccccctgagaggcgtggagagaagctacgccagccccagcgacaacagcagcgccgaggaggaggaccccgacggcgaggaggagagatgcgccctgggcaccgccggcagcgccgagggctgcaagagaaagagacccagagtggccggcggcggcggcgccggcggcagcgccggcggcggcggcaagaagcccctgcccgccaagggcagcgccgccgagtgcaagcagagccagagaaacgccgccaacgccagagagagagccagaatgagagtgctgagcaaggccttcagcagactgaagaccagcctgccctgggtgccccccgacaccaagctgagcaagctggacaccctgagactggccagcagctacatcgcccacctgagacagctgctgcaggaggacagatacgagaacggctacgtgcaccccgtgaacctgacctggcccttcgtggtgagcggcagacccgacagcgacaccaaggaggtgagcgccgccaacagactgtgcggcaccaccgcctag

SEQ ID NO: 152805 - protein, 339 aa, Artificial Sequence
  derived and/or modified sequence
MSQTGSHPGRGLAGRWLWGAQPCLLLPIVPLSWLVWLLLLLLASLLPSARLASPLPREEEIVFPEKLNGSVLPGSGAPARLLCRLQAFGETLLLELEQDSGVQVEGLTVQYLGQAPELLGGAEPGTYLTGTINGDPESVASLHWDGGALLGVLQYRGAELHLQPLEGGTPNSAGGPGAHILRRKSPASGQGPMCNVKAPLGSPSPRPRRAKRFASLSRFVETLVVADDKMAAFHGAGLKRYLLTVMAAAAKAFKHPSIRNPVSLVVTRLVILGSGEEGPQVGPSAAQTLRSFCAWQRGLNTPEDSDPDHFDTAILFTRQVRPQSAPQAMHCTILRSATT

SEQ ID NO: 152806 - protein, 837 aa, Artificial Sequence
  derived and/or modified sequence
MSQTGSHPGRGLAGRWLWGAQPCLLLPIVPLSWLVWLLLLLLASLLPSARLASPLPREEEIVFPEKLNGSVLPGSGAPARLLCRLQAFGETLLLELEQDSGVQVEGLTVQYLGQAPELLGGAEPGTYLTGTINGDPESVASLHWDGGALLGVLQYRGAELHLQPLEGGTPNSAGGPGAHILRRKSPASGQGPMCNVKAPLGSPSPRPRRAKRFASLSRFVETLVVADDKMAAFHGAGLKRYLLTVMAAAAKAFKHPSIRNPVSLVVTRLVILGSGEEGPQVGPSAAQTLRSFCAWQRGLNTPEDSDPDHFDTAILFTRQDLCGVSTCDTLGMADVGTVCDPARSCAIVEDDGLQSAFTAAHELGHVFNMLHDNSKPCISLNGPLSTSRHVMAPVMAHVDPEEPWSPCSARFITDFLDNGYGHCLLDKPEAPLHLPVTFPGKDYDADRQCQLTFGPDSRHCPQLPPPCAALWCSGHLNGHAMCQTKHSPWADGTPCGPAQACMGGRCLHMDQLQDFNIPQAGGWGPWGPWGDCSRTCGGGVQFSSRDCTRPVPRNGGKYCEGRRTRFRSCNTEDCPTGSALTFREEQCAAYNHRTDLFKSFPGPMDWVPRYTGVAPQDQCKLTCQAQALGYYYVLEPRVVDGTPCSPDSSSVCVQGRCIHAGCDRIIGSKKKFDKCMVCGGDGSGCSKQSGSFRKFRYGYNNVVTIPAGATHILVRQQGNPGHRSIYLALKLPDGSYALNGEYTLMPSPTDVVLPGAVSLRYSGATAASETLSGHGPLAQPLTLQVLVAGNPQDTRLRYSFFVPRPTPSTPRPTPQDWLHRRAQILEILRRRPWAGRK

SEQ ID NO: 152807 - DNA, 1961 bp, Artificial Sequence
  derived and/or modified sequence
ggagaacccacagggagacccacagacacatatgcacgagagagacagaggaggaaagagacagagacaaaggcacagcggaagaaggcagagacagggcaggcacagaagcggcccagacagagtcctacagagggagaggccagagaagctgcagaagacacaggcagggagagacaaagatccaggaaaggagggctcaggaggagagtttggagaagccagacccctgggcacctctcccaagcccaaggactaagttttctccatttcctttaacggtcctcagcccttctgaaaactttgcctctgaccttggcaggagtccaagcccccaggctacagagaggagctttccaaagctagggtgtggaggacttggtgccctagacggcctcagtccctcccagctgcagtaccagtgccatgtcccagacaggctcgcatcccgggaggggcttggcagggcgctggctgtggggagcccaaccctgcctcctgctccccattgtgccgctctcctggctggtgtggctgcttctgctactgctggcctctctcctgccctcagcccggctggccagccccctcccccgggaggaggagatcgtgtttccagagaagctcaacggcagcgtcctgcctggctcgggcgcccctgccaggctgttgtgccgcttgcaggcctttggggagacgctgctactagagctggagcaggactccggtgtgcaggtcgaggggctgacagtgcagtacctgggccaggcgcctgagctgctgggtggagcagagcctggcacctacctgactggcaccatcaatggagatccggagtcggtggcatctctgcactgggatgggggagccctgttaggcgtgttacaatatcggggggctgaactccacctccagcccctggagggaggcacccctaactctgctgggggacctggggctcacatcctacgccggaagagtcctgccagcggtcaaggtcccatgtgcaacgtcaaggctcctcttggaagccccagccccagaccccgaagagccaagcgctttgcttcactgagtagatttgtggagacactggtggtggcagatgacaagatggccgcattccacggtgcggggctaaagcgctacctgctaacagtgatggcagcagcagccaaggccttcaagcacccaagcatccgcaatcctgtcagcttggtggtgactcggctagtgatcctggggtcaggcgaggaggggccccaagtggggcccagtgctgcccagaccctgcgcagcttctgtgcctggcagcggggcctcaacacccctgaggactcggaccctgaccactttgacacagccattctgtttacccgtcaggtgaggccccagtcagcaccgcaggccatgcactgcacaattctaagaagcgccactacatagactatgatgcaaatgatgttcctggagttgtgtgacatggtgccttgccccagccacactgccatgtgtggctacctaggccctgacagtgctgggtcctcagtgcccaggtccccgggaatctggatctcaacccaatggacccaggtgtcttggctgtctatgcaccttctatgatccctctccacaggacctgtgtggagtctccacttgcgacacgctgggtatggctgatgtgggcaccgtctgtgacccggctcggagctgtgccattgtggaggatgatgggctccagtcagccttcactgctgctcatgaactgggtaaagtaggggtggatgagaaaggtattagggaggagaaggtgggggagggggtagcaagttcaccacagtgttaatgggggtcccaaggtattcttcccccaggcctaggtatagggctattactcctctctgctccaggtgtagacatacatttacatttttctattaaataaattagttggtcgaaac

SEQ ID NO: 152808 - DNA, 4333 bp, Artificial Sequence
  derived and/or modified sequence
tggggagaacccacagggagacccacagacacatatgcacgagagagacagaggaggaaagagacagagacaaaggcacagcggaagaaggcagagacagggcaggcacagaagcggcccagacagagtcctacagagggagaggccagagaagctgcagaagacacaggcagggagagacaaagatccaggaaaggagggctcaggaggagagtttggagaagccagacccctgggcacctctcccaagcccaaggactaagttttctccatttcctttaacggtcctcagcccttctgaaaactttgcctctgaccttggcaggagtccaagcccccaggctacagagaggagctttccaaagctagggtgtggaggacttggtgccctagacggcctcagtccctcccagctgcagtaccagtgccatgtcccagacaggctcgcatcccgggaggggcttggcagggcgctggctgtggggagcccaaccctgcctcctgctccccattgtgccgctctcctggctggtgtggctgcttctgctactgctggcctctctcctgccctcagcccggctggccagccccctcccccgggaggaggagatcgtgtttccagagaagctcaacggcagcgtcctgcctggctcgggcgcccctgccaggctgttgtgccgcttgcaggcctttggggagacgctgctactagagctggagcaggactccggtgtgcaggtcgaggggctgacagtgcagtacctgggccaggcgcctgagctgctgggtggagcagagcctggcacctacctgactggcaccatcaatggagatccggagtcggtggcatctctgcactgggatgggggagccctgttaggcgtgttacaatatcggggggctgaactccacctccagcccctggagggaggcacccctaactctgctgggggacctggggctcacatcctacgccggaagagtcctgccagcggtcaaggtcccatgtgcaacgtcaaggctcctcttggaagccccagccccagaccccgaagagccaagcgctttgcttcactgagtagatttgtggagacactggtggtggcagatgacaagatggccgcattccacggtgcggggctaaagcgctacctgctaacagtgatggcagcagcagccaaggccttcaagcacccaagcatccgcaatcctgtcagcttggtggtgactcggctagtgatcctggggtcaggcgaggaggggccccaagtggggcccagtgctgcccagaccctgcgcagcttctgtgcctggcagcggggcctcaacacccctgaggactcggaccctgaccactttgacacagccattctgtttacccgtcaggacctgtgtggagtctccacttgcgacacgctgggtatggctgatgtgggcaccgtctgtgacccggctcggagctgtgccattgtggaggatgatgggctccagtcagccttcactgctgctcatgaactgggtcatgtcttcaacatgctccatgacaactccaagccatgcatcagtttgaatgggcctttgagcacctctcgccatgtcatggcccctgtgatggctcatgtggatcctgaggagccctggtccccctgcagtgcccgcttcatcactgacttcctggacaatggctatgggcactgtctcttagacaaaccagaggctccattgcatctgcctgtgactttccctggcaaggactatgatgctgaccgccagtgccagctgaccttcgggcccgactcacgccattgtccacagctgccgccgccctgtgctgccctctggtgctctggccacctcaatggccatgccatgtgccagaccaaacactcgccctgggccgatggcacaccctgcgggcccgcacaggcctgcatgggtggtcgctgcctccacatggaccagctccaggacttcaatattccacaggctggtggctggggtccttggggaccatggggtgactgctctcggacctgtgggggtggtgtccagttctcctcccgagactgcacgaggcctgtcccccggaatggtggcaagtactgtgagggccgccgtacccgcttccgctcctgcaacactgaggactgcccaactggctcagccctgaccttccgcgaggagcagtgtgctgcctacaaccaccgcaccgacctcttcaagagcttcccagggcccatggactgggttcctcgctacacaggcgtggccccccaggaccagtgcaaactcacctgccaggcccaggcactgggctactactatgtgctggagccacgggtggtagatgggaccccctgttccccggacagctcctcggtctgtgtccagggccgatgcatccatgctggctgtgatcgcatcattggctccaagaagaagtttgacaagtgcatggtgtgcggaggggacggttctggttgcagcaagcagtcaggctccttcaggaaattcaggtacggatacaacaatgtggtcactatccccgcgggggccacccacattcttgtccggcagcagggaaaccctggccaccggagcatctacttggccctgaagctgccagatggctcctatgccctcaatggtgaatacacgctgatgccctcccccacagatgtggtactgcctggggcagtcagcttgcgctacagcggggccactgcagcctcagagacactgtcaggccatgggccactggcccagcctttgacactgcaagtcctagtggctggcaacccccaggacacacgcctccgatacagcttcttcgtgccccggccgaccccttcaacgccacgccccactccccaggactggctgcaccgaagagcacagattctggagatccttcggcggcgcccctgggcgggcaggaaataacctcactatcccggctgccctttctgggcaccggggcctcggacttagctgggagaaagagagagcttctgttgctgcctcatgctaagactcagtggggaggggctgtgggcgtgagacctgcccctcctctctgccctaatgcgcaggctggccctgccctggtttcctgccctgggaggcagtgatgggttagtggatggaaggggctgacagacagccctccatctaaactgccccctctgccctgcgggtcacaggagggagggggaaggcagggagggcctgggccccagttgtatttatttagtatttattcacttttatttagcaccagggaaggggacaaggactagggtcctggggaacctgacccctgacccctcatagccctcaccctggggctaggaaatccagggtggtggtgataggtataagtggtgtgtgtatgcgtgtgtgtgtgtgtgaaaatgtgtgtgtgcttatgtatgaggtacaacctgttctgctttcctcttcctgaattttattttttgggaaaagaaaagtcaagggtagggtgggccttcagggagtgagggattatctttttttttttttctttctttctttcttttttttttttgagacagaatctcgctctgtcgcccaggctggagtgcaatggcacaatctcggctcactgcatcctccgcctcccgggttcaagtgattctcatgcctcagcctcctgagtagctgggattacaggctcctgccaccacgcccggctaatttttgttttgttttgtttggagacagagtctcgctattgtcaccagggctggaatgatttcagctcactgcaaccttcgccacctgggttccagcaattctcctgcctcagcctcccgagtagctgagattataggcacctaccaccacgcccggctaatttttgtatttttagtagagacggggtttcaccatgttggccaggctggtctcgaactcctgaccttaggtgatccactcgccttcatctcccaaagtgctgggattacaggcgtgagccaccgtgcctggccacgcccaactaatttttgtatttttagtagagacagggtttcaccatgttggccaggctgctcttgaactcctgacctcaggtaatcgacctgcctcggcctcccaaagtgctgggattacaggtgtgagccaccacgcccggtacatattttttaaattgaattctactatttatgtgatccttttggagtcagacagatgtggttgcatcctaactccatgtctctgagcattagatttctcatttgccaataataatacctcccttagaagtttgttgtgaggattaaataatgtaaataaagaactagcataacactca

SEQ ID NO: 152809 - DNA, 1020 bp, Artificial Sequence
  derived and/or modified sequence
atgagtcagactggcagtcacccgggtcgcggactcgccggaagatggctctggggtgctcagccctgtttgctcctgcctatagtcccactcagttggttagtgtggttgctgctcttgcttctggcatccctgttgccctccgcacgcctcgctagcccactgccacgggaggaagagatcgtattccccgaaaagctgaacggcagtgttttacctgggagcggggccccagcccggcttctgtgccgactccaggcattcggcgagactcttttgctggaactggagcaagatagcggtgtccaggttgagggacttacagtccaataccttggccaagccccagaactgttgggtggagccgaacctggtacctacctgacagggactatcaatggtgaccccgaatccgtcgcttcgttgcactgggacggaggagcgctcctcggagtgcttcagtaccgcggagccgagctgcatttacagcctctggaaggaggtactccaaatagtgcaggtggtccaggggcccacatacttcggcggaagagccctgcctcggggcagggccctatgtgcaatgtcaaggccccacttggatctcctagtccgcgacccagacgggccaaaaggtttgccagtctgtcccgttttgtagagacgctcgttgtcgccgacgacaagatggcagctttccatggggccgggctgaagcgatatctactcaccgtgatggcggccgcagccaaagcttttaagcacccctctatcagaaaccccgtgtctctggttgttaccaggctcgtaattctgggatccggcgaggaaggcccccaggtggggccttccgcggcccagacactacgttctttttgtgcctggcagagaggactgaatacacctgaagatagcgaccccgaccattttgatacagctattctgtttaccagacaagtgcggccacaatccgcccctcaagctatgcactgtaccattctccgtagcgccacgacttag

SEQ ID NO: 152810 - DNA, 2514 bp, Artificial Sequence
  derived and/or modified sequence
atgtctcagaccggctcgcacccgggccgcggcctggctggaaggtggctttggggcgcacaaccgtgtctcttactgcctattgtaccactctcctggctcgtctggttgctgctcctgctcttggcctcattactgccctctgccaggcttgcctctccacttccgcgggaagaggaaatagtgtttcctgagaagctgaatggctcagtgctccccggctcgggcgcccccgctagattgctctgcaggttacaagcattcggcgagacattactgctagaactggagcaagactctggcgttcaagtggaagggttgaccgtacaatacctgggacaagccccggagctccttggcggcgccgaacccggcacctatctcaccggaacaattaacggggacccggagtctgtggctagtttacattgggacggaggagcactgcttggtgtgctacaataccgcggcgccgagctacatctgcagcccctcgaagggggcacccctaattcagctgggggaccaggggctcatattcttagacgtaaatccccagcctcaggccaaggacccatgtgtaacgtcaaagctcccctcggttcaccaagtccacggccaagaagagctaagagattcgcatccctcagtcgcttcgtcgagactctggtcgtggcagacgacaaaatggctgcgttccatggcgcgggcctgaaaaggtatcttctgactgtaatggcggctgccgctaaagcatttaagcacccctctatcaggaaccctgtaagtcttgtggtgacccgactggttatcctaggatcaggagaagagggaccccaggtgggtccatcagctgcacagactctgcgatccttctgcgcttggcagagaggactgaacacacccgaggattccgacccggatcatttcgacactgccattcttttcacacgccaggacctgtgcggggtgtccacttgtgatacgcttgggatggcggacgtcggcactgtctgtgaccctgccagatcctgcgccatcgtcgaggacgacggccttcagtcagcttttacagccgcccatgagttaggacatgtgtttaatatgctgcacgataattccaaaccctgcattagcttaaatggtcctttaagcacatcccgccatgtgatggcccctgtaatggctcatgtggaccccgaagaaccatggtctccatgctctgctaggtttattacagatttcttggacaacggctacggtcactgtctgcttgacaagcctgaagctccactccatttacctgtcactttcccaggtaaagactatgatgctgatagacagtgtcaactgacctttggcccagattcgcggcactgcccccagttgcccccaccttgcgcagctctgtggtgcagcgggcatctgaacggccatgcaatgtgtcagacgaagcactctccgtgggcagacggaaccccctgcggcccagctcaggcatgtatgggtgggaggtgtcttcacatggatcagctccaagattttaatatcccgcaagccggaggttggggaccctggggcccatggggagattgctcccggacctgcgggggcggggtacagttctccagccgcgactgtacccggccggtcccaagaaatggaggtaaatactgtgaagggcggcggacccggttccggtcttgtaacactgaggattgcccgaccggatcagccttgacgttcagggaagagcagtgtgctgcatacaaccatcgcacggatctgtttaagagttttccagggccaatggactgggtgcctcgatacacaggagtggcgccacaagaccaatgtaaactgacctgtcaggcacaggctctgggctactactacgtactcgagccaagagttgtggatggaacaccatgctccccggactcctcctcagtctgtgtgcagggaaggtgcattcatgccggctgcgatcgcatcatcggaagcaagaaaaagttcgataaatgcatggtgtgtggcggagatggttcgggatgcagtaagcagagtggatcttttaggaaatttcgctatggctacaataatgtggtcactattcctgctggcgccacgcatatcctcgtgagacaacaggggaaccccggtcatcgaagcatttaccttgccctcaagctgcccgatggctcgtacgcgctgaacggggaatataccttgatgcctagccccactgacgttgtgctccccggcgcggtcagcttgcggtatagtggagcaacggcagcctccgaaacactctcggggcacggccccctcgcacagcctctaactctgcaagtgctggtcgccggaaacccacaggatacccgcttgaggtattctttttttgtcccccggcccacaccaagtacacctaggccgactcctcaggactggctccatcgtagggcccaaatactggagattcttcggcggaggccttgggccggaaggaagtag

SEQ ID NO: 152811 - DNA, 1020 bp, Artificial Sequence
  derived and/or modified sequence
atgagccagacaggcagccaccctggccggggcctggccggccgctggctgtggggcgcccagccctgcctgctgctgcccatcgtgcccctgtcctggctggtgtggctgctgctgctgctgctggccagcctgctgcccagcgcccggctggccagccccctgccccgggaggaggagatcgtgtttcctgagaagctgaatggatctgtgctgcccggcagcggggccccagcccggctgctgtgccgcctgcaggccttcggggagaccctgctgctggagctggagcaggacagcggcgtgcaggtggagggcctgactgtgcagtacctgggccaggcccctgagctgctgggcggcgctgagcccggcacctacctgaccggcaccatcaatggagaccctgagagcgtggccagcctgcactgggatggaggagccctgctgggcgtgctgcagtacagaggagctgagctgcacctgcagcccctggagggcggcacccccaacagcgctgggggccctggggcccacatcctgcggaggaagagccctgccagcggccagggccccatgtgcaatgtgaaggcccccctgggcagccccagcccccggccccggcgggccaagagatttgccagcctgagcagatttgtggagaccctggtggtggctgatgacaagatggccgccttccacggggccggcctgaagcgctacctgctgactgtgatggctgctgctgccaaggccttcaagcaccccagcatcagaaatcctgtgtccctggtggtgacccggctggtgatcctgggcagcggggaggagggcccccaggtgggccccagcgctgcccagaccctgcgctccttctgtgcctggcagaggggcctgaacaccccagaagattctgaccctgaccactttgacacagccatcctcttcacccggcaggtgcggccccagagcgccccccaggccatgcactgcaccatcctgcggagcgccaccacctag

SEQ ID NO: 152812 - DNA, 2514 bp, Artificial Sequence
  derived and/or modified sequence
atgagccagacaggcagccaccctggccggggcctggccggccgctggctgtggggcgcccagccctgcctgctgctgcccatcgtgcccctgtcctggctggtgtggctgctgctgctgctgctggccagcctgctgcccagcgcccggctggccagccccctgccccgggaggaggagatcgtgtttcctgagaagctgaatggatctgtgctgcccggcagcggggccccagcccggctgctgtgccgcctgcaggccttcggggagaccctgctgctggagctggagcaggacagcggcgtgcaggtggagggcctgactgtgcagtacctgggccaggcccctgagctgctgggcggcgctgagcccggcacctacctgaccggcaccatcaatggagaccctgagagcgtggccagcctgcactgggatggaggagccctgctgggcgtgctgcagtacagaggagctgagctgcacctgcagcccctggagggcggcacccccaacagcgctgggggccctggggcccacatcctgcggaggaagagccctgccagcggccagggccccatgtgcaatgtgaaggcccccctgggcagccccagcccccggccccggcgggccaagagatttgccagcctgagcagatttgtggagaccctggtggtggctgatgacaagatggccgccttccacggggccggcctgaagcgctacctgctgactgtgatggctgctgctgccaaggccttcaagcaccccagcatcagaaatcctgtgtccctggtggtgacccggctggtgatcctgggcagcggggaggagggcccccaggtgggccccagcgctgcccagaccctgcgctccttctgtgcctggcagaggggcctgaacaccccagaagattctgaccctgaccactttgacacagccatcctcttcacccggcaggacctgtgtggggtgtccacctgtgacaccctgggcatggctgatgtgggcaccgtgtgtgaccctgcccggagctgtgccatcgtggaggatgatggcctgcagagcgccttcaccgctgcccacgagctgggccacgtgttcaacatgctgcatgacaacagcaagccctgcatcagcctgaatggccccctgagcaccagcagacatgtgatggcccctgtgatggcccacgtggaccctgaggagccctggagcccctgcagcgcccgcttcatcacagacttcctggacaatggctacggccactgcctgctggacaagccagaggcccccctgcacctgcctgtgaccttccctgggaaggactatgatgctgaccggcagtgccagctgacctttggaccagacagccgccactgcccccagctgcccccaccctgtgccgccctgtggtgcagcggccacctgaatggacatgccatgtgccagaccaagcacagcccctgggcagatggcaccccctgtggccctgcccaggcctgcatgggcggccgctgcctgcacatggaccagctgcaggacttcaacatcccccaggccggcggctggggcccctggggcccctggggagactgcagcaggacctgtggcggcggcgtgcagttcagcagccgggactgcaccaggcctgtgcccagaaatggaggcaagtactgtgagggccgccgcacccgcttccgcagctgcaacacagaggactgccccaccggcagcgccctgaccttccgggaggagcagtgtgccgcctacaaccacaggacagacctcttcaagagcttccctggccccatggactgggtgccccgctacacaggagtggccccccaggaccagtgcaagctgacctgccaggcccaggccctgggctactactacgtgctggagccccgggtggtggatggcaccccctgcagcccagacagcagctctgtgtgtgtgcagggccgctgcatccacgccggctgtgaccgcatcatcggcagcaagaagaagtttgacaagtgcatggtgtgtggaggagatggcagcggctgcagcaagcagagcggcagcttcaggaagttccgctatggctacaacaacgtggtgaccatcccagctggggccacccacatcctggtgcggcagcagggcaaccctggccacaggagcatctacctggccctgaagctgcctgatggcagctatgccctgaatggagagtacaccctgatgcccagccccacagatgtggtgctgcccggggctgtgtccctgcgctacagcggggccacagctgccagcgagaccctgagcggccacggccccctggcccagcccctgaccctgcaggtgctggtggccggcaacccccaggacacccggctgcgctacagcttctttgtgccccggcccacccccagcaccccccggcccaccccccaggactggctgcaccggcgggcccagatcctggagatcctgcggcggcggccctgggccggcaggaagtag

SEQ ID NO: 152813 - DNA, 1020 bp, Artificial Sequence
  derived and/or modified sequence
atgagccagaccggcagccaccccggccggggcctggccggccggtggctgtggggtgctcaaccttgccttctgttgccaattgtaccactgtcgtggctggtctggttgttactcttgctactggccagcctcttgccaagcgccagattagcttcaccacttccccgggaggaggaaattgtcttccccgagaaactgaatggcagcgtgctgccagggagcggtgcccctgcacgcctcctctgcaggcttcaggcttttggtgagaccctgttattggaattagagcaagacagcggggtccaggtcgaaggattaactgtccaatacctcggccaggctcccgaactactcggtggagctgagcctggaacctatttaacgggtacaattaacggcgacccagagtctgttgcctctcttcactgggatggcggtgctcttttaggagtgctgcagtacaggggagcagaattgcatctgcagccactcgaaggcggcactccaaattctgccggagggccaggggcgcacattttgcgtaggaaatcccctgcttccggccaggggcccatgtgtaacgtgaaagctccactgggttctccttcccctaggccacgcagagccaaaaggttcgccagtctaagccgcttcgtggagaccctggtagtcgccgacgacaaaatggccgctttccatggggctggcctcaaaagatacctgctgacagtgatggctgctgcggcaaaagctttcaagcacccgtcaatcaggaaccctgtgagcctagtagtgaccagactggttatattggggtctggagaagaaggaccccaggtcggtccctccgcggcccagaccctgcggagtttctgcgcatggcagaggggccttaacactccagaagactctgacccagatcacttcgacactgcgatcctatttacaaggcaggtgcggccccagtcagccccccaagccatgcactgtacaatccttcgttctgcgaccacatag

SEQ ID NO: 152814 - DNA, 2514 bp, Artificial Sequence
  derived and/or modified sequence
atgagccagaccggcagccaccccggccggggcctggccggccggtggttatggggagcccaaccgtgcctgctgctcccgattgtcccattaagctggcttgtctggctattgcttctgctcctggcatccctgcttccgtcagcgcgacttgcgagccccctgccccgcgaggaggagatcgtcttccccgagaagctaaacggctccgtgctccctggtagtggcgccccagcgcggctgctgtgccggctgcaggcttttggtgaaaccctcctgctggaattagagcaggactccggggtgcaggtggagggtctcactgtacagtaccttggacaggccccagaactgctcggcggtgcagaacctggtacttatctgacaggaactatcaatggggacccggagagtgtagcctctctgcattgggacgggggggccctcttaggagtgctgcaatatcgaggagccgagctacatctgcagcccctggagggaggaacaccgaactcagcaggggggccaggagcgcatatcctccggcgcaagtcacctgccagcggtcaggggcccatgtgcaatgtcaaagcccccctaggttctccctcacctaggcccaggagagccaaacggttcgcttctttaagccgcttcgtagagaccctggtggtggccgacgataaaatggccgcctttcacggagccggattgaaacgctacctccttactgtcatggccgccgcggccaaggcctttaaacatccctctatcaggaaccctgtgtccctggtagtaacccggctcgtcatactcgggtcgggagaggaagggccccaggtgggtccctcagcggcccagactctcaggagcttctgtgcttggcaaagaggcctaaatacacccgaggatagtgacccggaccacttcgacaccgccatcctgtttacaaggcaagatttgtgcggggtgagtacatgcgataccctgggaatggccgatgttggcaccgtatgtgatcctgcgcggtcctgtgcaatcgtcgaggatgatggactgcagtcagcctttacagccgcacatgagttgggacatgtcttcaatatgttacatgacaactcaaagccgtgtattagcctgaacggtcccctgtccacatctagacatgtgatggcccctgtgatggcacacgttgaccctgaagaaccatggtccccctgttccgctcgctttattactgatttccttgacaacggctacgggcactgtctgttagacaagcccgaggctccactgcatctgccagtgacattcccagggaaggattatgacgctgaccgtcagtgtcagctgacatttggccctgactctcggcactgccctcagctccccccaccttgtgcagccttatggtgctcaggccatttaaacgggcacgccatgtgtcaaacaaagcattcaccttgggcggacggaactccatgcggacccgctcaggcttgtatggggggcagatgcttacatatggatcaacttcaggacttcaacatcccgcaagcagggggctggggaccctggggaccctggggagactgttctcgaacatgcgggggcggagttcagttttcctctcgggactgcacacgaccagtgcctagaaacggcggaaagtactgtgaaggacggcggacacgattcagatcctgtaataccgaagactgccctactgggtccgccctaactttccgagaagagcagtgtgctgcgtacaatcacaggacagacctcttcaaatcttttcctggcccgatggattgggtgcctcgctatacaggagtggccccacaggatcagtgcaaattaacctgtcaagctcaggcactcgggtattactatgtgctcgagcctagggtagtggacggtacaccatgctcacctgattcctcgtctgtctgcgtgcagggacggtgtatccacgctggttgcgacagaataatcgggtccaagaaaaaatttgacaaatgcatggtgtgtgggggagatgggtccggctgctccaaacagtctggttcgttcagaaagtttcgttacggctataacaacgtcgttaccattcccgcaggagccacccatattctcgtccggcagcagggtaaccctggccatagatcaatctacctggcactcaaattgcccgatggatcatacgcattgaatggcgagtataccctgatgccaagccctaccgatgtggtgttgccaggggcagtgtctttgcggtactcaggggcaaccgctgcatcagaaacactgagcggacatgggccccttgctcaacccttgacactgcaggttctggtggctggcaacccacaggatacacgtttgcgctacagctttttcgtaccacgacctactccctctactccgcggccaacacctcaagactggttgcataggagggcccagattctggagatactgaggaggagaccatgggctggtagaaaatag

SEQ ID NO: 152815 - DNA, 1020 bp, Artificial Sequence
  derived and/or modified sequence
atgagccagacgggtagccatcctggaaggggcctggcgggacgatggctgtggggggcacagccctgcctgctccttcccattgtgcctttgagttggctcgtatggctgctgctgctccttttagcatcactgttgccgtccgcccgactggcaagcccccttccgcgagaggaagagattgtgtttccagagaagttaaacggctccgtcctgccagggagtggcgcacctgcaaggttgctttgcagactgcaagccttcggcgagacactgttgctagaactggaacaggactctggggtgcaggtggagggcctgaccgtccagtatttgggccaagcccctgaactcctggggggtgctgaacccggaacttacctcactggaaccattaatggcgacccagaaagcgtggcttccttgcactgggacggcggagccctcctaggagtgctccaatacagaggcgctgaactgcatcttcagccactagaagggggtactcctaattctgcgggagggcctggcgctcacattctgcggagaaagagcccagcaagcggacagggacccatgtgtaatgtcaaagcccctctgggatctccttcgccgcgaccccgtcgcgctaagaggttcgcaagtctcagccgcttcgtggagaccctagtggtcgctgacgataaaatggccgctttccacggcgctggtctgaaacggtatctcttgacagtgatggccgctgcagccaaggcatttaaacatcctagcattcgcaacccagttagcctggttgtgacgaggctagtcatcttgggaagcggcgaggaagggccacaggttgggccttcagccgcacagacgcttcggtctttttgtgcctggcagcgcggactaaatacccctgaggacagcgatcctgaccactttgatacagctattctgttcaccagacaagttagacctcaaagcgcgcctcaggctatgcattgcacaatcctgcgttctgcaaccacttag

SEQ ID NO: 152816 - DNA, 2514 bp, Artificial Sequence
  derived and/or modified sequence
atgtctcaaaccggtagtcacccgggtagaggattggccggaaggtggctctggggcgctcagccctgcctgcttctgccaatcgttcctcttagctggctggtgtggctgcttctcctgctgttagccagcctgctgccctccgctcggctagccagtccactgcctcgagaggaggagatcgtctttcccgagaaactcaacggctcagtgttacctggcagtggtgctccggctcgcttgttgtgcaggttgcaggctttcggtgaaacacttctactcgagttagagcaggactccggcgtacaggtggaggggctgacagtacagtacttaggacaggccccagagctactggggggtgcagagccaggcacttatctcactggaactattaatggtgaccccgaaagcgtggcgtcacttcactgggacggcggagcactgctgggggttctgcagtatagaggagccgaactgcatctccagccgttggaggggggaacacctaatagtgcgggtggccctggggctcatatattacggaggaagtcaccagcctctggccaaggacctatgtgtaacgtgaaggctcctcttggaagcccctcacccagacccagaagggccaagagattcgcgtcgctctcccgctttgtcgagaccctcgtggtcgccgatgacaagatggccgcttttcacggagctggcctgaagagatacctcctcacggtgatggccgctgcagccaaggcatttaagcaccccagcattcgcaaccctgttagtcttgttgtgaccaggctcgtgatcctgggcagtggcgaggagggaccccaagtcggcccaagtgctgcccaaaccctacgcagtttttgcgcctggcagagaggacttaacacacccgaggactcggatcctgatcatttcgatactgccattctttttactaggcaggatctgtgcggggttagcacttgtgacaccctggggatggcggatgtcggcacagtttgtgacccggctcgttcttgtgccatcgtcgaagatgacggcctgcaatccgccttcaccgctgcacatgagctggggcatgttttcaacatgctgcacgacaattcaaaaccgtgtatttccttgaatgggcctctttctacaagccgccatgtcatggcccctgtgatggcccatgtggatcccgaagagccctggtcaccttgttcagctcgcttcatcaccgattttctggacaatggctacggccattgtctgctggacaagcccgaggcaccattacatctacctgtcactttccccggaaaggactatgacgccgacagacaatgtcagctcacattcggtcccgattctcggcactgcccgcagctccccccaccttgcgccgcactctggtgctcagggcatctaaatgggcacgccatgtgtcagactaagcatagcccttgggcagatggcacgccttgtggcccagcccaggcctgtatgggaggcagatgtttgcacatggatcaactgcaggactttaacattcctcaagcagggggatggggcccatggggcccatggggtgattgctctcgaacgtgtggcggtggtgtccagttttcttcaagggactgtaccagacctgtgcctcgtaacggaggaaaatactgcgagggaaggagaaccaggttccggtcatgcaatacagaggactgccccaccggctccgccttgaccttcagggaagaacagtgcgctgcctataaccatcggaccgacctgttcaagtcctttccaggcccaatggactgggtccctcgttacaccggtgtcgccccacaggaccagtgcaaacttacatgccaggcccaggccctgggctactattatgtcctggagcctcgggtggtggacggtaccccctgctcacctgacagctcttcagtctgcgtccagggaagatgtatccacgccggttgcgatcgcatcatcggctcaaaaaagaagttcgataagtgcatggtgtgcgggggagatggctcaggttgttctaaacagtcaggctccttccgcaagttcaggtacgggtacaataatgtcgtgactattcctgcaggagctacacacatattggtaagacagcagggcaatccgggacacagatccatctatctggccttgaaactcccggatggatcatacgcgcttaacggggagtatacactcatgcctagtcctacggatgttgtgcttcctggagccgtgtcgctcaggtatagtggggcaaccgcagcctctgagacactctctggacatggcccattggcccagcccctgacgctgcaggtgctggtggctggtaatccacaagatacaagactccgatactcattcttcgtcccgaggcccacaccttctacgcccaggcctacgccccaagactggctgcaccgtcgagcccagattttggaaattttaagaaggcgcccttgggctggacgaaaatag

SEQ ID NO: 152817 - DNA, 1020 bp, Artificial Sequence
  derived and/or modified sequence
atgagccagaccggcagccaccccggcagaggcctggccggcagatggctgtggggcgcccagccctgcctgctgctgcccatcgtgcccctgagctggctggtgtggctgctgctgctgctgctggccagcctgctgcccagcgccagactggccagccccctgcccagagaggaggagatcgtgttccccgagaagctgaacggcagcgtgctgcccggcagcggcgcccccgccagactgctgtgcagactgcaggccttcggcgagaccctgctgctggagctggagcaggacagcggcgtgcaggtggagggcctgaccgtgcagtacctgggccaggcccccgagctgctgggcggcgccgagcccggcacctacctgaccggcaccatcaacggcgaccccgagagcgtggccagcctgcactgggacggcggcgccctgctgggcgtgctgcagtacagaggcgccgagctgcacctgcagcccctggagggcggcacccccaacagcgccggcggccccggcgcccacatcctgagaagaaagagccccgccagcggccagggccccatgtgcaacgtgaaggcccccctgggcagccccagccccagacccagaagagccaagagattcgccagcctgagcagattcgtggagaccctggtggtggccgacgacaagatggccgccttccacggcgccggcctgaagagatacctgctgaccgtgatggccgccgccgccaaggccttcaagcaccccagcatcagaaaccccgtgagcctggtggtgaccagactggtgatcctgggcagcggcgaggagggcccccaggtgggccccagcgccgcccagaccctgagaagcttctgcgcctggcagagaggcctgaacacccccgaggacagcgaccccgaccacttcgacaccgccatcctgttcaccagacaggtgagaccccagagcgccccccaggccatgcactgcaccatcctgagaagcgccaccacctag

SEQ ID NO: 152818 - DNA, 2514 bp, Artificial Sequence
  derived and/or modified sequence
atgagccagaccggcagccaccccggcagaggcctggccggcagatggctgtggggcgcccagccctgcctgctgctgcccatcgtgcccctgagctggctggtgtggctgctgctgctgctgctggccagcctgctgcccagcgccagactggccagccccctgcccagagaggaggagatcgtgttccccgagaagctgaacggcagcgtgctgcccggcagcggcgcccccgccagactgctgtgcagactgcaggccttcggcgagaccctgctgctggagctggagcaggacagcggcgtgcaggtggagggcctgaccgtgcagtacctgggccaggcccccgagctgctgggcggcgccgagcccggcacctacctgaccggcaccatcaacggcgaccccgagagcgtggccagcctgcactgggacggcggcgccctgctgggcgtgctgcagtacagaggcgccgagctgcacctgcagcccctggagggcggcacccccaacagcgccggcggccccggcgcccacatcctgagaagaaagagccccgccagcggccagggccccatgtgcaacgtgaaggcccccctgggcagccccagccccagacccagaagagccaagagattcgccagcctgagcagattcgtggagaccctggtggtggccgacgacaagatggccgccttccacggcgccggcctgaagagatacctgctgaccgtgatggccgccgccgccaaggccttcaagcaccccagcatcagaaaccccgtgagcctggtggtgaccagactggtgatcctgggcagcggcgaggagggcccccaggtgggccccagcgccgcccagaccctgagaagcttctgcgcctggcagagaggcctgaacacccccgaggacagcgaccccgaccacttcgacaccgccatcctgttcaccagacaggacctgtgcggcgtgagcacctgcgacaccctgggcatggccgacgtgggcaccgtgtgcgaccccgccagaagctgcgccatcgtggaggacgacggcctgcagagcgccttcaccgccgcccacgagctgggccacgtgttcaacatgctgcacgacaacagcaagccctgcatcagcctgaacggccccctgagcaccagcagacacgtgatggcccccgtgatggcccacgtggaccccgaggagccctggagcccctgcagcgccagattcatcaccgacttcctggacaacggctacggccactgcctgctggacaagcccgaggcccccctgcacctgcccgtgaccttccccggcaaggactacgacgccgacagacagtgccagctgaccttcggccccgacagcagacactgcccccagctgccccccccctgcgccgccctgtggtgcagcggccacctgaacggccacgccatgtgccagaccaagcacagcccctgggccgacggcaccccctgcggccccgcccaggcctgcatgggcggcagatgcctgcacatggaccagctgcaggacttcaacatcccccaggccggcggctggggcccctggggcccctggggcgactgcagcagaacctgcggcggcggcgtgcagttcagcagcagagactgcaccagacccgtgcccagaaacggcggcaagtactgcgagggcagaagaaccagattcagaagctgcaacaccgaggactgccccaccggcagcgccctgaccttcagagaggagcagtgcgccgcctacaaccacagaaccgacctgttcaagagcttccccggccccatggactgggtgcccagatacaccggcgtggccccccaggaccagtgcaagctgacctgccaggcccaggccctgggctactactacgtgctggagcccagagtggtggacggcaccccctgcagccccgacagcagcagcgtgtgcgtgcagggcagatgcatccacgccggctgcgacagaatcatcggcagcaagaagaagttcgacaagtgcatggtgtgcggcggcgacggcagcggctgcagcaagcagagcggcagcttcagaaagttcagatacggctacaacaacgtggtgaccatccccgccggcgccacccacatcctggtgagacagcagggcaaccccggccacagaagcatctacctggccctgaagctgcccgacggcagctacgccctgaacggcgagtacaccctgatgcccagccccaccgacgtggtgctgcccggcgccgtgagcctgagatacagcggcgccaccgccgccagcgagaccctgagcggccacggccccctggcccagcccctgaccctgcaggtgctggtggccggcaacccccaggacaccagactgagatacagcttcttcgtgcccagacccacccccagcacccccagacccaccccccaggactggctgcacagaagagcccagatcctggagatcctgagaagaagaccctgggccggcagaaagtag

SEQ ID NO: 152819 - protein, 1782 aa, Artificial Sequence
  derived and/or modified sequence
MGAGSSTEQRSPEQPPEGSSTPAEPEPSGGGPSAEAAPDTTADPAIAASDPATKLLQKNGQLSTINGVAEQDELSLQEGDLNGQKGALNGQGALNSQEEEEVIVTEVGQRDSEDVSKRDSDKEMATKSAVVHDITDDGQEETPEIIEQIPSSESNLEELTQPTESQANDIGFKKVFKFVGFKFTVKKDKTEKPDTVQLLTVKKDEGEGAAGAGDHKDPSLGAGEAASKESEPKQSTEKPEETLKREQSHAEISPPAESGQAVEECKEEGEEKQEKEPSKSAESPTSPVTSETGSTFKKFFTQGWAGWRKKTSFRKPKEDEVEASEKKKEQEPEKVDTEEDGKAEVASEKLTASEQAHPQEPAESAHEPRLSAEYEKVELPSEEQVSGSQGPSEEKPAPLATEVFDEKIEVHQEEVVAEVHVSTVEERTEEQKTEVEETAGSVPAEELVEMDAEPQEAEPAKELVKLKETCVSGEDPTQGADLSPDEKVLSKPPEGVVSEVEMLSSQERMKVQGSPLKKLFTSTGLKKLSGKKQKGKRGGGDEESGEHTQVPADSPDSQEEQKGESSASSPEEPEEITCLEKGLAEVQQDGEAEEGATSDGEKKREGVTPWASFKKMVTPKKRVRRPSESDKEDELDKVKSATLSSTESTASEMQEEMKGSVEEPKPEEPKRKVDTSVSWEALICVGSSKKRARRGSSSDEEGGPKAMGGDHQKADEAGKDKETGTDGILAGSQEHDPGQGSSSPEQAGSPTEGEGVSTWESFKRLVTPRKKSKSKLEEKSEDSIAGSGVEHSTPDTEPGKEESWVSIKKFIPGRRKKRPDGKQEQAPVEDAGPTGANEDDSDVPAVVPLSEYDAVEREKMEAQQAQKSAEQPEQKAATEVSKELSESQVHMMAAAVADGTRAATIIEERSPSWISASVTEPLEQVEAEAALLTEEVLEREVIAEEEPPTVTEPLPENREARGDTVVSEAELTPEAVTAAETAGPLGAEEGTEASAAEETTEMVSAVSQLTDSPDTTEEATPVQEVEGGVPDIEEQERRTQEVLQAVAEKVKEESQLPGTGGPEDVLQPVQRAEAERPEEQAEASGLKKETDVVLKVDAQEAKTEPFTQGKVVGQTTPESFEKAPQVTESIESSELVTTCQAETLAGVKSQEMVMEQAIPPDSVETPTDSETDGSTPVADFDAPGTTQKDEIVEIHEENEVASGTQSGGTEAEAVPAQKERPPAPSSFVFQEETKEQSKMEDTLEHTDKEVSVETVSILSKTEGTQEADQYADEKTKDVPFFEGLEGSIDTGITVSREKVTEVALKGEGTEEAECKKDDALELQSHAKSPPSPVEREMVVQVEREKTEAEPTHVNEEKLEHETAVTVSEEVSKQLLQTVNVPIIDGAKEVSSLEGSPPPCLGQEEAVCTKIQVQSSEASFTLTAAAEEEKVLGETANILETGETLEPAGAHLVLEEKSSEKNEDFAAHPGEDAVPTGPDCQAKSTPVIVSATTKKGLSSDLEGEKTTSLKWKSDEVDEQVACQEVKVSVAIEDLEPENGILELETKSSKLVQNIIQTAVDQFVRTEETATEMLTSELQTQAHVIKADSQDAGQETEKEGEEPQASAQDETPITSAKEESESTAVGQAHSDISKDMSEASEKTMTVEVEGSTVNDQQLEEVVLPSEEEGGGAGTKSVPEDDGHALLAERIEKSLVEPKEDEKGDDVDDPENQNSALADTDASGGLTKESPDTNGPKQKEKEDAQEVELQEGKVHSESDKAITPQAQEELQKQERESAKSELTES

SEQ ID NO: 152820 - DNA, 5349 bp, Artificial Sequence
  derived and/or modified sequence
atgggcgccggcagcagcaccgagcagagaagccccgagcagccccccgagggcagcagcacccccgccgagcccgagcccagcggcggcggccccagcgccgaggccgcccccgacaccaccgccgaccccgccatcgccgccagcgaccccgccaccaagctgctgcagaagaacggccagctgagcaccatcaacggcgtggccgagcaggacgagctgagcctgcaggagggcgacctgaacggccagaagggcgccctgaacggccagggcgccctgaacagccaggaggaggaggaggtgatcgtgaccgaggtgggccagagagacagcgaggacgtgagcaagagagacagcgacaaggagatggccaccaagagcgccgtggtgcacgacatcaccgacgacggccaggaggagacccccgagatcatcgagcagatccccagcagcgagagcaacctggaggagctgacccagcccaccgagagccaggccaacgacatcggcttcaagaaggtgttcaagttcgtgggcttcaagttcaccgtgaagaaggacaagaccgagaagcccgacaccgtgcagctgctgaccgtgaagaaggacgagggcgagggcgccgccggcgccggcgaccacaaggaccccagcctgggcgccggcgaggccgccagcaaggagagcgagcccaagcagagcaccgagaagcccgaggagaccctgaagagagagcagagccacgccgagatcagcccccccgccgagagcggccaggccgtggaggagtgcaaggaggagggcgaggagaagcaggagaaggagcccagcaagagcgccgagagccccaccagccccgtgaccagcgagaccggcagcaccttcaagaagttcttcacccagggctgggccggctggagaaagaagaccagcttcagaaagcccaaggaggacgaggtggaggccagcgagaagaagaaggagcaggagcccgagaaggtggacaccgaggaggacggcaaggccgaggtggccagcgagaagctgaccgccagcgagcaggcccacccccaggagcccgccgagagcgcccacgagcccagactgagcgccgagtacgagaaggtggagctgcccagcgaggagcaggtgagcggcagccagggccccagcgaggagaagcccgcccccctggccaccgaggtgttcgacgagaagatcgaggtgcaccaggaggaggtggtggccgaggtgcacgtgagcaccgtggaggagagaaccgaggagcagaagaccgaggtggaggagaccgccggcagcgtgcccgccgaggagctggtggagatggacgccgagccccaggaggccgagcccgccaaggagctggtgaagctgaaggagacctgcgtgagcggcgaggaccccacccagggcgccgacctgagccccgacgagaaggtgctgagcaagccccccgagggcgtggtgagcgaggtggagatgctgagcagccaggagagaatgaaggtgcagggcagccccctgaagaagctgttcaccagcaccggcctgaagaagctgagcggcaagaagcagaagggcaagagaggcggcggcgacgaggagagcggcgagcacacccaggtgcccgccgacagccccgacagccaggaggagcagaagggcgagagcagcgccagcagccccgaggagcccgaggagatcacctgcctggagaagggcctggccgaggtgcagcaggacggcgaggccgaggagggcgccaccagcgacggcgagaagaagagagagggcgtgaccccctgggccagcttcaagaagatggtgacccccaagaagagagtgagaagacccagcgagagcgacaaggaggacgagctggacaaggtgaagagcgccaccctgagcagcaccgagagcaccgccagcgagatgcaggaggagatgaagggcagcgtggaggagcccaagcccgaggagcccaagagaaaggtggacaccagcgtgagctgggaggccctgatctgcgtgggcagcagcaagaagagagccagaagaggcagcagcagcgacgaggagggcggccccaaggccatgggcggcgaccaccagaaggccgacgaggccggcaaggacaaggagaccggcaccgacggcatcctggccggcagccaggagcacgaccccggccagggcagcagcagccccgagcaggccggcagccccaccgagggcgagggcgtgagcacctgggagagcttcaagagactggtgacccccagaaagaagagcaagagcaagctggaggagaagagcgaggacagcatcgccggcagcggcgtggagcacagcacccccgacaccgagcccggcaaggaggagagctgggtgagcatcaagaagttcatccccggcagaagaaagaagagacccgacggcaagcaggagcaggcccccgtggaggacgccggccccaccggcgccaacgaggacgacagcgacgtgcccgccgtggtgcccctgagcgagtacgacgccgtggagagagagaagatggaggcccagcaggcccagaagagcgccgagcagcccgagcagaaggccgccaccgaggtgagcaaggagctgagcgagagccaggtgcacatgatggccgccgccgtggccgacggcaccagagccgccaccatcatcgaggagagaagccccagctggatcagcgccagcgtgaccgagcccctggagcaggtggaggccgaggccgccctgctgaccgaggaggtgctggagagagaggtgatcgccgaggaggagccccccaccgtgaccgagcccctgcccgagaacagagaggccagaggcgacaccgtggtgagcgaggccgagctgacccccgaggccgtgaccgccgccgagaccgccggccccctgggcgccgaggagggcaccgaggccagcgccgccgaggagaccaccgagatggtgagcgccgtgagccagctgaccgacagccccgacaccaccgaggaggccacccccgtgcaggaggtggagggcggcgtgcccgacatcgaggagcaggagagaagaacccaggaggtgctgcaggccgtggccgagaaggtgaaggaggagagccagctgcccggcaccggcggccccgaggacgtgctgcagcccgtgcagagagccgaggccgagagacccgaggagcaggccgaggccagcggcctgaagaaggagaccgacgtggtgctgaaggtggacgcccaggaggccaagaccgagcccttcacccagggcaaggtggtgggccagaccacccccgagagcttcgagaaggccccccaggtgaccgagagcatcgagagcagcgagctggtgaccacctgccaggccgagaccctggccggcgtgaagagccaggagatggtgatggagcaggccatcccccccgacagcgtggagacccccaccgacagcgagaccgacggcagcacccccgtggccgacttcgacgcccccggcaccacccagaaggacgagatcgtggagatccacgaggagaacgaggtggccagcggcacccagagcggcggcaccgaggccgaggccgtgcccgcccagaaggagagaccccccgcccccagcagcttcgtgttccaggaggagaccaaggagcagagcaagatggaggacaccctggagcacaccgacaaggaggtgagcgtggagaccgtgagcatcctgagcaagaccgagggcacccaggaggccgaccagtacgccgacgagaagaccaaggacgtgcccttcttcgagggcctggagggcagcatcgacaccggcatcaccgtgagcagagagaaggtgaccgaggtggccctgaagggcgagggcaccgaggaggccgagtgcaagaaggacgacgccctggagctgcagagccacgccaagagcccccccagccccgtggagagagagatggtggtgcaggtggagagagagaagaccgaggccgagcccacccacgtgaacgaggagaagctggagcacgagaccgccgtgaccgtgagcgaggaggtgagcaagcagctgctgcagaccgtgaacgtgcccatcatcgacggcgccaaggaggtgagcagcctggagggcagcccccccccctgcctgggccaggaggaggccgtgtgcaccaagatccaggtgcagagcagcgaggccagcttcaccctgaccgccgccgccgaggaggagaaggtgctgggcgagaccgccaacatcctggagaccggcgagaccctggagcccgccggcgcccacctggtgctggaggagaagagcagcgagaagaacgaggacttcgccgcccaccccggcgaggacgccgtgcccaccggccccgactgccaggccaagagcacccccgtgatcgtgagcgccaccaccaagaagggcctgagcagcgacctggagggcgagaagaccaccagcctgaagtggaagagcgacgaggtggacgagcaggtggcctgccaggaggtgaaggtgagcgtggccatcgaggacctggagcccgagaacggcatcctggagctggagaccaagagcagcaagctggtgcagaacatcatccagaccgccgtggaccagttcgtgagaaccgaggagaccgccaccgagatgctgaccagcgagctgcagacccaggcccacgtgatcaaggccgacagccaggacgccggccaggagaccgagaaggagggcgaggagccccaggccagcgcccaggacgagacccccatcaccagcgccaaggaggagagcgagagcaccgccgtgggccaggcccacagcgacatcagcaaggacatgagcgaggccagcgagaagaccatgaccgtggaggtggagggcagcaccgtgaacgaccagcagctggaggaggtggtgctgcccagcgaggaggagggcggcggcgccggcaccaagagcgtgcccgaggacgacggccacgccctgctggccgagagaatcgagaagagcctggtggagcccaaggaggacgagaagggcgacgacgtggacgaccccgagaaccagaacagcgccctggccgacaccgacgccagcggcggcctgaccaaggagagccccgacaccaacggccccaagcagaaggagaaggaggacgcccaggaggtggagctgcaggagggcaaggtgcacagcgagagcgacaaggccatcaccccccaggcccaggaggagctgcagaagcaggagagagagagcgccaagagcgagctgaccgagagctag

SEQ ID NO: 152821 - DNA, 6597 bp, Artificial Sequence
  derived and/or modified sequence
ttcttttaaggagtttgccgcgagcgcgtctccttcattcgcaggctgggcgcgttcgcagtcggctggcggcgaaggaaggcgctctcgggacctcgcgggcgcgcgtcttttggctcttgcccctgtccctgcggcttggggaaggcgtaacccggcggctaggcgcgggagaagtgcggaggagccatgggcgccgggagctccaccgagcagcgcagcccggagcagccgcccgaggggagctccacgccggctgagcccgagcccagcggcggcggcccctcggccgaggcggcgccagacaccaccgcggaccccgccatcgctgcctcggaccccgccaccaagctcctacagaagaatggtcagctgtccaccatcaatggcgtagctgagcaagatgagctcagcctccaggagggtgacctaaatggccagaaaggagccctgaacggtcaaggagccctaaacagccaggaggaagaagaagtcattgtcacagaggttggacagagagactctgaagatgtgagcaaaagagactccgataaagagatggctactaagtcagcggttgttcacgacatcacagatgatgggcaggaggagacacccgaaataatcgaacagattccttcttcagaaagcaatttagaagagctaacacaacccactgagtcccaggctaatgatattggatttaagaaggtgtttaagtttgttggctttaaattcactgtgaaaaaggataagacagagaagcctgacactgtccagctactcactgtgaagaaagatgaaggggagggagcagcaggggctggcgaccacaaggaccccagccttggggctggagaagcagcatccaaagaaagcgaacccaaacaatctacagagaaacccgaagagaccctgaagcgtgagcaaagccacgcagaaatttctcccccagccgaatctggccaagcagtggaggaatgcaaagaggaaggagaagagaaacaagaaaaagaacctagcaagtctgcagaatctccgactagtcccgtgaccagtgaaacaggatcaaccttcaaaaaattcttcactcaaggttgggccggctggcgcaaaaagaccagtttcaggaagccgaaggaggatgaagtggaagcttcagagaagaaaaaggaacaagagccagaaaaagtagacacagaagaagacggaaaggcagaggttgcctccgagaaactgaccgcctccgagcaagcccacccacaggagccggcagaaagtgcccacgagccccggttatcagctgaatatgagaaagttgagctgccctcagaggagcaagtcagtggctcgcagggaccttctgaagagaaacctgctccgttggcgacagaagtgtttgatgagaaaatagaagtccaccaagaagaggttgtggccgaagtccacgtcagcaccgtggaggagagaaccgaagagcagaaaacggaggtggaagaaacagcagggtctgtgccagctgaagaattggttgaaatggatgcagaacctcaggaagctgaacctgccaaggagctggtgaagctcaaagaaacgtgtgtttccggagaggaccctacacagggagctgacctcagtcctgatgagaaggtgctgtccaaaccccccgaaggcgttgtgagtgaggtggaaatgctgtcatcacaggagagaatgaaggtgcagggaagtccactaaagaagctttttaccagcactggcttaaaaaagctttctggaaagaaacagaaagggaaaagaggaggaggagacgaggaatcaggggagcacactcaggttccagccgattctccggacagccaggaggagcaaaagggcgagagctctgcctcatcccctgaggagcccgaggagatcacgtgtctggaaaagggcttagccgaggtgcagcaggatggggaagctgaagaaggagctacttccgatggagagaaaaaaagagaaggtgtcactccctgggcatcattcaaaaagatggtgacgcccaagaagcgtgttagacggccttcggaaagtgataaagaagatgagctggacaaggtcaagagcgctaccttgtcttccaccgagagcacagcctctgaaatgcaagaagaaatgaaagggagcgtggaagagccaaagccggaagaaccaaagcgcaaggtggatacctcagtatcttgggaagctttaatttgtgtgggatcatccaagaaaagagcaaggagagggtcctcttctgatgaggaagggggaccaaaagcaatgggaggagaccaccagaaagctgatgaggccggaaaagacaaagagacggggacagacgggatccttgctggttcccaagaacatgatccagggcagggaagttcctccccggagcaagctggaagccctaccgaaggggagggcgtttccacctgggagtcatttaaaaggttagtcacgccaagaaaaaaatcaaagtccaagctggaagagaaaagcgaagactccatagctgggtctggtgtagaacattccactccagacactgaacccggtaaagaagaatcctgggtctcaatcaagaagtttattcctggacgaaggaagaaaaggccagatgggaaacaagaacaagcccctgttgaagacgcagggccaacaggggccaacgaagatgactctgatgtcccggccgtggtccctctgtctgagtatgatgctgtagaaagggagaaaatggaggcacagcaagcccaaaaaagcgcagagcagcccgagcagaaggcagccactgaggtgtccaaggagctcagcgagagtcaggttcatatgatggcagcagctgtcgctgacgggacgagggcagctaccattattgaagaaaggtctccttcttggatatctgcttcagtgacagaacctcttgaacaagtagaagctgaagccgcactgttaactgaggaggtattggaaagagaagtaattgcagaagaagaaccccccacggttactgaacctctgccagagaacagagaggcccggggcgacacggtcgttagtgaggcggaattgacccccgaagctgtgacagctgcagaaactgcagggccattgggtgccgaagaaggaaccgaagcatctgctgctgaagagaccacagaaatggtgtcagcagtctcccagttaaccgactccccagacaccacagaggaggccactccggtgcaggaggtggaaggtggcgtacctgacatagaagagcaagagaggcggactcaagaggtcctccaggcagtggcagaaaaagtgaaagaggaatcccagctgcctggcaccggtgggccagaagatgtgcttcagcctgtgcagagagcagaggcagaaagaccagaagagcaggctgaagcgtcgggtctgaagaaagagacggatgtagtgttgaaagtagatgctcaggaggcaaaaactgagccttttacacaagggaaggtggtggggcagaccaccccagaaagctttgaaaaagctcctcaagtcacagagagcatagagtccagtgagcttgtaaccacttgtcaagccgaaaccttagctggggtaaaatcacaggagatggtgatggaacaggctatcccccctgactcggtggaaacccctacagacagtgagactgatggaagcacccccgtagccgactttgacgcaccaggcacaacccagaaagacgagattgtggaaatccatgaggagaatgaggtcgcatctggtacccagtcagggggcacagaagcagaggcagttcctgcacagaaagagaggcctccagcaccttccagttttgtgttccaggaagaaactaaagaacaatcaaagatggaagacactctagagcatacagataaagaggtgtcagtggaaactgtatccattctgtcaaagactgaggggactcaagaggctgaccagtatgctgatgagaaaaccaaagacgtaccatttttcgaaggacttgaggggtctatagacacaggcataacagtcagtcgggaaaaggtcactgaagttgcccttaaaggtgaagggacagaagaagctgaatgtaaaaaggatgatgctcttgaactgcagagtcacgctaagtctcctccatcccccgtggagagagagatggtagttcaagtcgaaagggagaaaacagaagcagagccaacccatgtgaatgaagagaagcttgagcacgaaacagctgttaccgtatctgaagaggtcagtaagcagctcctccagacagtgaatgtgcccatcatagatggggcaaaggaagtcagcagtttggaaggaagccctcctccctgcctaggtcaagaggaggcagtatgcaccaaaattcaagttcagagctctgaggcatcattcactctaacagcggctgcagaggaggaaaaggtcttaggagaaactgccaacattttagaaacaggtgaaacgttggagcctgcaggtgcacatttagttctggaagagaaatcctctgaaaaaaatgaagactttgccgctcatccaggggaagatgctgtgcccacagggcccgactgtcaggcaaaatcgacaccagtgatagtatctgctactaccaagaaaggcttaagttccgacctggaaggagagaaaaccacatcactgaagtggaagtcagatgaagtcgatgagcaggttgcttgccaggaggtcaaagtgagtgtagcaattgaggatttagagcctgaaaatgggattttggaacttgagaccaaaagcagtaaacttgtccaaaacatcatccagacagccgttgaccagtttgtacgtacagaagaaacagccaccgaaatgttgacgtctgagttacagacacaagctcacgtgataaaagctgacagccaggacgctggacaggaaacggagaaagaaggagaggaacctcaggcctctgcacaggatgaaacaccaattacttcagccaaagaggagtcagagtcaaccgcagtgggacaagcacattctgatatttccaaagacatgagtgaagcctcagaaaagaccatgactgttgaggtagaaggttccactgtaaatgatcagcagctggaagaggtcgtcctcccatctgaggaagagggaggtggagctggaacaaagtctgtgccagaagatgatggtcatgccttgttagcagaaagaatagagaagtcactagttgaaccgaaagaagatgaaaaaggtgatgatgttgatgaccctgaaaaccagaactcagccctggctgatactgatgcctcaggaggcttaaccaaagagtccccagatacaaatggaccaaaacaaaaagagaaggaggatgcccaggaagtagaattgcaggaaggaaaagtgcacagtgaatcagataaagcgatcacaccccaagcacaggaggagttacagaaacaagagagagaatctgcaaagtcagaacttacagaatcttaaaacatcatgcagttaaactcattgtctgtttggaagaccagaatgtgaagacaagtagtagaagaaaatgaatgctgctgctgagactgaagaccagtatttcagaactttgagaattggagagcaggcacatcaactgatctcatttctagagagcccctgacaatcctgaggcttcatcaggagctagagccatttaacatttcctctttccaagaccaacctacaattttcccttgataaccatataaattctgatttaaggtcctaaattcttaacctggaactggagttggcaatacctagttctgcttctgaaactggagtatcattctttacatatttatatgtatgttttaagtagtcctcctgtatctattgtatatttttttcttaatgtttaaggaaatgtgcaggatactacatgctttttgtatcacacagtatatgatggggcatgtgccatagtgcaggcttggggagctttaagcctcagttatataacccacgaaaaacagagcctcctagatgtaacattcctgatcaaggtacaattctttaaaattcactaatgattgaggtccatatttagtggtactctgaaattggtcactttcctattacacggagtgtgctaaaactaaaaagcattttgaaacatacagaatgttctattgtcattgggaaatttttctttctaacccagtggaggttagaaagaagttatattctggtagcaaattaactttacatcctttttcctacttgttatggttgtttggaccgataagtgtgcttaatcctgaggcaaagtagtgaatatgttttatatgttatgaagaaaagaattgttgtaagtttttgattctactcttatatgctggactgcattcacacatggcatgaaataagtcaggttctttacaaatggtattttgatagatactggattgtgtttgtgccatatttgtgccattcttttaagaacaatgttgcaacacattcatttggataagttgtgatttgacgactgatttaaataaaatatttgcttcactt

SEQ ID NO: 152822 - DNA, 8432 bp, Artificial Sequence
  derived and/or modified sequence
gggactcggactcgctcctgggcgagctgaaagtcggctgcagcagaagctcctgccttgggagtttgccgcgagcgcgtctccttcattcgcaggctgggcgcgttcgcagtcggctggcggcgaaggaaggcgctctcgggacctcgcgggcgcgcgtcttttggctcttgcccctgtccctgcggcttggggaaggcgtaacccggcggctaggcgcgggagaagtgcggaggagccatgggcgccgggagctccaccgagcagcgcagcccggagcagccgcccgaggggagctccacgccggctgagcccgagcccagcggcggcggcccctcggccgaggcggcgccagacaccaccgcggaccccgccatcgctgcctcggaccccgccaccaagctcctacagaagaatggtcagctgtccaccatcaatggcgtagctgagcaagatgagctcagcctccaggagggtgacctaaatggccagaaaggagccctgaacggtcaaggagccctaaacagccaggaggaagaagaagtcattgtcacagaggttggacagagagactctgaagatgtgagcaaaagagactccgataaagagatggctactaagtcagcggttgttcacgacatcacagatgatgggcaggaggagacacccgaaataatcgaacagattccttcttcagaaagcaatttagaagagctaacacaacccactgagtcccaggctaatgatattggatttaagaaggtgtttaagtttgttggctttaaattcactgtgaaaaaggataagacagagaagcctgacactgtccagctactcactgtgaagaaagatgaaggggagggagcagcaggggctggcgaccacaaggaccccagccttggggctggagaagcagcatccaaagaaagcgaacccaaacaatctacagagaaacccgaagagaccctgaagcgtgagcaaagccacgcagaaatttctcccccagccgaatctggccaagcagtggaggaatgcaaagaggaaggagaagagaaacaagaaaaagaacctagcaagtctgcagaatctccgactagtcccgtgaccagtgaaacaggatcaaccttcaaaaaattcttcactcaaggttgggccggctggcgcaaaaagaccagtttcaggaagccgaaggaggatgaagtggaagcttcagagaagaaaaaggaacaagagccagaaaaagtagacacagaagaagacggaaaggcagaggttgcctccgagaaactgaccgcctccgagcaagcccacccacaggagccggcagaaagtgcccacgagccccggttatcagctgaatatgagaaagttgagctgccctcagaggagcaagtcagtggctcgcagggaccttctgaagagaaacctgctccgttggcgacagaagtgtttgatgagaaaatagaagtccaccaagaagaggttgtggccgaagtccacgtcagcaccgtggaggagagaaccgaagagcagaaaacggaggtggaagaaacagcagggtctgtgccagctgaagaattggttgaaatggatgcagaacctcaggaagctgaacctgccaaggagctggtgaagctcaaagaaacgtgtgtttccggagaggaccctacacagggagctgacctcagtcctgatgagaaggtgctgtccaaaccccccgaaggcgttgtgagtgaggtggaaatgctgtcatcacaggagagaatgaaggtgcagggaagtccactaaagaagctttttaccagcactggcttaaaaaagctttctggaaagaaacagaaagggaaaagaggaggaggagacgaggaatcaggggagcacactcaggttccagccgattctccggacagccaggaggagcaaaagggcgagagctctgcctcatcccctgaggagcccgaggagatcacgtgtctggaaaagggcttagccgaggtgcagcaggatggggaagctgaagaaggagctacttccgatggagagaaaaaaagagaaggtgtcactccctgggcatcattcaaaaagatggtgacgcccaagaagcgtgttagacggccttcggaaagtgataaagaagatgagctggacaaggtcaagagcgctaccttgtcttccaccgagagcacagcctctgaaatgcaagaagaaatgaaagggagcgtggaagagccaaagccggaagaaccaaagcgcaaggtggatacctcagtatcttgggaagctttaatttgtgtgggatcatccaagaaaagagcaaggagagggtcctcttctgatgaggaagggggaccaaaagcaatgggaggagaccaccagaaagctgatgaggccggaaaagacaaagagacggggacagacgggatccttgctggttcccaagaacatgatccagggcagggaagttcctccccggagcaagctggaagccctaccgaaggggagggcgtttccacctgggagtcatttaaaaggttagtcacgccaagaaaaaaatcaaagtccaagctggaagagaaaagcgaagactccatagctgggtctggtgtagaacattccactccagacactgaacccggtaaagaagaatcctgggtctcaatcaagaagtttattcctggacgaaggaagaaaaggccagatgggaaacaagaacaagcccctgttgaagacgcagggccaacaggggccaacgaagatgactctgatgtcccggccgtggtccctctgtctgagtatgatgctgtagaaagggagaaaatggaggcacagcaagcccaaaaaagcgcagagcagcccgagcagaaggcagccactgaggtgtccaaggagctcagcgagagtcaggttcatatgatggcagcagctgtcgctgacgggacgagggcagctaccattattgaagaaaggtctccttcttggatatctgcttcagtgacagaacctcttgaacaagtagaagctgaagccgcactgttaactgaggaggtattggaaagagaagtaattgcagaagaagaaccccccacggttactgaacctctgccagagaacagagaggcccggggcgacacggtcgttagtgaggcggaattgacccccgaagctgtgacagctgcagaaactgcagggccattgggtgccgaagaaggaaccgaagcatctgctgctgaagagaccacagaaatggtgtcagcagtctcccagttaaccgactccccagacaccacagaggaggccactccggtgcaggaggtggaaggtggcgtacctgacatagaagagcaagagaggcggactcaagaggtcctccaggcagtggcagaaaaagtgaaagaggaatcccagctgcctggcaccggtgggccagaagatgtgcttcagcctgtgcagagagcagaggcagaaagaccagaagagcaggctgaagcgtcgggtctgaagaaagagacggatgtagtgttgaaagtagatgctcaggaggcaaaaactgagccttttacacaagggaaggtggtggggcagaccaccccagaaagctttgaaaaagctcctcaagtcacagagagcatagagtccagtgagcttgtaaccacttgtcaagccgaaaccttagctggggtaaaatcacaggagatggtgatggaacaggctatcccccctgactcggtggaaacccctacagacagtgagactgatggaagcacccccgtagccgactttgacgcaccaggcacaacccagaaagacgagattgtggaaatccatgaggagaatgaggtcgcatctggtacccagtcagggggcacagaagcagaggcagttcctgcacagaaagagaggcctccagcaccttccagttttgtgttccaggaagaaactaaagaacaatcaaagatggaagacactctagagcatacagataaagaggtgtcagtggaaactgtatccattctgtcaaagactgaggggactcaagaggctgaccagtatgctgatgagaaaaccaaagacgtaccatttttcgaaggacttgaggggtctatagacacaggcataacagtcagtcgggaaaaggtcactgaagttgcccttaaaggtgaagggacagaagaagctgaatgtaaaaaggatgatgctcttgaactgcagagtcacgctaagtctcctccatcccccgtggagagagagatggtagttcaagtcgaaagggagaaaacagaagcagagccaacccatgtgaatgaagagaagcttgagcacgaaacagctgttaccgtatctgaagaggtcagtaagcagctcctccagacagtgaatgtgcccatcatagatggggcaaaggaagtcagcagtttggaaggaagccctcctccctgcctaggtcaagaggaggcagtatgcaccaaaattcaagttcagagctctgaggcatcattcactctaacagcggctgcagaggaggaaaaggtcttaggagaaactgccaacattttagaaacaggtgaaacgttggagcctgcaggtgcacatttagttctggaagagaaatcctctgaaaaaaatgaagactttgccgctcatccaggggaagatgctgtgcccacagggcccgactgtcaggcaaaatcgacaccagtgatagtatctgctactaccaagaaaggcttaagttccgacctggaaggagagaaaaccacatcactgaagtggaagtcagatgaagtcgatgagcaggttgcttgccaggaggtcaaagtgagtgtagcaattgaggatttagagcctgaaaatgggattttggaacttgagaccaaaagcagtaaacttgtccaaaacatcatccagacagccgttgaccagtttgtacgtacagaagaaacagccaccgaaatgttgacgtctgagttacagacacaagctcacgtgataaaagctgacagccaggacgctggacaggaaacggagaaagaaggagaggaacctcaggcctctgcacaggatgaaacaccaattacttcagccaaagaggagtcagagtcaaccgcagtgggacaagcacattctgatatttccaaagacatgagtgaagcctcagaaaagaccatgactgttgaggtagaaggttccactgtaaatgatcagcagctggaagaggtcgtcctcccatctgaggaagagggaggtggagctggaacaaagtctgtgccagaagatgatggtcatgccttgttagcagaaagaatagagaagtcactagttgaaccgaaagaagatgaaaaaggtgatgatgttgatgaccctgaaaaccagaactcagccctggctgatactgatgcctcaggaggcttaaccaaagagtccccagatacaaatggaccaaaacaaaaagagaaggaggatgcccaggaagtagaattgcaggaaggaaaagtgcacagtgaatcagataaagcgatcacaccccaagcacaggaggagttacagaaacaagagagagaatctgcaaagtcagaacttacagaatcttaaaacatcatgcagttaaactcattgtctgtttggaagaccagaatgtgaagacaagtagtagaagaaaatgaatgctgctgctgagactgaagaccagtatttcagaactttgagaattggagagcaggcacatcaactgatctcatttctagagagcccctgacaatcctgaggcttcatcaggagctagagccatttaacatttcctctttccaagaccaacctacaattttcccttgataaccatataaattctgatttaaggtcctaaattcttaacctggaactggagttggcaatacctagttctgcttctgaaactggagtatcattctttacatatttatatgtatgttttaagtagtcctcctgtatctattgtatatttttttcttaatgtttaaggaaatgtgcaggatactacatgctttttgtatcacacagtatatgatggggcatgtgccatagtgcaggcttggggagctttaagcctcagttatataacccacgaaaaacagagcctcctagatgtaacattcctgatcaaggtacaattctttaaaattcactaatgattgaggtccatatttagtggtactctgaaattggtcactttcctattacacggagtgtgctaaaactaaaaagcattttgaaacatacagaatgttctattgtcattgggaaatttttctttctaacccagtggaggttagaaagaagttatattctggtagcaaattaactttacatcctttttcctacttgttatggttgtttggaccgataagtgtgcttaatcctgaggcaaagtagtgaatatgttttatatgttatgaagaaaagaattgttgtaagtttttgattctactcttatatgctggactgcattcacacatggcatgaaataagtcaggttctttacaaatggtattttgatagatactggattgtgtttgtgccatatttgtgccattcttttaagaacaatgttgcaacacattcatttggataagttgtgatttgacgactgatttaaataaaatatttgcttcacttagatttgctggttttattagataccaggaagcctgggacatatgtgtaccacattagaattctaaagataatgattgataagctagaactttctgatgtagtcattacatgaaaccccttgtcactggtttgtgtgttcagaggaagccatggccgagatagctttcctgaaataaaccagtagcttttcagattgacgttcttgctacaattgtaccatctggtaattcctgaaaatgtcaatttttttgtgttaatatttttggtttcaaacaataacaaatgtctctagaaagaaattttaagaaagcttaattaatagtaaaaatgcctttcctgaaataatcttggaaaattttttaaatgtcaaaatgatgagtcatgctaatacattgagggtttgtttttttgtttgtttgtttgtttgtttttgagacagagtttcgctcttgttgcccaggctggagtgcaatggcacgatctcagctcaccgcaacctccacctcccggattccagcgattctcctgcctcagcctacattaagggttttgtcagacaattgtcacacgaagaatagtgtcacttatctactcttgacacacagaactggcctggcatatagctttccagattttactcaaacttggtactccagtttgaaaatttaaattttgactgctgattagctggaaagcctagttttaatggaaagaaagtttgcttttaaaactgaaagtagtttctttttgctaacaaatctaacttcatacataattggccatattagtaaaacacctcatgatagcagtgtatatatagtcttgtttgtagttggaagtcatcttttaggagttattctcaaatatatataatagctacccatgcatcattattaaaatccccaaattcaaaaaacctctgatatatatatataatttttttttttttttttttttggccaactgagattgaaatccaagtgctggtttctagttctgaacatcaactaaagagttttggaaatgacagcaatttataacaagttcatattgacttcctctctatggcaggaagacattctgtgctgttttgaacagattaaagatttgtgtagtttgtgggaaattgacgtttttgtttaaattccacccgcgtttgtcttttcctaccacctgtggccaggtgctcgctggccatcacagttgcgattccatgagtagctgctttatgactgctttttgtactatctggatgtgcccagagttacttctgtacaagctctgtatctatgtccgttgagaacattattttaacaagaagaacaccaacagtagcatgaaatataatactgttttataattctaaagctgctgttaatttatgaagtacataataatctaatgtaaactgcagaagtcagagcaagtgcctacattttgttatttttggcattactacagagccatgtacaatagaaagcaatgcaagacttgtaaactctcaccacttcttgtaatatcaaatgttccccctcaggttattttgcttatggtacccatgagttgcctctctctgtacatagataaattgttccaatattttcctttgatgtttggaactacagatagtcaagggctggaaattttagttttcaatataagcttccagcttagcaattacctctagtcgaagacaatatttgattcctagttctgtttggggcaaattttcatttatctaaataaaatgcaatctaattaaatgccatggattttctttctgt

SEQ ID NO: 152823 - DNA, 5349 bp, Artificial Sequence
  derived and/or modified sequence
atgggtgctgggagttccaccgaacagcgctccccagagcagcccccagaggggtcttccacgcccgccgaacctgaacccagcggaggcggtccaagcgcagaagccgcccccgatactacggcagaccctgccattgctgcctccgatcccgcaacaaagctactgcaaaaaaacggacagctgtctacaattaatggggtagcggaacaggatgaattatctctgcaagagggggatctgaacggccagaagggcgctctcaacggccagggagctctgaattcacaggaagaagaggaggtcatagttacggaggtcgggcagagagactcagaggacgtctctaagagggacagtgataaggagatggccacaaaatccgcagtggtgcacgatataaccgatgatggccaggaggaaacgccagaaatcatcgaacagattcctagctcggagagtaatttggaagaattgactcaaccaactgagagccaagcgaacgatatcgggtttaagaaggtgttcaagttcgtgggattcaagttcacagtcaagaaggacaaaaccgaaaagccagataccgtgcagctattaacggtgaagaaggacgagggagaaggggccgccggagcaggagaccataaggacccttctctgggcgccggtgaggctgccagcaaggagtccgagcccaaacagagcacagagaagccagaggaaaccttgaagagggaacaaagccacgccgaaatctctccacccgccgagagcgggcaggccgttgaggaatgtaaagaagagggcgaggagaagcaggagaaagaaccaagcaaaagtgcggaatcgcccaccagtcccgtgacatcggagaccggctctacatttaaaaagttcttcacccaagggtgggccgggtggaggaagaagaccagcttccggaaacctaaagaagacgaagtggaggccagtgaaaagaaaaaagagcaggaaccggaaaaggtggacacagaggaagacggtaaagctgaggtggcgtccgaaaagctgaccgcctccgagcaggctcatcctcaggagcccgccgagtcggcgcatgaaccaagactctctgccgagtacgaaaaggtagaattgccatccgaagaacaggtttccggtagtcaggggccgtccgaggagaaaccagcccccctcgctaccgaagtgttcgacgagaagatcgaggttcatcaggaggaggtcgtcgcagaagtgcatgtcagcaccgtggaagagcggaccgaggaacagaagaccgaggttgaggagaccgcgggctctgtccccgccgaagagctcgtggaaatggatgctgagcctcaggaggccgagcccgcaaaagagctggtaaagctgaaagagacttgtgtttccggcgaagacccaacacagggcgccgacctctccccagacgagaaggtcttatccaagcccccagagggcgtcgtgagcgaggtagagatgctgagcagtcaggaacgaatgaaggtgcagggatctcccctaaagaaactgttcacatccactgggctcaaaaagctgtcgggcaaaaagcagaagggtaaacgcggcggcggcgatgaggaatctggcgaacatactcaggtgcctgctgatagtcccgattctcaggaggagcaaaaaggggaatcgtcagccagcagccctgaggaaccagaagagatcacttgtttagaaaagggtctggcagaagtccaacaggacggtgaagctgaggagggtgccacatctgatggggagaaaaaaagagagggggtaaccccatgggcatccttcaagaagatggttactcccaagaagagggtcaggaggccaagtgagtcagacaaggaagatgaactagataaggtgaagagtgctacactcagctcaacagagtctaccgctagtgaaatgcaagaggagatgaaaggttcagtggaagagcccaagccggaggaacctaagagaaaagtcgatacctcagtatcatgggaggccctcatctgtgtcgggagttcaaagaagagggcacggagaggcagtagttcagacgaggaaggggggccgaaagccatgggcggagatcaccagaaggcagatgaagccggcaaggataaggaaaccggcacagacgggattctcgccggctcacaggagcatgaccccggccaaggatctagctcacctgagcaggccgggtccccgaccgaaggggagggtgtgtcaacctgggaaagtttcaagaggctcgtgaccccaagaaaaaagagcaagtccaaattagaggagaagagcgaggattccatcgcagggtcgggcgtggaacactcaacaccggacacggagccaggaaaagaggagtcctgggtctccattaaaaaatttatccccggccgcaggaaaaaaagacccgatggaaaacaggagcaagcacctgttgaggacgccgggcccacgggagcgaacgaggatgattccgatgtccccgccgtggtgcccctctcagagtacgacgcggtggagagagaaaaaatggaagcacagcaagcacaaaagagcgccgagcagccagagcagaaagcagccaccgaggtgtctaaagagctgagtgagtctcaggtccatatgatggccgccgccgtggcagacggaacccgggccgccaccattatagaggaacgatctccttcatggatctccgcatccgtgacagagcctctggaacaggtggaagcagaggcggccttactcacggaagaagtcctggagcgcgaggtcattgctgaggaagagcctcccaccgtgacagaaccgctgcctgaaaaccgggaagctcgcggtgataccgtcgtctccgaggccgagctcacccctgaggccgtgacggccgccgagaccgccggtcccctgggggcggaagaggggacggaggcctccgcggccgaggaaaccacagaaatggtgagcgcagtgagtcagttgacagactctcctgacaccacggaagaagccactccagtgcaggaagtggaaggcggtgtgccagacatcgaagagcaggagcggagaacacaggaggtgctgcaggcagtcgcggaaaaggtgaaagaagagagtcagctgcccggcaccgggggaccggaggacgttctccagcccgtgcaacgggccgaggctgaacgacccgaagagcaagctgaagccagtgggctgaagaaggagactgacgtcgtcctcaaggtggacgcccaggaagcaaaaaccgagccctttacgcaagggaaagtggtcggacagactacccctgagtccttcgagaaggccccccaggttactgagtcaatagagtcctccgagctggtgactacatgtcaggcagagacgttggctggggtcaaaagccaggaaatggtaatggagcaagcaatccccccggacagtgttgagacgcctaccgactcagagaccgatggttccacacccgtggccgatttcgatgcaccaggtaccactcagaaggacgaaatagtggagatccacgaggaaaacgaggtagcatctgggacccagtcaggtgggaccgaagccgaggccgtgcccgcacagaaggagcgacctcctgccccgtcctctttcgtgtttcaggaagaaactaaggaacagagcaagatggaggatacgctggagcatactgacaaagaagtaagcgtggagactgtgtccatactctccaagactgaaggtacccaagaggcagatcagtatgcggatgagaaaactaaagacgttcctttcttcgaagggcttgaaggttccatagacacaggcattacggtgagccgcgaaaaagtgaccgaagttgctctgaaaggggaagggacagaggaggcagagtgtaaaaaagatgatgcccttgaactccagtctcatgccaaatcccctccttcgcccgttgagagagagatggtggtccaggtcgaaagagagaagactgaggccgagcctactcacgtgaacgaggaaaagctagaacatgagacagctgttaccgtgagtgaagaagtttccaaacagttgctccagactgtcaacgtcccgattattgatggggctaaggaagtgtcttccctggagggctccccaccaccatgcctcgggcaggaagaggctgtttgcaccaaaatccaggtgcagagctcagaagcgtcattcactctaacagcggctgccgaagaggagaaggtgctaggggagaccgctaacatcctggagacgggcgagacccttgagcctgctggggctcacctagtgttagaagaaaagtcctctgaaaaaaatgaagattttgctgctcatcctggggaagacgccgtacccactggccctgattgccaggcaaagagcacaccggtaattgttagtgcgacaacgaagaaaggactgagctcagacctggagggcgaaaaaaccacgtccctcaagtggaagagcgatgaggtcgatgaacaggtcgcctgccaggaagttaaggtatctgtagccattgaggatctggagcctgagaacggtattctcgaactggaaacgaagtcgagcaagctcgtgcagaacattatccagacagccgtggaccagtttgtgcggaccgaggaaacagcgaccgaaatgctgaccagtgagcttcagactcaggcgcatgtgatcaaggctgattctcaggatgcagggcaggagacagaaaaagagggggaggagcctcaagctagcgcccaggatgagactcctattacttccgctaaggaggaatccgaatcgacagctgtgggacaggcccacagtgacatttccaaggatatgtcggaagccagcgaaaagacaatgacggtcgaggtggagggatccactgtgaatgatcagcagttggaagaagtagtcctgccttctgaggaggagggtggtggcgccggaactaaatccgtgccggaagacgacggtcacgctttactagctgagcggatcgagaaaagtctggtagaacccaaggaggatgagaaaggcgacgacgttgacgacccagaaaatcagaacagcgccctggcagacaccgatgcctcgggagggctgaccaaggagtcacccgatacaaacggccccaaacaaaaggaaaaggaggacgcacaggaggtcgagcttcaggaagggaaggtgcattccgaaagcgacaaagcaatcaccccgcaggcccaagaggaactgcagaagcaggaaagggagtccgccaaatccgagctcaccgaatcttag

SEQ ID NO: 152824 - DNA, 5349 bp, Artificial Sequence
  derived and/or modified sequence
atgggggcaggaagcagcacggagcaaagatctcccgagcagccccccgaggggtcctccacacctgccgaacctgaacccagtggcgggggtcccagtgccgaagctgcccccgacacgactgcagatcctgccatcgccgctagcgatcctgctaccaaactgcttcagaaaaacggacagctgagcactatcaatggagtggcagaacaggatgaactcagtttacaggaaggcgacttgaacgggcagaaaggcgctttaaacgggcaaggagccctcaattcacaggaggaggaggaagtaatcgtgacagaggtcgggcagcgcgatagcgaagatgtgtcaaaaagggactctgataaagaaatggctaccaagagcgccgttgtccacgacatcaccgacgatggccaggaagagacacctgagataatagagcagatcccaagttccgagagtaacctggaagagttaacccaacctactgagtcccaggccaacgatattggttttaaaaaggtatttaaattcgttgggttcaagttcacagtaaagaaagataagacggagaagcctgacactgtgcagctcctaacggtcaaaaaagatgagggcgaaggcgctgctggggctggcgatcataaggatccaagcttaggggctggcgaggcagccagtaaggagtcggaacccaaacagagcactgagaagcctgaggagacactgaaaagggaacagagccacgccgagatctccccccctgcagagagcggtcaggccgtcgaagaatgcaaagaggagggagaagagaagcaggagaaagagccctccaagagcgccgagtctcccacgagtccagtgacctctgagacaggatcaacatttaagaaatttttcacccagggatgggctggatggcggaagaaaaccagttttcggaagccaaaagaagatgaggtggaggccagtgagaagaagaaagaacaagagccggaaaaggtggataccgaagaggacggcaaagcggaagtggcctccgagaagctgacagctagcgagcaggcacacccccaagagcccgccgagagcgctcacgagccaaggcttagcgctgaatatgagaaagtggaattgccaagtgaggaacaggtgagcggctctcagggtccctcagaggaaaagcccgctcctttagctacagaagtatttgatgaaaagattgaggtccaccaggaagaagtggttgcagaagtgcacgtttctacagtcgaagaaagaactgaggagcagaaaacggaggtggaggagacagccggcagcgtccctgcagaagagttggttgaaatggacgctgagccacaagaagctgagcctgcgaaggaactcgtcaagttgaaggaaacttgcgtgagcggcgaagatccaactcagggggcagacctgagcccggatgagaaggtcctgagcaagcctcccgaaggggtagtatccgaagtagagatgctctcaagtcaggagcgcatgaaagtacaggggtcccctctgaagaaactgtttacatctaccggcctcaagaagctctccggtaagaagcaaaaagggaagcgtgggggtggggatgaagaatccggcgaacacacccaggttcccgcggacagtcctgattctcaggaggagcagaagggcgagtccagtgccagcagccccgaggaacccgaggagatcacctgtctggagaagggactagctgaggtccaacaggatggtgaggctgaggaaggagcaacttcagatggagaaaagaaaagagagggggtcaccccttgggcttcctttaaaaagatggttactcccaagaagcgagttaggcggcctagtgagtctgataaggaggatgaactcgataaggtgaagtccgccactctgagtagcactgagtccacagcctccgaaatgcaggaagagatgaaaggaagtgtggaagaacctaaacccgaggaacccaagcgcaaggtggatacatcagtttcctgggaggccctgatctgcgttggaagctcgaagaagagagcacgccgaggaagctcttcagacgaggaggggggcccaaaggcgatggggggcgaccatcagaaagctgacgaagcaggaaaggataaggagactgggacagacgggattctggccggcagccaggaacacgacccaggccagggaagctcatcacctgaacaggctggcagtcctacggagggtgagggagtgagcacttgggagagcttcaagaggctggtgacccccagaaagaaaagcaagtctaaactcgaggaaaagagcgaggactcaatcgcaggcagcggcgtggagcacagcacgccagatacagagcctggaaaagaggagtcctgggttagcatcaaaaagtttatccccgggcgccgaaagaaaagaccggatggaaaacaggagcaggcacctgttgaagacgccggacctacgggagccaacgaagatgactcagatgtgccggcagtagttcccctctccgaatatgatgcagttgagcgggaaaaaatggaggcacagcaggcacagaagagcgccgagcagcccgagcagaaggccgccaccgaggtgagtaaggaactatctgagtcacaagtgcatatgatggcggctgcagtggccgacgggacacgggcagcaactatcattgaggagaggtcgccctcctggatctcggcctccgtgacagagccattagagcaagttgaagcagaagccgctctactgactgaggaggttttggagcgtgaggttattgcagaagaggaaccacccaccgtcactgaaccacttcctgaaaaccgggaagcacgaggcgacaccgtagtgtccgaggccgagctcactccagaggccgtgactgcagcggaaacagcaggccctctgggggcagaagaagggaccgaagcctcagcggcagaggaaaccacagaaatggtgtccgccgtgtcacagctgactgattcacccgacacgacggaggaggctactccggtgcaggaagtcgagggaggggtgcccgatatagaggagcaggaaaggagaacccaggaggtgctgcaagcagtggctgagaaggttaaagaagagtcccagctaccagggactggcgggccagaagacgtgcttcagccagttcagagggccgaggctgagcgccccgaggagcaagctgaagctagcggcctgaaaaaggagaccgacgtggttttaaaggtagatgcccaagaagctaagacggaacccttcacgcaagggaaagttgtcggacaaaccacacccgagagcttcgaaaaggcccctcaagttaccgagtcaatagagagcagtgaactagtgactacctgccaggcagagaccctggccggagtaaagagtcaagaaatggtgatggaacaggcaatacctccagacagcgtggagactcccaccgacagcgaaacagacggatcaacacccgttgcggactttgacgcccctggcaccacacagaaggatgaaattgtggagatacatgaagagaatgaggtcgccagcggtacccagagtgggggcactgaggctgaggctgttccagctcagaaggaacgcccacctgccccttcttcttttgtgtttcaggaggagacaaaggagcagtcaaagatggaagacacgcttgagcacactgacaaggaggtgagcgtggagactgtgtcaatcctctccaaaactgagggaacccaggaggcagaccagtacgcggatgagaagactaaggacgtgccattcttcgagggactggaaggctctatcgataccggcatcacagtgtcccgcgagaaagtcaccgaggtggcgctcaaaggagagggaaccgaggaggccgagtgcaaaaaagatgatgctttagagcttcagagccacgccaaaagtcctcccagtcccgtggaacgcgaaatggttgtccaggttgaaagagagaagactgaggctgagcccactcacgtcaacgaagaaaaactggaacatgagactgccgtcaccgtgagtgaagaggtcagcaaacagctgctgcagactgtgaacgtaccgatcattgacggggctaaagaggtgtcaagtttggaaggctccccaccaccctgcctgggacaggaagaggcagtgtgtaccaaaatccaggtgcagtcgagcgaggctagcttcaccctcacagccgccgctgaagaggagaaagtactgggcgagacagccaacattcttgagaccggagagactctagagccggccggggcgcatcttgtattggaggagaaatcctccgagaagaacgaggactttgccgcccatcccggcgaggatgcagtgcccaccgggcctgattgtcaggcgaagagcactccggttatcgtctcggcaacaaccaaaaagggtctgtcatctgatctggagggagagaagactacatccctaaagtggaagtctgacgaggtggacgagcaggtggcctgccaggaagtgaaggtgtccgtagcaattgaggacctggagcctgaaaacggcatcctggaattggagaccaaatcctccaaactcgttcaaaacattatccagacagccgttgaccagttcgtaagaaccgaggagaccgccaccgagatgctgacctccgagctgcagacccaggctcatgtcatcaaggccgactctcaggatgcaggccaggaaacagaaaaggaaggggaggagccacaagcgtctgcacaggacgagacgcccatcaccagcgcaaaggaggaaagcgaatctacggcagtgggccaggcacatagcgatattagcaaggatatgtcagaggccagtgaaaagacaatgactgttgaagtcgaggggtccaccgtaaatgaccaacagctggaggaggtggtgctgccctccgaagaggagggagggggggctggcaccaaaagcgttccagaagatgacggccatgccttgttggcggaacgcatcgagaagtccctggtcgaaccaaaggaagatgaaaaaggagacgatgtcgatgatccggagaatcaaaacagtgccctggccgacacagacgcctccggtggactgacgaaagaatcccctgataccaacggacccaaacagaaggaaaaagaggacgcccaggaagtggagctgcaagaagggaaggtacactctgagtcggataaagctattactccccaggcccaggaagaactgcaaaagcaagaaagagaatctgcaaaatcagagttgaccgaatcctag

SEQ ID NO: 152825 - DNA, 5349 bp, Artificial Sequence
  derived and/or modified sequence
atgggcgccggcagcagcacagagcagaggagccctgagcagcccccagagggcagcagcaccccagctgagcctgagcccagcggcggcggccccagcgctgaggccgccccagacaccacagctgaccctgccatcgccgccagtgaccctgccaccaagctgctgcagaagaatggccagctgagcaccatcaacggggtggccgagcaggatgagctgagcctgcaggagggggacctgaatggccagaagggggccctgaatggccagggcgccctgaacagccaggaggaggaggaggtgattgtgacagaggtgggccagagggacagtgaagatgtgtccaagagggacagcgacaaggagatggccaccaagtctgctgtggtgcatgacatcacagatgatggccaggaggagaccccagagatcatcgagcagatccccagcagcgagagcaacctggaggagctgacccagcccacagagagccaggccaatgacatcggcttcaagaaggtgttcaagtttgtgggcttcaagttcaccgtgaagaaggacaagacagagaagccagacacagtgcagctgctgactgtgaagaaggatgaaggagagggcgccgccggggccggggaccacaaggaccccagcctgggcgctggggaggccgccagcaaggagagcgagcccaagcagagcacagagaagccagaggagaccctgaagcgggagcagagccacgccgagatcagccccccagctgagagcggccaggccgtggaggagtgcaaggaggagggggaggagaagcaggagaaggagcccagcaagtctgctgagagccccaccagccctgtgaccagcgagaccggcagcaccttcaagaagttcttcacccagggctgggccggctggaggaagaagaccagcttcaggaagcccaaggaggatgaggtggaggccagcgagaagaagaaggagcaggagcctgagaaggtggacacagaagaagatggcaaggccgaggtggccagcgagaagctgacagccagcgagcaggcccacccccaggagcctgctgagagcgcccacgagccccggctgtctgcagaatatgagaaggtggagctgcccagcgaggagcaggtgtctggcagccagggccccagcgaggagaagccagcccccctggccacagaggtgtttgatgagaagattgaggtgcaccaggaggaggtggtggccgaggtgcacgtgtccacagtggaggagaggacagaggagcagaagacagaggtggaggagacagctggctctgtgcctgctgaggagctggtggagatggatgctgagccccaggaggccgagcccgccaaggagctggtgaagctgaaggagacctgtgtgtctggagaggaccccacccagggcgctgacctgagcccagatgagaaggtgctgagcaagcccccagagggcgtggtgtctgaggtggagatgctgagcagccaggagaggatgaaggtgcagggcagccccctgaagaagctgttcaccagcacaggcctgaagaagctgagcggcaagaagcagaagggcaagaggggcggcggagatgaggagagcggggagcacacccaggtgcctgctgacagcccagacagccaggaggagcagaagggggagagcagcgccagcagccctgaggagcctgaggagatcacctgcctggagaagggcctggccgaggtgcagcaggatggagaggccgaggagggcgccaccagtgatggagagaagaagcgggagggcgtgaccccctgggccagcttcaagaagatggtgacccccaagaagagggtgcggcggcccagcgagagtgacaaggaggatgagctggacaaggtgaagagcgccaccctgagcagcacagagagcacagccagcgagatgcaggaggagatgaagggctctgtggaggagcccaagccagaggagcccaagaggaaggtggacacctctgtgtcctgggaggccctgatctgtgtgggcagcagcaagaagagggcccggcggggcagcagcagtgatgaggagggcggccccaaggccatgggcggggaccaccagaaggcagatgaagctgggaaggacaaggagactggaacagatggcatcctggccggcagccaggagcatgaccccggccagggcagcagcagccctgagcaggccggcagccccacagaaggagaaggagtgtccacctgggagagcttcaagaggctggtgacccccaggaagaagagcaagagcaagctggaggagaagtcagaagattccattgctggcagcggcgtggagcacagcaccccagacacagagcccgggaaggaggagagctgggtgtccatcaagaagttcatccctggccgcaggaagaagaggccagatggcaagcaggagcaggcccctgtggaggatgctggccccaccggggccaatgaagatgacagtgatgtgcctgctgtggtgcccctgtctgaatatgatgctgtggagcgggagaagatggaggcccagcaggcccagaagtctgctgagcagcctgagcagaaggccgccacagaggtgtccaaggagctgtctgagagccaggtgcacatgatggctgctgctgtggctgatggcacccgggccgccaccatcatcgaggagaggagccccagctggatcagcgcctctgtgacagagcccctggagcaggtggaggccgaggccgccctgctgacagaggaggtgctggagcgggaggtgattgctgaggaggagcccccaacagtgacagagcccctgcctgagaaccgggaggcccggggggacacagtggtgtctgaggccgagctgaccccagaggccgtgacagctgctgagacagctggccccctgggcgctgaggagggcacagaggccagcgctgctgaggagaccacagagatggtgtctgctgtgtcccagctgacagacagcccagacaccacagaggaggccacccctgtgcaggaggtggagggcggcgtgcctgacatcgaggagcaggagaggaggacccaggaggtgctgcaggccgtggccgagaaggtgaaggaggagagccagctgcccggcactggaggcccagaagatgtgctgcagcctgtgcagagagctgaggccgagaggcctgaggagcaggccgaggccagcggcctgaagaaggagacagatgtggtgctgaaggtggatgcccaggaggccaagacagagcccttcacccagggcaaggtggtgggccagaccaccccagagagctttgagaaggccccccaggtgacagagagcattgagagcagcgagctggtgaccacctgccaggccgagaccctggccggcgtgaagagccaggagatggtgatggagcaggccatccccccagacagcgtggagacccccacagattctgaaacagatggcagcacccctgtggccgactttgatgcccctggcaccacccagaaggatgaaattgtggagatccatgaagaaaatgaggtggccagcggcacccagagcggcggcacagaagctgaggccgtgcctgcccagaaggagcggcccccagcccccagcagctttgtgttccaggaggagaccaaggagcagagcaagatggaggacaccctggagcacacagacaaggaggtgtctgtggagaccgtgtccatcctgagcaagacagagggcacccaggaggccgaccagtatgcagatgagaagaccaaggatgtgcccttctttgagggcctggagggcagcattgacaccggcatcaccgtgtcccgggagaaggtgacagaggtggccctgaagggggagggcacagaggaggccgagtgcaagaaggatgatgccctggagctgcagagccacgccaagagcccccccagccctgtggagcgggagatggtggtgcaggtggagcgggagaagacagaggccgagcccacccacgtgaatgaggagaagctggagcacgagacagctgtgacagtgtctgaggaggtgtccaagcagctgctgcagacagtgaatgtgcccatcattgatggagccaaggaggtgagcagcctggagggcagccccccaccctgcctgggccaggaggaggccgtgtgcaccaagatccaggtgcagagcagcgaggccagcttcaccctgacagctgctgctgaggaggagaaggtgctgggggagacagccaacatcctggagaccggggagaccctggagcctgctggggcccacctggtgctggaggagaagagcagcgagaagaatgaagattttgctgcccaccctggagaagatgctgtgcccactggaccagactgccaggccaagagcacccctgtgattgtgtctgccaccaccaagaagggcctgagcagtgacctggagggggagaagaccaccagcctgaagtggaagagtgatgaggtggatgagcaggtggcctgccaggaggtgaaggtgtctgtggccatcgaggacctggagccagaaaatggcatcctggagctggagaccaagagcagcaagctggtgcagaacatcatccagacagctgtggaccagtttgtgaggacagaggagacagccacagagatgctgaccagcgagctgcagacccaggcccacgtgatcaaggctgacagccaggatgctggccaggagacagagaaggagggggaggagccccaggccagcgcccaggatgagacccccatcaccagcgccaaggaggagagcgagagcacagctgtgggccaggcccacagcgacatcagcaaggacatgtctgaggccagcgagaagaccatgacagtggaggtggagggcagcacagtgaatgaccagcagctggaggaggtggtgctgcccagcgaggaggagggcggcggggccggcaccaagtctgtgcctgaagatgatggccacgccctgctggccgagcgcatcgagaagagcctggtggagcccaaggaggatgagaagggagatgatgtggatgatcctgagaaccagaacagcgccctggccgacacagatgccagcggcggcctgaccaaggagagcccagacaccaacggccccaagcagaaggagaaggaggatgcccaggaggtggagctgcaggagggcaaggtgcacagcgagagtgacaaggccatcaccccccaggcccaggaggagctgcagaagcaggagcgggagagcgccaagtctgagctgacagagagctag

SEQ ID NO: 152826 - DNA, 5349 bp, Artificial Sequence
  derived and/or modified sequence
atgggcgccggcagcagcaccgagcagcggagccccgagcagccccctgaagggagctccacaccggctgagcccgaacctagcggtgggggtccatccgccgaggccgcaccagacaccaccgccgacccagccatcgcagccagcgaccccgcaactaagttgctccagaaaaatgggcagctgagtacgatcaacggcgtagctgagcaggatgagctatcactccaggaaggggatcttaatggacaaaaaggcgcgcttaacggtcaaggggcattgaacagccaagaagaggaggaggtgattgtgacagaagtcggacaaagggactccgaagatgtgtctaagcgggactcggataaggagatggccactaaaagcgccgtggtgcacgatattaccgatgatggtcaggaagaaacgccagagataatcgaacaaatcccttcgagcgaaagcaatcttgaggagcttacacagcccacagaatcacaggccaatgacatagggttcaagaaggttttcaagttcgtaggatttaaattcacagttaagaaggataagacagagaaaccagataccgtgcagctgctcaccgtcaaaaaggacgagggagagggtgctgctggcgcgggggaccataaggatccgtctctgggcgccggtgaggccgcatcgaaagagtccgagccaaaacaaagtaccgagaagccggaggagacactaaaacgggaacagagtcacgcagaaatctccccgcctgcggagagcggccaggctgtggaggagtgtaaggaagagggagaagaaaagcaggagaaggaaccctccaaaagcgcggaaagccccactagtcccgtgaccagcgaaactggctcgaccttcaaaaagttcttcacccaaggatgggccggatggagaaagaagactagcttccgcaagcccaaggaagacgaagtcgaggcttccgaaaagaaaaaggagcaggaaccagagaaagtggataccgaagaggatggtaaagccgaagtggcttccgagaagctgaccgcaagtgagcaagcacaccctcaggaacccgctgagtcagctcacgaacccaggttgagcgccgagtatgagaaggttgagctgcccagcgaagaacaagtctccggatcacagggcccttctgaagaaaagcccgctccgctggcgactgaggtctttgacgaaaagatagaggtgcaccaggaggaggtagtggcagaggtccacgtgtcaacagtggaggaacgcactgaagagcagaagaccgaggtggaagaaacggctggttctgtcccggccgaggagttagtcgaaatggacgcagagccacaggaggcggaacccgcgaaagaattggtgaagctcaaggaaacttgcgtgagtggcgaggatccgactcaaggagcagacctgtcgccagacgagaaagtcctctccaagccacctgagggcgtggtgagtgaagtggagatgctgtcctcccaggagcggatgaaagtgcaagggtcccccttaaagaagctttttacctccacaggcctgaaaaagctttctggcaaaaaacaaaaaggcaaaagggggggcggtgatgaggagtctggagagcatacccaggtaccagccgactcacctgacagccaggaggaacagaaaggcgaatcgagcgcatcaagtccagaagagccagaagagatcacctgccttgaaaagggccttgctgaggttcagcaagatggtgaagctgaggagggcgccacctctgatggcgaaaaaaaaagagaaggtgtaacaccgtgggcgtccttcaagaagatggtcacaccaaagaaaagggtccggcgcccaagcgagtccgacaaggaggacgagctggataaagtcaagtcagccactctctcctccaccgaaagcacagcttctgagatgcaggaggaaatgaagggctccgtggaagagcccaaaccggaagaaccaaagcgaaaggtggacaccagcgtttcttgggaagccctcatttgcgttggttcgagcaaaaagcgcgctagacgggggtcatcctctgacgaagaagggggccctaaggcaatgggcggagaccaccaaaaggctgatgaagccggtaaggacaaagagaccgggaccgacggtattctggccggttctcaggagcatgaccctggccaggggtcctcaagtccagaacaggccggctctcccactgagggagagggcgtgagtacatgggaaagttttaaaagactcgtgaccccacgcaagaaatctaagtctaagctcgaggaaaagagcgaggacagcattgcagggagcggggtggagcacagcacacctgatacagagccaggtaaggaggaatcctgggtgagtatcaaaaaatttattcctggccgtagaaagaaaagaccggatggaaaacaggagcaggccccagttgaagacgcagggcctactggagcaaatgaagacgactctgatgtaccggcagtggtgcctctctccgaatacgacgccgtggagcgggaaaaaatggaggcccagcaggcgcagaaatctgccgaacaacctgagcagaaagccgcaaccgaagtcagcaaggagctgagtgagagccaggtgcatatgatggcagctgctgtcgccgatggcacccgggccgccacaattatagaggagcgcagcccatcctggatctccgccagtgtcacagaaccactggaacaggttgaggccgaggcagccctgttgaccgaagaagttttggagagagaggtgatcgcagaggaggaaccaccaaccgtgactgaacccctgccagagaacagggaggctcgaggcgacacagtagtgagtgaagccgagctgacacccgaggccgtgacagccgcggagactgcagggcccctaggcgcagaagagggcacggaggccagcgcggcagaggagactaccgagatggtgtctgcggtcagtcaactcaccgatagccccgataccacagaagaggcaactccggtccaggaagtggagggcggcgtgccagatattgaggagcaggagagacggactcaagaggtgctgcaggctgtggccgaaaaagtgaaggaagaaagccagctccccgggacaggaggacccgaggatgtgctgcagccagtacagcgcgcggaggcagagcgcccagaagagcaggccgaagcaagcggactgaagaaggagacggatgttgtcctgaaggtcgatgcccaggaggccaagacagaaccattcacacaggggaaggtggtcggccagaccacgccagaatcgtttgagaaagctcctcaggtcactgagtcaattgaatcctctgagctggtgacaacttgccaggctgaaacactggccggggttaagagccaagagatggtcatggagcaggccattccacctgacagcgttgagacaccaaccgatagtgagaccgacggctccacccctgttgcagacttcgacgccccaggaaccacacagaaagacgagattgtcgagattcacgaggaaaatgaagtggcttctggtactcaatctggaggtactgaagccgaggctgtccccgcccagaaggaacgtccaccagccccaagttcgttcgtgtttcaggaagagaccaaagaacagtctaagatggaggacaccctcgagcacacagataaggaagtttctgtcgaaacagttagcatcttgtctaagacggaggggacccaagaggctgatcaatatgctgatgagaagaccaaagacgtaccgttttttgagggactagaagggtctatcgatactggcataaccgttagtagagagaaagtgactgaagtcgcccttaagggagagggaacagaagaggccgaatgcaaaaaggatgacgcactagaactgcagagccacgctaagagcccaccatcccctgtggaaagggagatggttgtgcaggtagaaagagaaaaaacagaagctgagcccacccacgtgaacgaagagaagcttgagcacgagacagcagtcaccgtgagtgaggaagtgtccaaacagttgctacaaactgtgaatgttccaatcattgacggcgccaaggaagtgagctcgctggaagggagtccacctccttgcctcgggcaagaagaagccgtctgcactaagatccaggtccagtcgtcagaagcatcttttactctgacagccgcagccgaggaggagaaggtactgggggagacagcaaacattcttgaaaccggtgagactctggaaccagccggcgctcatctcgtgctggaggagaagagctcagagaaaaatgaagactttgccgcccatcctggagaggatgccgtgcctacaggacctgattgtcaggctaagtcaacacctgtgatcgtatccgccactacaaagaaaggcctgagtagtgacctcgaaggagagaaaacaaccagcctcaaatggaagagcgacgaggttgatgaacaggtagcctgccaggaagtgaaagtcagcgtggctattgaagaccttgagcccgagaacggtatccttgaacttgaaaccaaatcaagcaaactcgtgcagaacatcattcagacggccgttgatcagttcgtgcggaccgaggagacagccaccgagatgctgacaagtgagctgcagacacaagcccacgtgattaaggccgacagccaggatgccgggcaagagaccgagaaggagggcgaagaaccccaggcttctgctcaggacgaaacccctatcacctccgcgaaagaggaaagtgaatcgaccgccgtcggacaggcccatagtgatattagcaaggacatgagcgaggcatcggagaaaacaatgactgtggaggtggagggatctacagtgaatgatcagcagctggaagaggtggtactgcctagcgaagaggagggtggcggtgccgggactaagagtgttcccgaggacgacggacatgccttgttagctgaacgcatcgagaaatcactcgtcgagcctaaggaggacgagaagggagatgacgtcgacgaccctgaaaatcagaatagcgcgcttgctgatactgacgcctctgggggtctgactaaggaaagccctgataccaatggccccaagcagaaagaaaaggaagatgcacaggaagtggagctccaggaaggtaaggttcattctgagagtgacaaggccattaccccacaggctcaggaagaactccagaagcaggagcgcgaaagcgcgaaatcagagctgaccgagtcatag

SEQ ID NO: 152827 - DNA, 5349 bp, Artificial Sequence
  derived and/or modified sequence
atgggcgccggcagcagcaccgagcagcggagccccgagcagccccctgaaggctcctctaccccggccgaaccagaacccagcggagggggcccaagcgctgaggcagcccctgacaccaccgctgatccggcaatcgccgcctccgacccagctaccaagctgctccaaaagaatggccaactgagcaccataaatggcgtggcagaacaggatgagcttagtctccaggagggcgatttaaacggccagaaaggcgcgctcaatggtcaaggggctcttaattcccaggaggaagaagaggtaattgtcaccgaagtgggccagcgcgacagcgaagatgtttcgaaaagggatagcgacaaggagatggctactaaaagcgccgtagtgcacgacatcacggacgatggccaggaggagactcctgagatcatagagcagattccaagcagcgaatcgaacctggaagagttgacccaacccaccgagtcacaggccaatgacatcggtttcaagaaggtcttcaagtttgtgggatttaagttcacagtgaaaaaggataaaacagagaaacccgacacagtgcagctcttgacggtaaaaaaggacgaaggcgaaggcgctgccggtgctggtgaccacaaggatcccagcctaggagctggtgaggccgcgtcaaaggaaagtgaacctaaacagtccaccgaaaagcctgaggagacactcaagagagagcaaagccacgcagagattagtccacccgcagagtcaggccaggccgtagaagagtgcaaagaggagggagaggaaaagcaggagaaggagccttccaaaagcgctgaatcgcctacgtcccccgttacttccgaaaccggcagcacattcaagaaattttttactcaggggtgggctggatggaggaaaaagacctcattccggaagcctaaagaggacgaggtggaagcgtcggaaaagaaaaaagaacaggagcccgagaaggtcgatacggaggaggatggtaaggccgaggtggccagcgaaaagttaacagcgtcagagcaggcccacccccaggagcctgcagagagcgcccacgagcccagactctccgcggagtacgagaaggtcgaattgccgtccgaggagcaggtgtctggctcccagggcccatctgaagaaaagcccgccccgctcgccactgaggtattcgacgaaaaaattgaagtccaccaggaggaggtcgtggcggaagtgcacgtcagcaccgtggaggagcgtacagaggagcagaagaccgaggtggaggaaacagctggctctgtgcctgccgaggaattagtcgaaatggatgcagaaccccaggaagccgagccagctaaagaacttgtcaaacttaaggaaacatgcgtttctggagaagacccaacccaaggggctgacctgtcacctgatgagaaggtgttatcaaagcctcccgagggagtggtgtcggaggtggaaatgctgagcagccaggagaggatgaaggtgcaggggagtccacttaagaaactgtttaccagtaccggcctgaaaaagttgagtggaaaaaaacagaaggggaagcgaggtggcggagatgaggaatctggcgaacacactcaggtgcccgccgactcccctgattcccaggaagaacagaagggtgaatcctcagcatcatcaccagaagagcctgaagagattacttgcttagagaaagggctggcagaggtgcagcaggatggggaggcggaggaaggcgcgacatctgacggcgaaaagaaaagagagggtgtgacaccatgggctagttttaagaagatggtcacccccaaaaagcgcgtccggcgaccaagtgaaagtgacaaggaggacgaactcgataaggttaagtctgcaaccctgagttcaacggaatctaccgcatcagagatgcaggaggaaatgaagggcagtgtggaagagccaaagcctgaggagcccaagcggaaagtggacaccagcgtaagctgggaggcacttatctgcgtgggcagttcaaaaaaacgggcacgcaggggtagctcctcagatgaggagggcggacccaaggctatggggggggatcaccagaaggctgatgaagcaggtaaagacaaggaaacgggcaccgatggaatcctagcaggttcccaggagcatgaccctggccaaggctccagcagtccagaacaagcgggaagtccaactgaaggcgagggagtcagcacctgggagtcattcaagaggcttgtcactcctcggaagaaatccaaaagcaagctcgaggaaaaatcagaggattctattgccggctccggcgtggaacacagcaccccggatactgagcctgggaaggaagaaagttgggtcagcataaagaaatttatacccggaaggcggaagaaacggcccgatggaaaacaggaacaagccccagttgaggacgctgggcccacaggtgccaatgaagacgattccgatgtgcccgctgtagtacccctgagcgagtatgacgcggtagaacgggaaaagatggaggcgcagcaggcccagaaatctgccgaacagcctgagcaaaaagcggctacggaggtcagcaaggagctgtctgagtctcaggttcatatgatggcggccgcagttgccgacggcacgcgggctgcgaccattatcgaggaacgatctccgtcctggatctctgcttccgtgactgaacctctggaacaggttgaagcggaggctgcccttctcacagaggaagtgctggagagggaggtaattgcagaagaagagccccccacagttactgagccactccctgagaaccgggaagctaggggtgatacagtagtgtccgaggccgagcttaccccggaggccgtgactgctgcagagaccgccggcccgctcggggccgaggagggtacagaagcctcagccgcagaggagacaactgagatggtgtctgcagtctcccaactgaccgacagtcccgatacaaccgaagaggccaccccggtgcaagaggtggaggggggcgtccccgacatcgaggagcaagagaggcggactcaggaggttttgcaggccgtggcagagaaggtcaaagaggagtctcaactgcccgggactggagggccggaagatgtattgcagcctgtgcaacgagccgaggccgaacgacccgaggaacaggctgaagcctcagggctgaagaaggagacggacgtagtgcttaaggtggatgcccaggaggccaagactgagccattcacccagggtaaggtggtaggccaaaccacaccggagtctttcgagaaagctccccaggtcacagaatccatcgagtcctctgaattggtcaccacgtgtcaggctgagactctggctggtgtgaagagtcaggaaatggttatggagcaggcaatccccccggatagtgtggagacccctacagactctgaaaccgacgggtccacacccgttgctgacttcgacgctccaggaactacccagaaagacgaaatcgttgagatacatgaagagaacgaggtcgcctcaggaacccagagcggggggacagaagctgaggctgtgcctgcccagaaagaacggccgcccgctcctagcagctttgtgtttcaagaagaaacaaaggaacagtccaagatggaagacacccttgagcacacggataaggaggtaagcgtggaaaccgtctccattctgtctaaaacagagggcacccaggaggccgaccagtacgcagacgaaaagacaaaggacgtgcctttcttcgaaggactcgagggatctatagacacaggcatcacagtgagcagagaaaaggtgacagaggtcgcccttaaaggagaggggactgaggaagcagaatgtaaaaaggatgacgcactagaactgcagtcgcatgctaaatcaccgccatcacctgtggagcgagaaatggttgtccaggtggaaagagagaagacagaggccgaacctacgcatgttaatgaagagaagctcgaacatgagactgcagtaactgtgtccgaagaagtttccaaacagctcctgcaaaccgtgaatgtcccaatcatcgatggcgccaaggaagtcagcagcctggagggctccccccccccttgcctagggcaggaggaagccgtgtgtaccaagattcaagtgcagagctcagaagcatccttcactctaactgctgcagccgaggaagagaaggtactgggcgagaccgccaacattctggagaccggggagacactggagccagccggtgctcacctggtgttggaggagaagagctcagaaaagaatgaagattttgcggctcaccccggagaagacgccgtaccgaccggacccgactgccaggccaaaagtactcccgtgatcgtctccgccactacgaagaaggggctcagtagcgatttggagggtgaaaagacaacttcgcttaaatggaagtcagacgaggtcgatgagcaggtggcatgccaagaggttaaggtgagcgttgccatcgaagacttggagcccgagaacgggatactcgagctcgagacaaagtcaagtaagctagtgcagaacattatccagaccgcagtcgatcagttcgttcgcaccgaggaaaccgccacagagatgctgaccagcgagctccagacacaagcacatgtgatcaaggccgattcccaagacgcgggtcaggaaacggagaaggagggtgaagaaccacaggcctccgcccaggacgagacgccgattacaagtgcgaaggaggaaagtgagtctacagctgtgggacaagcacacagtgacatcagtaaggacatgtctgaggccagcgagaagaccatgactgtcgaagtcgaaggttcaaccgtgaacgaccaacagttggaggaggtggttctacccagcgaggaagaagggggaggagccggtaccaagagcgtccccgaagatgatggacacgcactcctggccgaaagaattgaaaaatctcttgtagagcccaaggaggatgagaaaggcgatgatgtagacgacccggagaaccagaactccgccctggcagacacagatgcgagcgggggattgacaaaggaatccccggataccaacgggcctaaacaaaaggagaaagaagatgcgcaggaagtggagctgcaagaggggaaggtccactccgagtcggacaaggcgataacaccgcaagcacaggaagagctgcagaagcaggagcgcgagagcgccaagtcagagctgacggagagttag

SEQ ID NO: 152828 - DNA, 5349 bp, Artificial Sequence
  derived and/or modified sequence
atgggtgctggtagttccacggagcagaggtcccccgagcaaccacctgaaggctccagtacccccgcagaacctgaaccatcgggcggaggcccttctgctgaagccgctcctgataccactgcagatcccgctatcgcagcctctgatccagccaccaagctgctccagaaaaacggccagctgagcactattaatggtgtggccgaacaggacgagctttcgctgcaggaaggcgacctcaacggtcaaaaaggggcattaaacggccagggagcactcaatagtcaagaggaggaagaagttattgtcaccgaggtgggccagagagacagcgaggacgtgagcaagcgcgatagtgacaaagagatggcaactaaaagcgccgtggtccatgatattactgatgacgggcaggaagaaacccccgaaattatagagcagatccccagttccgagagcaatctggaggagctgacgcaacctaccgaaagccaggcaaacgacattgggttcaagaaggtttttaagttcgtcggctttaagtttacagtgaagaaagacaaaaccgaaaagcctgatacagtgcagctcctgacagtgaagaaggatgagggtgaaggcgcagcgggtgccggagaccataaggatccatctcttggggctggagaagccgcatcgaaggagtccgaaccaaagcaaagcactgagaagccagaagaaactctgaagcgggagcaaagccatgctgagatctctcctccggctgagtcaggccaggccgtggaggagtgtaaggaagaaggcgaggagaaacaggagaaggaaccctctaaatctgcggaatcccctacgtcaccggtgactagtgaaacagggagcactttcaaaaagttcttcacgcaggggtgggcgggatggcgtaagaaaacttcattcaggaagccgaaagaggacgaggtggaagcctctgaaaagaagaaggagcaggaaccagagaaggtggacaccgaagaggatgggaaggctgaggtggcatctgagaaactgaccgcttcagaacaggcgcatcctcaggaaccggcagaaagcgcacacgaacctagacttagcgctgagtacgaaaaagtcgagctacccagcgaggagcaggtctcaggaagccaaggccctagcgaagagaaacccgcacccttggcaaccgaagtattcgatgagaagatcgaggtgcaccaggaggaagtggtggctgaggtgcatgtgtcaacagtcgaggagcgaaccgaagagcagaagacggaggtggaggagacagctgggtcagttccagctgaggagctcgtcgaaatggatgcggagccgcaggaagcagagccagccaaagagctcgtgaaactcaaagaaacttgtgtctctggtgaagatcccacccagggagcagatttgagtccagacgaaaaggtgctttctaagccaccagagggcgtcgtgagtgaggtcgaaatgctctcctcccaggagcgtatgaaagtgcagggcagccccctcaagaagctgttcaccagcaccggtttaaaaaagttgtccggaaaaaagcagaaagggaaacgcggtggtggcgacgaagagtccggggagcatacccaggtgccggcagattcgccagattcccaggaagagcaaaaaggagaatcttccgcctccagtccagaggaacccgaggaaatcacgtgcttggaaaaagggctggccgaggttcagcaggatggggaggccgaagaaggcgctactagcgatggtgagaaaaaaagggaaggcgtcactccttgggcgtcattcaaaaagatggtcacacctaagaagcgggtgagaagacccagtgagtctgacaaggaagacgaactggataaagtgaaatcagccactctctcttccaccgagtctacagctagtgagatgcaggaggaaatgaaggggtccgtggaagaacctaaacctgaagaacccaaaaggaaggtggacacctccgtgtcatgggaagccctgatctgcgttggttcgtctaagaagcgggcaaggaggggaagctcatccgacgaggaaggcggacctaaagccatggggggtgaccaccagaaggccgatgaagcagggaaggacaaagagacagggaccgatggcattcttgcagggtcccaggagcacgatcccggtcaggggtcgtcgtccccagagcaggccggatcccccactgaaggcgagggagtgtccacttgggagtcatttaagcggctggttacaccccgaaaaaagtccaagtctaaactggaagagaaatctgaggacagtattgctggttcaggtgtggagcatagcactccagataccgaacctgggaaagaggaaagctgggtctccataaaaaaattcatccctggtcggaggaaaaagcggcctgacggtaaacaggagcaagcccctgtggaggatgccggaccaaccggcgcaaatgaagatgactcggatgttcctgctgttgtgccactttcagaatatgatgccgtcgagagggagaagatggaagcgcagcaagcccaaaagagcgccgagcagcctgagcagaaggccgctactgaggtcagcaaagaactgagtgagtcccaggtgcacatgatggccgctgctgttgccgacggtacccgagctgccaccatcatcgaggagagatccccatcttggatttccgcaagtgtcacagaacctctggagcaggtggaggccgaggccgcacttctgaccgaggaagtactcgaaagggaggtaattgcagaggaagagccccctactgtcacggaacccctgcccgaaaaccgcgaagccagaggtgacacagtggtgagtgaggctgagctcacaccagaggcagtcacagccgctgaaacagcgggtccactgggggctgaggagggaaccgaggccagtgctgctgaggaaaccaccgagatggtttctgctgtttcgcagctcaccgactcccccgatacaaccgaggaagctacaccagttcaggaagtcgaggggggtgtccctgatatcgaggagcaggagcgcaggacccaggaagtcctgcaggccgtggctgaaaaagttaaggaggagtcacagctgcctggaacgggcggacctgaggacgtgctgcagccggtgcagcgagccgaagccgaaaggcctgaggagcaggcagaggcttccggcctgaaaaaagagaccgatgtggtcctgaaagtagatgcccaggaggccaaaaccgaaccctttacccagggcaaagtggtgggccagacaactcccgaaagcttcgaaaaggccccacaggtaacagaatccattgagagcagcgagcttgttacaacttgccaagctgagaccctagctggggtcaagagtcaggaaatggtcatggagcaggccattccccctgactcagtggaaacacccacggattccgaaacagacggctctacaccggttgccgactttgatgcaccaggtaccacccaaaaggacgagattgtggaaattcacgaggaaaacgaagtcgcaagcggaacacagtcagggggaactgaggccgaggctgttccagcgcagaaggaacgaccccctgcccctagctcttttgtctttcaagaagaaaccaaagagcagagtaaaatggaggacacccttgagcataccgataaggaagtgtccgttgagacagtgtcaatcctaagtaaaactgagggtacacaggaagcggatcagtatgctgatgaaaagaccaaggatgtcccgttcttcgagggcctggagggcagcattgacactgggatcaccgtgagcagggaaaaagtcacagaagtagcgctgaaaggagagggcacggaagaggccgagtgcaagaaggacgacgccctcgaactccagtcccatgctaagagtcctccttctcccgtcgaacgtgagatggttgtgcaagtagaaagagagaagacggaagcagagcccacacatgtgaacgaggagaaactggaacacgagacagctgtgactgtgagcgaagaggtgagtaaacaactgttgcagacagttaacgttcccataattgacggcgctaaagaagtgtcctctctcgaagggagccctcctccatgcctgggccaggaagaagctgtatgcaccaaaattcaagttcagtcaagcgaagccagcttcactcttaccgccgcagccgaagaagaaaaagtgctgggggagacagcgaacattctggaaacgggggagaccctggaacccgctggcgcacacctggtcctggaggaaaagtcttccgagaaaaatgaagacttcgcagcgcatccaggagaagacgcggtgcccacaggacccgactgtcaggccaagtctactcccgtaatcgtgtcggccactacaaagaaagggttgtctagcgatctggagggagaaaagacaacctctctcaagtggaagagcgacgaggtggacgaacaggtggcttgccaggaagtgaaggtgagcgtggctattgaagacctcgaaccagaaaacgggatcctggagctggagaccaaaagctcaaagctcgtacagaacatcattcagacggccgtcgaccagttcgttcggacggaggaaacagcaacagaaatgctgacgtctgagttacaaacccaggcacacgttattaaggccgatagccaagacgccggacaagagaccgaaaaggaaggggaggaaccccaggcctctgcccaggacgaaaccccgataacaagcgcaaaggaagagtccgaatcaactgccgttgggcaggcccattccgacatcagcaaagatatgagcgaggcctctgagaagacaatgactgttgaggtggagggatctaccgtcaacgatcagcagttggaggaggtggtcttgccgtcggaagaggagggcggaggtgcaggcacgaagtccgtacccgaagacgacgggcacgctctgctagccgagcgcattgagaagtcactagtcgagccaaaggaagatgaaaagggcgacgatgtcgatgacccagagaatcagaactcggcccttgccgataccgatgcaagcggaggtctgacgaaggagtctcctgacaccaacgggcctaagcagaaggaaaaggaggacgctcaagaggtcgaactgcaggagggtaaagtacactccgaatcggataaagcaataactccacaggctcaagaggaactgcaaaaacaggagcgtgaatccgctaaatctgagttaacagagtcataa

SEQ ID NO: 152829 - DNA, 5348 bp, Artificial Sequence
  derived and/or modified sequence
atgggagcagggagtagtacagagcagcgctcacctgaacagccgcctgagggaagctctacccccgcagagccggagccctcaggcggtggcccatccgcggaagcggctcctgataccactgctgatcccgctattgccgcatctgaccccgcaactaaactgttgcagaaaaacgggcagctctctaccattaacggcgtcgcagagcaggacgaactgtcactccaggaaggggaccttaatggccagaagggggctttaaatgggcaaggcgcactgaattcccaggaggaagaggaggtcatcgttactgaggtgggtcaaagagactcggaagacgtaagcaagcgagacagtgataaagagatggctacaaaaagtgctgtcgtgcacgatatcactgatgatggccaagaagaaacccctgaaataatcgagcagattccctcaagtgaaagtaatctggaggagcttactcaacccacagaaagccaagcaaatgacatcggattcaaaaaggtgttcaaatttgttgggttcaaatttaccgtgaaaaaggataagacggaaaagcctgacacagtgcagctactgactgtcaaaaaggatgagggggagggggcagccggagccggagaccacaaagatccatcattaggagctggagaggccgcttcaaaagaaagcgagcctaagcagtcgaccgagaaacccgaggaaaccctgaagagagagcagtcccacgctgaaatttcccctcccgctgaaagcggacaggccgttgaggagtgcaaggaggagggggaagaaaagcaggaaaaggagccatcaaagagcgcggagagccccacgtcacccgtcacatctgagactggctccacattcaagaaattctttacccagggttgggccggatggcgcaagaaaactagctttaggaagcctaaggaagatgaagtagaagcgagcgagaaaaagaaggaacaggaacccgagaaagtcgacaccgaggaggacgggaaggccgaagtggcatccgaaaaattaactgccagtgagcaggcccacccgcaggagcccgctgaatctgcgcacgaacctcggctgtcagctgagtatgaaaaggtggaactcccttccgaagagcaggtgtccggctcacagggtccttcagaagagaagcctgcacccttggctacggaggtttttgacgaaaagattgaagtgcatcaggaagaggttgtggcggaagtgcatgtgtcaaccgttgaggaacgaacagaggaacagaaaacagaagtggaagagacagccggatccgtgcctgccgaagaacttgtggaaatggacgccgaaccgcaagaggccgaaccggctaaggagctggtgaaactgaaggagacatgcgttagcggagaggaccccacccagggcgctgatctgtcacccgatgaaaaagtgctaagcaaacccccagaaggagtggtttcagaagtcgaaatgctgtctagccaggagaggatgaaggtacagggatctccactcaaaaaactctttacgtctacaggactaaagaagttgtccgggaagaagcagaagggtaaacgcggaggcggtgacgaggaaagtggtgagcacacgcaggttccagctgatagcccggactcacaagaggaacagaagggtgagtcctccgcttccagtcccgaagagcctgaagagattacctgtctcgaaaagggactcgcagaagtccagcaggacggagaagcggaggagggggctacaagcgacggagaaaaaaagcgagaaggcgtcactccctgggcttcattcaaaaaaatggtgacccctaagaaaagggtcagacgcccttcggaaagcgacaaagaagacgagcttgacaaagtcaagagcgctacactgtcatctaccgaaagcactgcatcagagatgcaggaggagatgaagggctcggtcgaagagcccaaaccagaggagccaaagaggaaagttgatacctccgtctcgtgggaggcgctgatctgtgtggggagtagtaagaagcgggctagaaggggtagctcctcggacgaagaagggggacccaaggctatgggcggagaccatcaaaaggctgacgaggcagggaaggataaagaaacaggaactgacggcattttggcagggagtcaggagcacgatcctggccagggtagttcatcacctgaacaggccggttctcctactgaaggtgaaggagtttccacatgggaaagcttcaaaaggctggtgactcctagaaagaagtctaagtcaaagctcgaggagaaatcagaggattccatagccggtagtggcgtggagcactctacccctgacactgagccagggaaggaagaaagctgggtaagtatcaagaagtttatcccagggaggagaaaaaagcgaccagatggaaaacaggagcaagcgcctgtggaagatgccggtccaacaggtgctaacgaggacgatagtgacgtgcctgccgtggtgcctctgagtgagtacgatgcggtggaacgcgagaaaatggaagcacagcaagcccaaaaatcagcagagcagcctgaacagaaagcggcaaccgaggtgtccaaggagctctcggagtcccaggtgcacatgatggcggctgcagtcgccgatgggaccagggcggctacaattatcgaggaaagatcaccaagctggattagcgcctccgtcactgagcccctcgaacaggtcgaggcagaggcggctctgctcaccgaggaggtgttggagagggaggtgatcgccgaagaggagccccctacggtcaccgaacctttaccggaaaatcgggaggccaggggtgacacagtggtatccgaggccgagttgacacccgaagcagtaacagccgctgagactgctggacctttgggcgcagaggaggggaccgaagccagcgccgctgaagagacaactgagatggtgtcagccgtctctcagctgaccgacagccctgatactactgaagaagctacaccggttcaggaggtggagggaggagtcccggatatagaggaacaggaaaggaggacacaggaggtgctccaagccgtggctgaaaaagtgaaggaggagtcgcagctccccggtaccggtggtcccgaagatgtactccagcccgtccagcgcgctgaggccgagcgtcctgaggaacaggcggaggcctccgggctgaaaaaggagacagacgttgtgctcaaagtggacgcgcaggaagccaaaacagaaccttttacccagggcaaggtggtgggtcaaactacgccagagtccttcgagaaagctccccaggtgaccgaaagtattgagagtagcgaactggtgaccacctgtcaagccgagaccctggccggagttaaaagtcaggaaatggtgatggaacaggccattcctccggactctgttgaaacgcccactgatagcgagacggatggatcaactccagtggctgacttcgatgctccaggtactacacaaaaggacgaaattgtcgagattcacgaggagaacgaggtggcctccggcactcagagtggaggcaccgaagccgaggcagttcccgcacagaaggaaaggccacctgcccctagtagcttcgtgtttcaggaagagactaaagagcaatccaagatggaggatacccttgaacacactgataaagaggtgtcagtggagaccgtgtccatcctgtccaaaaccgagggcacacaggaggccgaccagtacgctgatgagaaaactaaagacgtgccatttttcgagggcctggaggggtccattgacacagggataacagtgagtcgagagaaggtgaccgaggtagcacttaagggtgagggaacggaggaggccgagtgcaagaaggacgacgctctggagctacagagtcacgccaaaagccccccatcccccgtggaaagggaaatggttgtgcaggtcgagagagagaaaaccgaggccgaaccgactcacgttaatgaggaaaagctcgagcatgaaacagccgttacagtgtcggaggaagtgtcgaaacagttgctgcaaactgttaacgtgccaatcatcgatggcgcaaaagaagtatcttcactggagggcagccccccaccatgcctaggccaggaggaagctgtgtgcacaaaaattcaggtccagtcaagtgaggcttcattcactctcactgctgcggctgaggaagagaaagtgcttggtgaaaccgcaaacatactggaaaccggcgaaaccctcgaacccgcaggcgcacaccttgtacttgaagagaagtcaagcgagaaaaatgaggacttcgccgctcatccgggtgaagacgcggtgcccacaggaccggactgccaggctaagagcacccccgtgattgttagtgccacaactaagaaaggactgtcctctgacctcgagggcgaaaaaactacatctctcaaatggaagtccgatgaagtagacgagcaggtagcttgtcaagaggtaaaagtgagcgtggccatagaggacctcgagcctgagaatggaatacttgagctggaaactaagagttccaagctagtgcaaaatatcattcagaccgccgttgatcagtttgtgagaacagaagaaactgccacagagatgcttactagcgagctacagacacaggctcacgtgattaaggcagactcccaagatgctggtcaggaaaccgagaaagagggcgaggaaccccaagccagtgcccaagatgagacccccataacaagcgctaaagaagagagtgaatcgacggccgtgggtcaggcacactccgatatctcaaaagacatgtcggaggctagtgaaaagacgatgactgtcgaggtggagggcagcaccgtgaacgatcaacaactcgaagaggtcgttctgccttccgaagaggaaggaggcggagctggcacaaagagcgtccccgaagacgacggacacgcactcctggccgaacggattgagaagtccctggttgagcctaaagaagacgagaagggggacgatgtcgacgaccctgaaaatcagaactctgccctggccgataccgatgcctctgggggactaacgaaagaaagtcccgatacaaatggacccaagcaaaaggagaaagaagatgcccaggaagtggagctccaggaaggtaaggtacatagcgagagtgacaaagccataaccccgcaggcccaagaagagctgcagaagcaggagagggagagcgcaaagagcgagctgaccgagtctta

SEQ ID NO: 152830 - protein, 182 aa, Artificial Sequence
  derived and/or modified sequence
MMQESPDPEDDETPTQSDRLSMLSQEIQTLKRSSTGSYEERVKRLSVSELNEILEEIETAIKEYSEELVQQLALRDELEFEKEVKNSFISVLIEVQNKQKEHKETAKKKKKLKNGSSQNGKNERSHMPGTYLTTVIPYEKKNGPPSVEDLQILTKILRAMKEDSEKVPSLLTDYILKVLCPT

SEQ ID NO: 152831 - protein, 353 aa, Artificial Sequence
  derived and/or modified sequence
MAADGDWQDFYEFQEPARSLLDQENCNASPEPGAEAGAEAGGGADGFPAPACSLEEKLSLCFRPSDPGAEPPRTAVRPITERSLLQGDEIWNALTDNYGNVMPVDWKSSHTRTLHLLTLNLSEKGVSDSLLFDTSDDEELREQLDMHSIIVSCVNDEPLFTADQVIEEIEEMMQESPDPEDDETPTQSDRLSMLSQEIQTLKRSSTGSYEERVKRLSVSELNEILEEIETAIKEYSEELVQQLALRDELEFEKEVKNSFISVLIEVQNKQKEHKETAKKKKKLKNGSSQNGKNERSHMPGTYLTTVIPYEKKNGPPSVEDLQILTKILRAMKEDSEKVPSLLTDYILKVLCPT

SEQ ID NO: 152832 - DNA, 549 bp, Artificial Sequence
  derived and/or modified sequence
atgatgcaggagagccccgaccccgaggacgacgagacccccacccagagcgacagactgagcatgctgagccaggagatccagaccctgaagagaagcagcaccggcagctacgaggagagagtgaagagactgagcgtgagcgagctgaacgagatcctggaggagatcgagaccgccatcaaggagtacagcgaggagctggtgcagcagctggccctgagagacgagctggagttcgagaaggaggtgaagaacagcttcatcagcgtgctgatcgaggtgcagaacaagcagaaggagcacaaggagaccgccaagaagaagaagaagctgaagaacggcagcagccagaacggcaagaacgagagaagccacatgcccggcacctacctgaccaccgtgatcccctacgagaagaagaacggcccccccagcgtggaggacctgcagatcctgaccaagatcctgagagccatgaaggaggacagcgagaaggtgcccagcctgctgaccgactacatcctgaaggtgctgtgccccacctag

SEQ ID NO: 152833 - DNA, 1062 bp, Artificial Sequence
  derived and/or modified sequence
atggccgccgacggcgactggcaggacttctacgagttccaggagcccgccagaagcctgctggaccaggagaactgcaacgccagccccgagcccggcgccgaggccggcgccgaggccggcggcggcgccgacggcttccccgcccccgcctgcagcctggaggagaagctgagcctgtgcttcagacccagcgaccccggcgccgagccccccagaaccgccgtgagacccatcaccgagagaagcctgctgcagggcgacgagatctggaacgccctgaccgacaactacggcaacgtgatgcccgtggactggaagagcagccacaccagaaccctgcacctgctgaccctgaacctgagcgagaagggcgtgagcgacagcctgctgttcgacaccagcgacgacgaggagctgagagagcagctggacatgcacagcatcatcgtgagctgcgtgaacgacgagcccctgttcaccgccgaccaggtgatcgaggagatcgaggagatgatgcaggagagccccgaccccgaggacgacgagacccccacccagagcgacagactgagcatgctgagccaggagatccagaccctgaagagaagcagcaccggcagctacgaggagagagtgaagagactgagcgtgagcgagctgaacgagatcctggaggagatcgagaccgccatcaaggagtacagcgaggagctggtgcagcagctggccctgagagacgagctggagttcgagaaggaggtgaagaacagcttcatcagcgtgctgatcgaggtgcagaacaagcagaaggagcacaaggagaccgccaagaagaagaagaagctgaagaacggcagcagccagaacggcaagaacgagagaagccacatgcccggcacctacctgaccaccgtgatcccctacgagaagaagaacggcccccccagcgtggaggacctgcagatcctgaccaagatcctgagagccatgaaggaggacagcgagaaggtgcccagcctgctgaccgactacatcctgaaggtgctgtgccccacctag

SEQ ID NO: 152834 - DNA, 549 bp, Artificial Sequence
  derived and/or modified sequence
atgatgcaagaaagtcccgaccccgaggatgacgagacaccaacacaatctgaccggctttctatgctgtctcaagaaattcagacccttaagaggtctagcacaggcagctacgaggagcgggtcaagagactgagcgtgtccgagctcaacgaaatcttggaggagatagagacggccattaaggagtacagcgaggagttagttcagcaacttgctcttcgcgatgaactggagtttgagaaagaggtaaagaatagcttcataagtgtgctgatagaagttcagaataagcagaaagaacacaaggagaccgcaaagaagaaaaaaaagctgaagaacggctctagtcagaatggtaagaacgagcgcagccatatgcccgggacatacttaacaactgtcatcccatatgagaagaaaaatggaccccccagcgtggaggatttacagattctcacaaagatcctgagagccatgaaagaagacagtgaaaaggtgccatcccttctgactgattatattctcaaggtgctctgccctacgtag

SEQ ID NO: 152835 - DNA, 1062 bp, Artificial Sequence
  derived and/or modified sequence
atggccgctgacggcgattggcaagatttctacgagtttcaggagcccgccaggtccttgttggatcaggagaactgtaatgcaagccccgagccaggtgcggaagcgggcgccgaggccgggggaggagccgatggcttcccggccccagcatgcagcctggaagaaaaattgtctctgtgtttcagaccgtccgaccctggcgctgaaccccccaggacagccgtccgtcccataacggagagatctcttctgcaaggggacgagatttggaacgctctgacagataactacggcaatgtaatgcctgtggattggaaatcttcacacacgaggacactgcatcttctgaccctgaaccttagcgaaaagggggtttccgattctctgctcttcgacacttccgacgacgaagagctcagggaacagctcgacatgcacagcattattgtcagttgcgtaaacgacgaaccgctgtttacagcggatcaggtcatagaggaaattgaagaaatgatgcaggagagtccagatcctgaggatgacgaaactccaacccagtccgatagattaagcatgttatctcaagagattcagactctcaagcgctcttctaccggatcatacgaggaaagggtgaagcgcttatctgtgagtgagctaaatgagatcttggaggagattgagacggccatcaaggagtatagcgaagagctggttcagcaacttgctttgcgagacgagcttgagtttgagaaggaggtgaagaactctttcatttcagtgttgatcgaagtgcaaaataagcagaaggaacataaagagacagcgaaaaaaaagaagaaattgaaaaacgggtcttcccagaatggaaagaatgaacgttcacacatgccagggacatacttaacaacagtgatcccgtatgagaaaaaaaacggccctccttctgttgaggatttgcagattctgacgaagatcctacgggccatgaaggaagacagtgaaaaagtgccatctctcttaactgattacatcctcaaggtgttgtgccccacatag

SEQ ID NO: 152836 - DNA, 1782 bp, Artificial Sequence
  derived and/or modified sequence
gatttggaatgccctgacagataattatgggaatgtgatgcctgtagactggaagtcatcgcatactaggaccttgcacttgcttactctgaacctctcagaaaaaggggtaagtgacagtttgctctttgatacatcagatgatgaagagctgagagaacagctggatatgcactcaatcatcgtctcctgtgttaatgatgaacccctcttcacggcagaccagtaaaaattttgattatttggagcatccacacctgaacaccattggttaatggagaattcagtgcatttctgctctgggtgccttaggttattgaagaaattgaagaaatgatgcaggaatcaccggacccagaagatgatgaaacccctacacagtcagatcggctttcaatgctttcccaggaaattcaaactctcaagaggtctagtaccggcagttatgaagagagagtgaaaaggctctcagtgtctgagttaaatgaaatcctggaagaaattgagactgccattaaggagtactctgaggagctggtgcagcagttggctttacgagatgaactggagtttgaaaaggaagtgaaaaacagctttatttctgttcttattgaagtgcaaaacaaacagaaagagcacaaagaaacagcaaaaaagaaaaagaaactaaaaaatggcagctctcagaatgggaagaatgagagaagtcatatgcccggcacatatttgactacagtcattccttatgagaaaaaaaacggaccaccgtctgttgaagatcttcaaatattaacaaaaattcttcgtgccatgaaggaggacagtgaaaaagttccgagcttgttaactgattatattctgaaagttctgtgtcctacatagagcagcaactttatctgcggtgggctccaagctagatttccgacagcattattctgagagctggctaccattacccttcttgctattggaaactcagcacatttgaacttgggtttgattcagtattaacagatcttgactacactaattctttatattatagaaccaacggaaatatgggcactattttgaattctagagatggtttttgttaaatctactaataaactgttctcttagtagattaagagagagtaatattaattgtgcatgtgcagttgtatttctcattaactgacagtatgcccatttgtttttatggctttcttatctaaactgcactgatgaactagattaaagccttgggagatttatactataaattcagtgatggcaagaaccaacactgtttttttgtgagaattgtcagtgtaactattacctaccagtattgttcagagagattgaaacagaataaacgggctgttcttgaagaagcaaaaccagaatatgcattactttggtttaatacttagtgctaacattgaaactgttggtggtgatggattttgtagcttgctgcttgtttcaccactggtcaaattttaaccattaaattgccattcacttttagaatcttgtatttaagttttgattttcaaatgttctgcttcatgtgtctgtgaagaattgtactttaagtgtgtgtcctctgaggtgcttgagaaagtgtacactgcagaactgcccattctcattactgtgtcctattttattcatgcctgtgtgtttttcttaagtatgaattctagatacagctacttatggattcatcaatatcatgagcacttttgctggttccagtcaaatcaatggcatttaataaattttttaagaagt

SEQ ID NO: 152837 - DNA, 1931 bp, Artificial Sequence
  derived and/or modified sequence
atggcggcggacggggactggcaggatttctatgagttccaggagccggcccggagcctcctggaccaggagaactgtaacgcgagccccgagcctggggcggaggcgggggccgaggcgggtgggggcgccgacggtttcccggccccggcctgcagcttggaggagaagctgagcctgtgcttccgcccctcggatccgggcgccgagcccccgaggacggccgtgcggcccatcacggagcgcagcctcctgcagggggacgagatttggaatgccctgacagataattatgggaatgtgatgcctgtagactggaagtcatcgcatactaggaccttgcacttgcttactctgaacctctcagaaaaaggggtaagtgacagtttgctctttgatacatcagatgatgaagagctgagagaacagctggatatgcactcaatcatcgtctcctgtgttaatgatgaacccctcttcacggcagaccaggttattgaagaaattgaagaaatgatgcaggaatcaccggacccagaagatgatgaaacccctacacagtcagatcggctttcaatgctttcccaggaaattcaaactctcaagaggtctagtaccggcagttatgaagagagagtgaaaaggctctcagtgtctgagttaaatgaaatcctggaagaaattgagactgccattaaggagtactctgaggagctggtgcagcagttggctttacgagatgaactggagtttgaaaaggaagtgaaaaacagctttatttctgttcttattgaagtgcaaaacaaacagaaagagcacaaagaaacagcaaaaaagaaaaagaaactaaaaaatggcagctctcagaatgggaagaatgagagaagtcatatgcccggcacatatttgactacagtcattccttatgagaaaaaaaacggaccaccgtctgttgaagatcttcaaatattaacaaaaattcttcgtgccatgaaggaggacagtgaaaaagttccgagcttgttaactgattatattctgaaagttctgtgtcctacatagagcagcaactttatctgcggtgggctccaagctagatttccgacagcattattctgagagctggctaccattacccttcttgctattggaaactcagcacatttgaacttgggtttgattcagtattaacagatcttgactacactaattctttatattatagaaccaacggaaatatgggcactattttgaattctagagatggtttttgttaaatctactaataaactgttctcttagtagattaagagagagtaatattaattgtgcatgtgcagttgtatttctcattaactgacagtatgcccatttgtttttatggctttcttatctaaactgcactgatgaactagattaaagccttgggagatttatactataaattcagtgatggcaagaaccaacactgtttttttgtgagaattgtcagtgtaactattacctaccagtattgttcagagagattgaaacagaataaacgggctgttcttgaagaagcaaaaccagaatatgcattactttggtttaatacttagtgctaacattgaaactgttggtggtgatggattttgtagcttgctgcttgtttcaccactggtcaaattttaaccattaaattgccattcacttttagaatcttgtatttaagttttgattttcaaatgttctgcttcatgtgtctgtgaagaattgtactttaagtgtgtgtcctctgaggtgcttgagaaagtgtacactgcagaactgcccattctcattactgtgtcctattttattcatgcctgtgtgtttttcttaagtatgaattctagatacagctacttatggattcatcaatatcatgagcacttttgctggttccagtcaaa

SEQ ID NO: 152838 - DNA, 549 bp, Artificial Sequence
  derived and/or modified sequence
atgatgcaggagagcccagaccctgaagatgatgagacccccacccagagcgaccggctgtccatgctgagccaggagatccagaccctgaagaggagcagcacaggcagctatgaggagcgggtgaagaggctgtctgtgtctgagctgaatgagatcctggaggagattgaaacagccatcaaggagtacagcgaggagctggtgcagcagctggccctgagagatgagctggagtttgagaaggaggtgaagaacagcttcatctctgtgctgattgaggtgcagaacaagcagaaggagcacaaggagacagccaagaagaagaagaagctgaagaatggcagcagccagaatggcaagaatgaaagaagccacatgcctggcacctacctgaccaccgtcatcccctatgagaagaagaatggcccccccagcgtggaggacctgcagatcctgaccaagatcctgcgggccatgaaggaggacagcgagaaggtgcccagcctgctgacagactacatcctgaaggtgctgtgccccacctag

SEQ ID NO: 152839 - DNA, 1062 bp, Artificial Sequence
  derived and/or modified sequence
atggctgctgatggagactggcaggacttctatgagttccaggagcccgcccggagcctgctggaccaggagaactgcaatgccagccctgagcccggggctgaggccggggctgaggccggcggcggcgcagatggcttccctgccccagcctgcagcctggaggagaagctgagcctgtgcttccggcccagcgaccctggagctgagccccccaggacagctgtgcggcccatcacagagaggagcctgctgcagggagatgagatctggaatgccctgacagacaactatggaaatgtgatgcctgtggactggaagagcagccacaccaggaccctgcacctgctgaccctgaacctgtctgagaagggcgtgtctgacagcctgctgtttgacaccagtgatgatgaggagctgcgggagcagctggacatgcacagcatcatcgtgtcctgtgtgaatgatgagcccctcttcaccgctgaccaggtgattgaggagattgaggagatgatgcaggagagcccagaccctgaagatgatgagacccccacccagagcgaccggctgtccatgctgagccaggagatccagaccctgaagaggagcagcacaggcagctatgaggagcgggtgaagaggctgtctgtgtctgagctgaatgagatcctggaggagattgaaacagccatcaaggagtacagcgaggagctggtgcagcagctggccctgagagatgagctggagtttgagaaggaggtgaagaacagcttcatctctgtgctgattgaggtgcagaacaagcagaaggagcacaaggagacagccaagaagaagaagaagctgaagaatggcagcagccagaatggcaagaatgaaagaagccacatgcctggcacctacctgaccaccgtcatcccctatgagaagaagaatggacctccttctgtggaggacctgcagatcctgaccaagatcctgcgggccatgaaggaggacagcgagaaggtgcccagcctgctgacagactacatcctgaaggtgctgtgccccacctag

SEQ ID NO: 152840 - DNA, 549 bp, Artificial Sequence
  derived and/or modified sequence
atgatgcaggagagccccgaccccgaggacgacgagacccccacccagtcggacaggctgtctatgctttcccaggaaatccaaacactgaagaggtctagcaccggatcctacgaggagagggttaagcgactgtccgtgtctgaacttaatgagatcttggaggaaattgagaccgcgataaaggagtactccgaagagctcgttcaacaactggctctgcgggatgagctcgaatttgagaaagaggtgaagaatagctttattagcgtgcttattgaggttcaaaataagcagaaagagcacaaggagacggccaagaagaagaagaaacttaaaaatggaagcagccagaacggcaagaatgaacgttctcatatgcctggcacctatctcacaaccgtgatcccatacgagaaaaaaaacggtcctccttccgtcgaagatttacagatacttacaaagatcctccgtgctatgaaggaggactctgaaaaagtgccatctctcctcacagactatatcctgaaggttttgtgccctacttag

SEQ ID NO: 152841 - DNA, 1062 bp, Artificial Sequence
  derived and/or modified sequence
atggccgccgacggcgactggcaggacttctacgagttccaggagccggcccgaagtttattggaccaggagaactgcaacgcatctccagagcctggcgccgaagcgggcgcagaggctggcggaggggcagacggatttcccgcccccgcttgttctctcgaggagaagctctccctttgcttccggccgtctgatcccggggccgaacccccaagaacagcggtgcgaccaattactgaacggagtttgctccagggagatgaaatctggaatgccctgacagacaattacggaaacgtcatgccggtcgattggaagagctcccatacccgcaccctacacctgctcaccctgaatctcagcgaaaaaggtgtttccgactccctgctgtttgatactagcgacgatgaggagctgagagagcagctggacatgcattctatcatcgtgagctgcgtgaatgatgagcccctgtttacagccgatcaggtgatcgaggagattgaggagatgatgcaggagtccccggatcctgaggacgatgaaacgccaactcagtccgaccggttgagcatgttgagccaggagatccaaacacttaagaggtcaagtacaggctcatacgaggaaagggtgaagcggctgtccgtctcagagctgaatgaaattctggaagagatcgaaacagctatcaaagagtatagcgaggaactcgtacagcagctcgcacttcgagatgagctggagtttgaaaaggaagttaaaaactcatttatcagtgtccttattgaggtgcagaataagcagaaggagcataaagagacagccaaaaaaaaaaaaaaattgaagaatgggtcctcacaaaatggtaaaaatgaaaggtcccatatgcctggtacatatctaactacagttattccttacgagaagaaaaatggcccgccctccgtcgaagatcttcagatactcacaaaaattctgcgtgcaatgaaagaggactctgaaaaagttcccagccttctgaccgactacatccttaaggtgctctgccccacctag

SEQ ID NO: 152842 - DNA, 549 bp, Artificial Sequence
  derived and/or modified sequence
atgatgcaagaatcacccgatcctgaagacgatgaaacgccaacgcaaagcgatcggctttctatgttatcccaagagatccagaccctgaagcgctcatcgacagggagctatgaggaaagagtcaaacgattaagtgtctccgagctgaatgagatcctggaggaaatagaaaccgcaatcaaagaatactctgaggagctcgtgcagcagctcgccctgcgcgatgagctggagtttgagaaagaagttaaaaacagctttatttctgttcttatcgaggtgcagaataagcagaaggaacataaggagactgctaaaaagaaaaaaaaactcaaaaacggaagtagccagaatggaaagaacgagaggtcacacatgccaggcacatacctgacgacagtgatcccatatgagaagaaaaatggtccaccttctgtggaggatctacagattttgacaaagatcctaagggccatgaaggaggactccgagaaggtcccaagcctactgacagattatatactgaaggtgctatgccccacttag

SEQ ID NO: 152843 - DNA, 1062 bp, Artificial Sequence
  derived and/or modified sequence
atggccgctgacggtgattggcaggatttttatgaatttcaagaacccgctcgctccttgcttgatcaggagaactgcaatgcctcgcccgagcctggtgccgaggctggtgccgaggccggaggcggtgccgacggctttccagctcctgcctgctcgttggaggaaaaactgagtttgtgcttccgcccatcggatccaggagcagagccaccacggactgccgttcgacccatcaccgagagaagtctgcttcagggtgacgaaatttggaacgcgcttaccgacaactacggaaacgtaatgccggttgattggaaaagcagtcatacccgtaccttgcacctcctgacactcaacctaagtgagaagggggtatctgactctctgctgtttgacaccagtgatgacgaggagttaagagaacaactggatatgcactctataattgtatcctgtgttaatgacgagcccctcttcaccgctgaccaagtgattgaagagatcgaagagatgatgcaggaaagccccgatccagaggacgatgagaccccaacacaatctgataggctgtcgatgctgagccaagagatccagactctgaaaaggtcttcaaccgggagctatgaagagagagtgaaacggctttcagtgagcgagctcaacgaaatcctagaggagattgagaccgccataaaagaatattcagaggagctcgtccagcagttagctctgcgcgacgaactggagtttgaaaaagaggtaaagaactctttcatctccgttcttatcgaagtacagaacaagcagaaggagcataaagagacggccaagaagaaaaagaagctgaagaacggcagctcccagaatggaaagaacgaaagatctcatatgcccggaacatacctcactactgtcatcccctacgagaagaagaatggccctccgtccgtggaggacctgcaaatacttaccaaaatcctgagggccatgaaggaggacagtgaaaaggtgccctccctgcttacagactacatactgaaggtgttgtgcccaacatag

SEQ ID NO: 152844 - protein, 392 aa, Artificial Sequence
  derived and/or modified sequence
MEAPLVSLDEEFEDLRPSCSEDPEEKPQCFYGSSPHHLEDPSLSELENFSSEIISFKSMEDLVNEFDEKLNVCFRNYNAKTENLAPVKNQLQIQEEEETLQDEEVWDALTDNYIPSLSEDWRDPNIEALNGNCSDTEIHEKEEEEFNEKSENDSGINEEPLLTADQVIEEIEEMMQNSPDPEEEEEVLEEEDGGETSSQADSVLLQEMQALTQTFNNNWSYEGLRHMSGSELTELLDQVEGAIRDFSEELVQQLARRDELEFEKEVKNSFITVLIEVQNKQKEQRELMKKRRKEKGLSLQSSRIEKGNQMPLKRFSMEGISNILQSGIRQTFGSSGTDKQYLNTVIPYEKKASPPSVEDLQMLTNILFAMKEDNEKVPTLLTDYILKVLCPT

SEQ ID NO: 152845 - protein, 104 aa, Artificial Sequence
  derived and/or modified sequence
MEAPLVSLDEEFEDLRPSCSEDPEEKPQCFYGSSPHHLEDPSLSELENFSSEIISFKSMEDLVNEFDEKLNVCFRNYNAKTENLAPVKNQLQIQEEEETLQDEE

SEQ ID NO: 152846 - DNA, 1748 bp, Artificial Sequence
  derived and/or modified sequence
cggggaaggggtggggtggaggcgggagcggagccgggcgccgccggagctgcgcggggagcgctcgctggctggctggctggctggctctccgctgcgctgcgctgcgctccggccgctcccgcggcccgtggatgggggtgtccggctgagccccgggatccgcctccctccgccaggacccgcacagataaactcatcctgaaagtcgctgttgttctcctgctgagcaagaatggaggccccactggtgagtctggatgaagagtttgaggaccttcgaccctcctgctcggaggacccggaggagaagccccagtgtttctatggttcatctccccaccatctcgaggacccctccctctccgagcttgagaatttttcttccgaaataatcagcttcaagtccatggaggacctcgtaaatgaatttgatgagaagctcaatgtctgctttcggaactacaacgccaagaccgagaacctagctcccgtgaagaaccagttacagatccaagaggaggaggagacccttcaggacgaggaggtttgggatgctctgacagacaattacatcccttcactctcagaagactggagggatccaaacatcgaggctctgaatggcaactgctctgacactgagatccatgagaaagaagaggaagagttcaatgagaagagtgaaaatgattccggtatcaacgaggagcctctgctcacagcagatcaggtaattgaggagattgaggaaatgatgcagaactccccagaccctgaggaagaagaggaggttctggaagaagaggatggaggagaaacttcctcccaggcagactcggtcctcctgcaggagatgcaggcattgacacagaccttcaacaacaactggtcctatgaagggctgaggcacatgtctgggtctgagctgaccgagctgctggaccaggtggagggtgccatccgtgacttctcggaggagctggtgcagcagctggcccgccgggacgagctggagtttgagaaggaagtgaagaactcctttatcacggtgcttattgaggttcagaacaagcagaaggagcagcgagaactgatgaaaaagaggcggaaagagaaagggctgagcctgcagagcagccggatagagaagggaaaccagatgcctctcaagcgcttcagcatggaaggcatctccaacattctgcagagtggcatccgccagacctttggctcctcaggaactgacaaacagtatctgaacacagtcattccttacgagaagaaagcctctcctccctcagtggaagacctgcagatgctgacaaacattctctttgccatgaaggaggataatgagaaggtgcctactttgctaacggactacattttaaaagtgctctgccctacctaaccttgccctttggagcagcctcgctgcaggaggtcactgagcaagagtcattccatcacagggactgcatgagaccatgtaacctccgacatgtatttaaacgtgtatagcttaacctggattaaacacgagcaagcgcgcggggtcctttgccgttggcttctagtgctagtaatcattggatgcatgatggggcagggccggtgatggtgcctcccccttgctggtgtcaggagaggggaaggcagccgctttcaccgctcattatgtagtctggctacagccctcaaaaacagcttatactcttaagactaattttgaaataaaaccttca

SEQ ID NO: 152847 - DNA, 1179 bp, Artificial Sequence
  derived and/or modified sequence
atggaggcaccactcgtctctctggatgaggaatttgaggacctgaggccctcttgcagcgaggaccccgaggagaaaccccaatgtttctatggcagctctccacatcacctcgaagacccgtctctgtccgagctggagaacttttcctccgagattatttcttttaagtcaatggaagacctggttaacgaatttgacgagaagctaaatgtctgcttccggaattataacgccaaaactgagaacttggccccagtgaaaaatcagcttcagattcaggaggaggaagagacactacaggacgaagaggtgtgggatgccctaacagataactatatcccaagtctgtcagaggactggcgcgaccccaatattgaggcccttaacggcaactgttccgacacagaaatccatgaaaaggaggaggaagagttcaatgaaaaaagtgagaacgactctggcattaacgaggaacccttgctgaccgccgaccaggtgatagaggagattgaagagatgatgcagaatagtcccgacccagaggaggaagaagaggtgctggaagaagaagatggtggtgaaacatcttcccaggccgactctgttttactccaggaaatgcaggcactgacacagacctttaacaataattggtcctatgagggcctgagacacatgagtggatccgagctaaccgagctccttgaccaggtcgaaggagctatccgcgacttttcagaggaacttgtacaacagctggcacgccgagatgagctcgaattcgaaaaggaggtgaagaacagtttcataacagtacttatcgaggtccagaacaaacaaaaagaacagcgagaactgatgaagaaacgtcggaaagaaaaagggctgagcctacagtcaagtaggattgagaaagggaaccagatgccattgaagaggttctctatggaggggataagtaacattcttcagagtggaattcgtcaaaccttcgggtcgtcaggaacggataaacagtatctgaacactgtgattccctacgaaaaaaaagcctcacctccatctgtcgaagatctccagatgttgactaatattttattcgccatgaaagaggataatgaaaaggtgccgaccctgttgaccgattacattctcaaggtgttgtgtccgacgtag

SEQ ID NO: 152848 - DNA, 1179 bp, Artificial Sequence
  derived and/or modified sequence
atggaggcccccctggtgtccctggatgaggagtttgaggacctgcggcccagctgcagtgaagatcctgaggagaagccccagtgcttctacggcagcagcccccaccacctggaggaccccagcctgtctgagctggagaacttcagcagcgagatcatctccttcaagtccatggaggacctggtgaatgaatttgatgagaagctgaatgtgtgcttcaggaactacaatgccaagacagagaacctggcccctgtgaagaaccagctgcagatccaggaggaggaggagaccctgcaggatgaggaggtgtgggatgccctgacagacaactacatccccagcctgtctgaggactggagggaccccaacatcgaggccctgaatggaaactgcagcgacacagagatccacgagaaggaggaggaggagttcaatgagaagtcagaaaatgacagcggcatcaatgaggagcccctgctgacagctgaccaggtgattgaggagattgaggagatgatgcagaacagcccagaccctgaggaggaggaggaggtgctggaggaggaggatggaggagagaccagcagccaggccgacagcgtgctgctgcaggagatgcaggccctgacccagaccttcaacaacaactggagctatgagggcctgcggcacatgagcggcagcgagctgacagagctgctggaccaggtggagggcgccatccgggacttcagcgaggagctggtgcagcagctggccaggagagatgagctggagtttgagaaggaggtgaagaacagcttcatcaccgtgctgattgaggtgcagaacaagcagaaggagcagcgggagctgatgaagaagaggaggaaggagaagggcctgagcctgcagagcagccgcatcgagaagggcaaccagatgcccctgaagcgcttctccatggagggcatcagcaacatcctgcagagcggcatccggcagaccttcggcagcagcggcacagacaagcagtacctgaacacagtcatcccctatgagaagaaggccagcccccccagcgtggaggacctgcagatgctgaccaacatcctgtttgccatgaaggaggacaatgagaaggtgcccaccctgctgacagactacatcctgaaggtgctgtgccccacctag

SEQ ID NO: 152849 - DNA, 1179 bp, Artificial Sequence
  derived and/or modified sequence
atggaggcccccctggtgagcctggacgaggagttcgaggacctgcggccaagctgctccgaagatcctgaggaaaaaccacagtgtttttatggcagcagcccccaccaccttgaggatccttctcttagcgagctcgagaattttagctccgaaatcatttctttcaagtctatggaggacctagtcaacgaattcgacgagaaattgaacgtatgcttccgcaactacaacgctaagacggagaacctagcacccgttaaaaaccagctgcagatacaggaggaggaggagactttgcaggacgaggaagtgtgggacgcgttgacagataattacattccgtccctcagcgaagattggcgagacccgaatattgaagccctgaatggaaattgtagcgatactgagattcatgaaaaggaggaagaggaattcaacgaaaaaagtgaaaatgactctggcatcaatgaggagccgcttcttaccgccgatcaggtcattgaggagattgaggaaatgatgcagaattcacctgacccagaagaggaggaggaggtgctggaggaggaggacggcggcgagaccagctcccaggctgactccgtcctcctgcaggagatgcaggccctaacacagacatttaataacaactggagttatgaggggctgcgacacatgtcaggatctgagttgaccgaattgctcgaccaagtggagggggccatcagggacttttctgaagaactggttcagcagctcgccagacgcgacgaattggaattcgaaaaggaggtgaaaaacagtttcattacagttttgattgaggtgcaaaacaagcaaaaagagcagcgggaactgatgaaaaagcgtaggaaagaaaagggactgagcttacagtccagccggatcgaaaagggcaatcagatgcctctgaagcggttttccatggaggggataagtaacatcctccagagtggtattcggcaaaccttcggctcttctggcaccgataagcaatacctgaacactgtaatcccctatgaaaaaaaggcatcgcccccatcagtggaggatttacagatgctgaccaacatcctcttcgctatgaaagaggataacgagaaggtaccaaccttgctaacggactacattcttaaagtgctttgcccaacctag

SEQ ID NO: 152850 - DNA, 1179 bp, Artificial Sequence
  derived and/or modified sequence
atggaagcccctctcgtgagcctggatgaagaattcgaggatctgaggccatcatgctcagaagatcccgaggaaaaaccacaatgcttctacggaagtagtccccaccacttggaggatccgtcactgtcggaattggaaaatttcagcagcgagattatatcatttaaatctatggaggatctggtgaatgaattcgatgagaagttaaatgtttgtttccgaaactataacgccaaaacggagaacctggccccagtgaaaaatcagctgcagatccaggaggaggaggaaactctgcaggacgaagaagtgtgggatgctctgaccgacaactacatcccttctctgtcagaggactggagggacccgaacatcgaggccctgaatggcaactgtagcgataccgaaatccatgagaaggaggaggaggaattcaatgagaaaagcgaaaacgattctgggataaacgaagagcctctgttaacagctgaccaggtgatagaagagatagaagaaatgatgcagaactccccagatcccgaggaggaagaagaggtactcgaggaggaagatggaggcgaaacaagtagccaagcggatagtgtgctcttgcaagaaatgcaggccctgactcaaaccttcaacaacaattggtcctatgagggccttcggcatatgagcggtagcgagctgactgaattgctcgaccaagttgaaggcgctatcagagattttagcgaagagctagttcagcaactcgcgaggagagatgagctggagtttgaaaaggaggttaagaacagctttatcaccgttttgatcgaggtgcagaacaagcagaaggagcagcgggaactgatgaaaaagcggcgaaaagaaaaaggcctctctctccaaagcagccggatcgagaaaggaaatcagatgcctttgaaaaggttttccatggagggcatcagcaatattcttcaaagcggcataaggcagaccttcggctcttctggaacagataagcaatacctcaataccgttattccatatgagaagaaggcttcccccccttctgtagaggatcttcagatgttaaccaacattcttttcgccatgaaggaggacaacgaaaaggtgccaactcttctgacagattacatcctgaaagtcctgtgccctacgtag

SEQ ID NO: 152851 - DNA, 1179 bp, Artificial Sequence
  derived and/or modified sequence
atggaggcccccctggtgagcctggacgaggagttcgaggacctgagacccagctgcagcgaggaccccgaggagaagccccagtgcttctacggcagcagcccccaccacctggaggaccccagcctgagcgagctggagaacttcagcagcgagatcatcagcttcaagagcatggaggacctggtgaacgagttcgacgagaagctgaacgtgtgcttcagaaactacaacgccaagaccgagaacctggcccccgtgaagaaccagctgcagatccaggaggaggaggagaccctgcaggacgaggaggtgtgggacgccctgaccgacaactacatccccagcctgagcgaggactggagagaccccaacatcgaggccctgaacggcaactgcagcgacaccgagatccacgagaaggaggaggaggagttcaacgagaagagcgagaacgacagcggcatcaacgaggagcccctgctgaccgccgaccaggtgatcgaggagatcgaggagatgatgcagaacagccccgaccccgaggaggaggaggaggtgctggaggaggaggacggcggcgagaccagcagccaggccgacagcgtgctgctgcaggagatgcaggccctgacccagaccttcaacaacaactggagctacgagggcctgagacacatgagcggcagcgagctgaccgagctgctggaccaggtggagggcgccatcagagacttcagcgaggagctggtgcagcagctggccagaagagacgagctggagttcgagaaggaggtgaagaacagcttcatcaccgtgctgatcgaggtgcagaacaagcagaaggagcagagagagctgatgaagaagagaagaaaggagaagggcctgagcctgcagagcagcagaatcgagaagggcaaccagatgcccctgaagagattcagcatggagggcatcagcaacatcctgcagagcggcatcagacagaccttcggcagcagcggcaccgacaagcagtacctgaacaccgtgatcccctacgagaagaaggccagcccccccagcgtggaggacctgcagatgctgaccaacatcctgttcgccatgaaggaggacaacgagaaggtgcccaccctgctgaccgactacatcctgaaggtgctgtgccccacctag

SEQ ID NO: 152852 - protein, 368 aa, Artificial Sequence
  derived and/or modified sequence
MAIKSIASRLRGSRRFLSGFVAGAVVGAAGAGLAALQFFRSQGAEGALTGKQPDGSAEKAVLEQFGFPLTGTEARCYTNHALSYDQAKRVPRWVLEHISKSKIMGDADRKHCKFKPDPNIPPTFSAFNEDYVGSGWSRGHMAPAGNNKFSSKAMAETFYLSNIVPQDFDNNSGYWNRIEMYCRELTERFEDVWVVSGPLTLPQTRGDGKKIVSYQVIGEDNVAVPSHLYKVILARRSSVSTEPLALGAFVVPNEAIGFQPQLTEFQVSLQDLEKLSGLVFFPHLDRTSDIRNICSVDTCKLLDFQEFTLYLSTRKIEGARSVLRLEKIMENLKNAEIEPDDYFMSRYEKKLEELKAKEQSGTQIRKPS

SEQ ID NO: 152853 - DNA, 1107 bp, Artificial Sequence
  derived and/or modified sequence
atggccattaaaagcattgcctcaaggttaaggggcagccgccgatttttatcaggcttcgtcgcaggcgcggtagtgggcgctgccggggccggacttgctgctttgcaattcttccgctcccaaggggccgagggcgctctgactgggaaacaaccagatggttcggcagagaaagcagtgttagagcagttcgggttcccgttgacaggcactgaagcccgctgttacactaaccatgcactctcctatgatcaggctaagcgggtaccgcgatgggtgcttgagcacatttccaaatcaaagatcatgggagatgctgatagaaaacactgcaagttcaagcctgacccaaacatcccccccacattttccgcgttcaacgaggattacgtgggctccggctggtcccgtggacacatggcgcctgccggcaacaacaaattttcaagcaaagctatggcagaaaccttctacctgagtaatatcgtgccccaagatttcgataataactcgggatattggaataggatcgaaatgtactgcagggagctaacagaacggtttgaggatgtgtgggtagttagcggacctttaaccctgcctcaaaccagaggagacgggaagaagatagtatcttaccaagtgatcggcgaggataatgtggccgtcccctctcatctgtataaggttatcctagctagaaggtcttccgtgagcactgagcccctcgctctcggggctttcgtcgttcccaacgaggccatcggcttccaacctcagttgaccgaatttcaagtgtcgttacaggacctagaaaagttaagcggtctggtgttctttcctcacctcgaccggaccagcgatatccgcaacatttgcagcgtggacacctgcaaactactggacttccaggagtttaccctttacctcagcaccagaaaaatcgagggggctcggagcgtcctccggttagagaaaatcatggagaatctgaagaacgcagagattgagcccgacgattattttatgtcccggtatgagaagaagcttgaagaactcaaagccaaggaacaatccggtacccagatacgtaaacctagctag

SEQ ID NO: 152854 - DNA, 1107 bp, Artificial Sequence
  derived and/or modified sequence
atggccatcaagagcatcgccagccggctgcggggcagccgccgcttcctgagcggctttgtggccggggctgtggtgggcgctgctggagctggcctggccgccctgcagttcttccgcagccagggcgctgagggcgccctgaccgggaagcagccagatggcagcgctgagaaggctgtgctggagcagtttggcttccccctgaccggcacagaggcccgctgctacaccaaccacgccctgtcctatgaccaggccaagagggtgccccgctgggtgctggagcacatcagcaagagcaagatcatgggagatgctgacaggaagcactgcaagttcaagccagaccccaacatcccccccaccttcagcgccttcaatgaagattatgtgggcagcggctggagccggggccacatggccccagctggcaacaacaagttcagcagcaaggccatggccgagaccttctacctgagcaacatcgtgccccaggactttgacaacaacagcggctactggaaccgcatcgagatgtactgccgggagctgacagaaagatttgaagatgtgtgggtggtgtctggccccctgaccctgccccagaccagaggagatggcaagaagatcgtgtcctaccaggtgattggagaagataatgtggccgtgcccagccacctgtacaaggtgatcctggcccggcgcagctctgtgtccacagagcccctggccctgggcgcctttgtggtgcccaatgaggccatcggcttccagccccagctgacagagttccaggtgtccctgcaggacctggagaagctgagcggcctggtgttcttcccccacctggacaggaccagtgacatccggaacatctgcagcgtggacacctgcaagctgctggacttccaggagttcaccctgtacctgagcaccaggaagattgagggcgcccggtctgtgctgcggctggagaagatcatggagaacctgaagaatgctgagattgaaccagatgactacttcatgagccgctatgagaagaagctggaggagctgaaggccaaggagcagagcggcacccagatcaggaagcccagctag

SEQ ID NO: 152855 - DNA, 1107 bp, Artificial Sequence
  derived and/or modified sequence
atggccatcaagagcatcgccagccggctgcggggcagccggcggttcctgagtgggttcgttgccggagcggttgtgggcgctgctggcgccggactcgcagcgcttcagttctttagatctcagggtgccgaaggagctctgaccggcaaacagccagatggaagcgcggagaaggcagtcctggagcaattcgggtttccactgacggggacagaagcacgatgctacactaaccacgcactgagctatgaccaggctaaacgtgtgcctcgttgggtcttagagcacatcagtaagagcaaaatcatgggagatgctgaccgaaagcattgcaagtttaagcctgacccaaatattcctcccacgttcagtgcgtttaacgaggactatgtagggagtggatggagtagaggccacatggcccctgcaggaaacaataaattctccagtaaggccatggcggagacattctacttgagcaacatcgttccccaggatttcgataacaactctggatactggaataggatcgaaatgtactgccgagaactgaccgagaggttcgaggacgtatgggttgtgtcagggccactgaccctgccccagacccgcggcgacggaaagaagattgtttcatatcaggtcatcggtgaggacaatgtggccgtgccatcccacctctacaaggtgattcttgctcgcagatctagcgtttccaccgaaccattagccctcggggctttcgtggtccctaatgaagcaatcggttttcagccccagctgacagaatttcaggtgtctctgcaggatctggaaaagctctctggactcgtgtttttcccacatctcgatcggacaagcgacattagaaacatctgttcagtggacacgtgcaagcttctcgatttccaagagttcacgctatacctgagtactcgcaaaatcgaaggggcaagaagcgtcctcagattggagaagatcatggagaacttaaaaaacgctgagattgagcccgacgattatttcatgtccaggtacgagaagaaattagaagaattgaaagccaaggagcagagcggtacgcagatcagaaaaccaagctag

SEQ ID NO: 152856 - DNA, 1107 bp, Artificial Sequence
  derived and/or modified sequence
atggccattaagtctatcgcctctcgcctccgtgggagcagacgatttttgagcggctttgtggccggagcagtcgtgggagctgctggggctggcctggcggctcttcagttctttcgctcccagggggcagaaggagctttgacggggaaacagcctgatggcagcgctgaaaaagccgtgcttgaacaattcggatttcctctgaccgggacagaggcccgatgctacaccaaccacgctctcagttacgatcaggctaaacgtgtgccgaggtgggtgttagagcatatctctaaatccaaaatcatgggggacgctgataggaagcactgcaagtttaaacccgatcccaacattccccctaccttttcagcctttaacgaggattatgtgggatccggctggtcccgcggtcacatggctcccgcagggaacaataaattcagttccaaagccatggcagagaccttctatctgagtaatatcgtgcctcaagactttgataataattccggttactggaaccgtattgaaatgtactgccgcgagcttaccgagcggttcgaagatgtatgggtcgtgtccgggccactgactctgcctcagacaaggggggacggcaaaaaaatcgtgagttaccaggttatcggagaggacaatgtagctgtgccttcccacctgtataaagtgatactggcaaggcggtcctcagtgagcaccgaaccgctcgcgttaggggctttcgttgttcccaatgaagctatcggtttccagccccagctaacggaatttcaggtctccctccaggacctggaaaaactgagcggactcgtgttctttcctcacctggaccggacctccgatatccgcaacatttgtagtgtggatacatgtaagctgctggattttcaggagttcaccttgtacctgagcacccgtaagattgagggagctcgctcggtgctgcgcctcgagaaaatcatggagaacctgaaaaatgcagagatcgaaccagacgattactttatgagccggtatgagaagaaactagaagaacttaaggcgaaagaacagtccgggacccaaatcaggaagccctcatag

SEQ ID NO: 152857 - DNA, 1107 bp, Artificial Sequence
  derived and/or modified sequence
atggccatcaagagcatcgccagcagactgagaggcagcagaagattcctgagcggcttcgtggccggcgccgtggtgggcgccgccggcgccggcctggccgccctgcagttcttcagaagccagggcgccgagggcgccctgaccggcaagcagcccgacggcagcgccgagaaggccgtgctggagcagttcggcttccccctgaccggcaccgaggccagatgctacaccaaccacgccctgagctacgaccaggccaagagagtgcccagatgggtgctggagcacatcagcaagagcaagatcatgggcgacgccgacagaaagcactgcaagttcaagcccgaccccaacatcccccccaccttcagcgccttcaacgaggactacgtgggcagcggctggagcagaggccacatggcccccgccggcaacaacaagttcagcagcaaggccatggccgagaccttctacctgagcaacatcgtgccccaggacttcgacaacaacagcggctactggaacagaatcgagatgtactgcagagagctgaccgagagattcgaggacgtgtgggtggtgagcggccccctgaccctgccccagaccagaggcgacggcaagaagatcgtgagctaccaggtgatcggcgaggacaacgtggccgtgcccagccacctgtacaaggtgatcctggccagaagaagcagcgtgagcaccgagcccctggccctgggcgccttcgtggtgcccaacgaggccatcggcttccagccccagctgaccgagttccaggtgagcctgcaggacctggagaagctgagcggcctggtgttcttcccccacctggacagaaccagcgacatcagaaacatctgcagcgtggacacctgcaagctgctggacttccaggagttcaccctgtacctgagcaccagaaagatcgagggcgccagaagcgtgctgagactggagaagatcatggagaacctgaagaacgccgagatcgagcccgacgactacttcatgagcagatacgagaagaagctggaggagctgaaggccaaggagcagagcggcacccagatcagaaagcccagctag

SEQ ID NO: 152858 - DNA, 2792 bp, Artificial Sequence
  derived and/or modified sequence
agcttggcgggcggtgaggcgtggggtgacggggggatggcgggggccggcatgcgcgcgcatgcgccgtggtaaaaggccggtacctcgggcaagatggctatcaagagtatcgcttcccgcctccggggttcccgtcgttttctgagcggcttcgtggctggggctgtagtgggcgctgcgggagctgggctcgcggccctgcagttcttccggagtcagggcgctgagggagcgttgacagggaagcagccggatggatctgcagaaaaggctgtcttggaacaatttggattccctttaactggaacagaggcaaggtgttacactaatcacgctttgtcttatgatcaggcaaagcgggtgcctagatgggttcttgaacatatttccaaaagcaagataatgggtgatgcagacagaaagcattgtaaatttaagcctgatcccaatatccctccaaccttcagtgccttcaatgaagattatgttggaagtgggtggtcacgaggacacatggctccagcaggaaataacaaattttcaagtaaagccatggctgaaaccttttacctttctaacattgtgcctcaggattttgataataattctggatattggaacagaatagaaatgtactgtcgagagctgacagaaaggtttgaagatgtttgggtggtatctgggcctttgaccttacctcagactagaggcgatggaaagaaaatagttagttaccaggtgattggcgaggacaacgtggcagtcccctcacacctttataaggtaatcctggcccgcagaagctcagtatctaccgaaccactggcgctaggggcctttgtggtacccaatgaagccatcggcttccagccccagttaactgaattccaagtgagcctccaggacctagagaagttgtcaggactggtgttttttcctcatttggatagaactagtgatatccggaatatctgctctgtggacacctgtaagctcctggatttccaggagttcaccttgtacttgagtacaagaaagattgaaggagcccgatcagtgctcagactggaaaagatcatggaaaacttgaagaatgcagagattgaaccagatgattactttatgagtcgctatgagaagaagctagaagaactcaaagctaaggagcagtcaggaacccagataagaaagccatcctagtttttatctcaagatgtgtcataccgtctgtaatgaagcaggcatgccctctttaggctaacatattttagtggctttgctttttgctttttaaaaagtttttctctttaagagatgtggtctcgccgtgtcatccaggctggagtgcagtggtggaatcatagctcactatagcctcaaacttctgggcttaagcaatcctcctgcctctgccccctgagcagctgggactacaggcacacaccatcaccctcagctactagtggctttgctttaaagaaacagtggaatcctaaatttatgactaaaaattcccccaaaagatgaaagatctacaatgtttttgtcagtattatatttgactcaggaactaattattaagggagctttgacacctgcagatggagggctgatcttgtgtcaagttaacaggaagactgcccacagatgacactgcatttgtatccctgtggatgtagagtattgggaaggcatttgtttagtttcatgcctccaaaccatgcattgtctgtgatgtatctgcccagccttctcagaactcaatgttgtacatttttccctctaggacctgaattggtcttggaggcagcttttagaaatcctctgtgtagttcctgtccacatgcactatatatttgtttcttttttctcctctcatgaatctgctcgtttctctacttctgtctacgtagaagcactcagcaactagtttctgctcattaaatgtgttctatatactaggctcagtgctttacatgtgttgtctcacaatgactctctgaggtaaatacactatccccattttacctgtgagaaaattgaggcttagagagcttagtgtcttacctgagtttcacttttccaaagtagtcatccacaaagtatgaggcagacagatctaagagaagaaagacagctgaggtagattcaaatcttttctgacatggatggtggctttttactcagaaatatatacctatttccatgggtatttgtgggcctgaggcatgcttggcaagaagagtctggtttctcgtctgctatgcaagccaaagggactttaatgttctttgaattgaaccctccttagctctgtggaaagagacagtcaggaatatttgggaattagacggcaatactttgtggggtttattagagcccatgcttgcctccagagatacagttcttttagtgaccagatactgccaaattgatgtgttcttgctttccaggtgagctttttgttcttaagattaagaaacctatgaaggatctgcagccaggcatggtggctcaggcctataatctcagcactttgggaaatcgaggtgggtggatcgcttgagcccaggagtttgagaccagcctgggcaacataatgaaaccctatctttacaaaaaaatacaaaaattagctgggcgtggtggtgcacacctgtagtcccagctactcgggaggctgaaatgggaggattgcttgagcctggcaggtcaaggctgcgatgggacatggtcatgccactggacgccagcctgggccacagagggagaccctgtctcaaaaaaag

SEQ ID NO: 152859 - DNA, 966 bp, Artificial Sequence
  derived and/or modified sequence
agcttggcgggcggtgaggcgtggggtgacggggggatggcgggggccggcatgcgcgcgcatgcgccgtggtaaaaggccggtacctcgggcaagatggctatcaagagtatcgcttcccgcctccggggttcccgtcgttttctgagcggcttcgtggctggggctgtagtgggcgctgcgggagctgggctcgcggccctgcagttcttccggagtcagggcgctgagggagcgttgacagggaagcagccggatggatctgcagaaaaggctgtcttggaacaatttggattccctttaactggaacagaggcaaggtgttacactaatcacgctttgtcttatgatcaggcaaagcgggtgcctagatgggttcttgaacatatttccaaaagcaagataatgggtgatgcagacagaaagcattgtaaatttaagcctgatcccaatatccctccaaccttcagtgccttcaatgaagattatgttggaagtgggtggtcacgaggacacatggctccagcaggaaataacaaattttcaagtaaagccatggctgaaaccttttacctttctaacattgtgcctcaggattttgataataattctggatattggaacagaatagaaatgtactgtcgagagctgacagaaaggtttgaagatgtttgggtggtatctgggcctttgaccttacctcagactagaggcgatggaaagaaaatagttagttaccaggtgattggcgaggacaacgtggcagtcccctcacacctttataaggaccacgctggctgctgtgttgagagcccgctggggacaaggaccagtgaggaggccactgcaagaatccaggagagagatgatggcggctcagaccagcgcagtggcctggttgaacttgggatatatttcgaaggtagagccaacaggatttccggccggattggatgtagggtgtga

SEQ ID NO: 152860 - protein, 536 aa, Artificial Sequence
  derived and/or modified sequence
MAEHAPRRCCLGWDFSTQQVKVVAVDAELNVFYEESVHFDRDLPEFGTQGGVHVHKDGLTVTSPVLMWVQALDIILEKMKASGFDFSQVLALSGAGQQHGSIYWKAGAQQALTSLSPDLRLHQQLQDCFSISDCPVWMDSSTTAQCRQLEAAVGGAQALSCLTGSRAYERFTGNQIAKIYQQNPEAYSHTERISLVSSFAASLFLGSYSPIDYSDGSGMNLLQIQDKVWSQACLGACAPHLEEKLSPPVPSCSVVGAISSYYVQRYGFPPGCKVVAFTGDNPASLAGMRLEEGDIAVSLGTSDTLFLWLQEPMPALEGHIFCNPVDSQHYMALLCFKNGSLMREKIRNESVSRSWSDFSKALQSTEMGNGGNLGFYFDVMEITPEIIGRHRFNTENHKVAAFPGDVEVRALIEGQFMAKRIHAEGLGYRVMSKTKILATGGASHNREILQVLADVFDAPVYVIDTANSACVGSAYRAFHGLAGGTDVPFSEVVKLAPNPRLAATPSPGASQVYEALLPQYAKLEQRILSQTRGPPE

SEQ ID NO: 152861 - protein, 399 aa, Artificial Sequence
  derived and/or modified sequence
MDSSTTAQCRQLEAAVGGAQALSCLTGSRAYERFTGNQIAKIYQQNPEAYSHTERISLVSSFAASLFLGSYSPIDYSDGSGMNLLQIQDKVWSQACLGACAPHLEEKLSPPVPSCSVVGAISSYYVQRYGFPPGCKVVAFTGDNPASLAGMRLEEGDIAVSLGTSDTLFLWLQEPMPALEGHIFCNPVDSQHYMALLCFKNGSLMREKIRNESVSRSWSDFSKALQSTEMGNGGNLGFYFDVMEITPEIIGRHRFNTENHKVAAFPGDVEVRALIEGQFMAKRIHAEGLGYRVMSKTKILATGGASHNREILQVLADVFDAPVYVIDTANSACVGSAYRAFHGLAGGTDVPFSEVVKLAPNPRLAATPSPGASQVYEALLPQYAKLEQRILSQTRGPPE

SEQ ID NO: 152862 - DNA, 1611 bp, Artificial Sequence
  derived and/or modified sequence
atggccgagcacgcccccagaagatgctgcctgggctgggacttcagcacccagcaggtgaaggtggtggccgtggacgccgagctgaacgtgttctacgaggagagcgtgcacttcgacagagacctgcccgagttcggcacccagggcggcgtgcacgtgcacaaggacggcctgaccgtgaccagccccgtgctgatgtgggtgcaggccctggacatcatcctggagaagatgaaggccagcggcttcgacttcagccaggtgctggccctgagcggcgccggccagcagcacggcagcatctactggaaggccggcgcccagcaggccctgaccagcctgagccccgacctgagactgcaccagcagctgcaggactgcttcagcatcagcgactgccccgtgtggatggacagcagcaccaccgcccagtgcagacagctggaggccgccgtgggcggcgcccaggccctgagctgcctgaccggcagcagagcctacgagagattcaccggcaaccagatcgccaagatctaccagcagaaccccgaggcctacagccacaccgagagaatcagcctggtgagcagcttcgccgccagcctgttcctgggcagctacagccccatcgactacagcgacggcagcggcatgaacctgctgcagatccaggacaaggtgtggagccaggcctgcctgggcgcctgcgccccccacctggaggagaagctgagcccccccgtgcccagctgcagcgtggtgggcgccatcagcagctactacgtgcagagatacggcttcccccccggctgcaaggtggtggccttcaccggcgacaaccccgccagcctggccggcatgagactggaggagggcgacatcgccgtgagcctgggcaccagcgacaccctgttcctgtggctgcaggagcccatgcccgccctggagggccacatcttctgcaaccccgtggacagccagcactacatggccctgctgtgcttcaagaacggcagcctgatgagagagaagatcagaaacgagagcgtgagcagaagctggagcgacttcagcaaggccctgcagagcaccgagatgggcaacggcggcaacctgggcttctacttcgacgtgatggagatcacccccgagatcatcggcagacacagattcaacaccgagaaccacaaggtggccgccttccccggcgacgtggaggtgagagccctgatcgagggccagttcatggccaagagaatccacgccgagggcctgggctacagagtgatgagcaagaccaagatcctggccaccggcggcgccagccacaacagagagatcctgcaggtgctggccgacgtgttcgacgcccccgtgtacgtgatcgacaccgccaacagcgcctgcgtgggcagcgcctacagagccttccacggcctggccggcggcaccgacgtgcccttcagcgaggtggtgaagctggcccccaaccccagactggccgccacccccagccccggcgccagccaggtgtacgaggccctgctgccccagtacgccaagctggagcagagaatcctgagccagaccagaggcccccccgagtag

SEQ ID NO: 152863 - DNA, 1611 bp, Artificial Sequence
  derived and/or modified sequence
atggccgagcacgccccccgcaggtgttgcttgggttgggacttctcgacccagcaggtcaaggtggtggctgtggatgcagaactgaacgttttttatgaggagagcgtccacttcgatcgggatctacccgaattcggaacccagggaggcgtgcacgtgcataaagatgggttaacagtcacctctcccgtcttgatgtgggtgcaggcgttggatattatactggaaaagatgaaagccagcggcttcgatttcagccaggtgctcgccctctctggcgccgggcagcaacatgggtccatttattggaaggctggcgcccagcaagctctgacaagcctgtcgcccgatctcaggttgcaccagcaactgcaggactgctttagtatatcggactgcccagtatggatggattcatcaaccaccgcgcaatgcaggcagctcgaagctgcggtgggaggggcgcaggctctcagttgtctcacaggttcgagggcatatgagagattcactgggaatcaaatagcaaaaatatatcaacagaacccagaagcttactctcacactgaaaggatctcacttgtatctagctttgctgcttctctgttcctcggttcctacagtccaatagactattctgacggctcaggaatgaatctactgcagatccaagacaaggtgtggtcacaggcatgtctaggcgcttgtgctcctcatctggaagaaaagctcagccctcccgtcccatcttgttcggtggtgggcgctatcagctcgtactatgtgcagcgttacggattccctcccggctgtaaggtcgtagcgtttactggagataatccagcttcactcgcaggcatgcgtctggaggaaggggacatcgctgtatccttggggacaagcgatactctgtttctgtggctgcaggaaccaatgcccgcgctggagggccacatcttttgcaaccctgttgattcgcagcactacatggcgctactctgctttaagaacgggagcttgatgagagaaaagatccgaaatgagtccgtttccagaagttggtcagatttcagtaaagctctgcagtctactgagatgggtaatggaggtaatttaggcttttatttcgacgttatggagataaccccagagataattggcaggcatcggttcaatactgaaaaccacaaggtagcggccttccccggggacgtggaagtccgggccctcatagaagggcaatttatggcaaaaagaatccacgctgaaggcctaggttatagggttatgtccaagaccaagatactagccacaggtggggctagtcacaaccgggagatcttacaagttctcgccgacgtgtttgacgccccggtctacgtcatagacacagcgaactccgcttgcgtgggctcagcctaccgtgctttccatggtctggctggcgggacagatgttcctttctccgaggtggtcaagctggcccccaacccaagattggccgctacccccagcccaggcgctagccaggtctatgaagcgctcctgccccaatatgctaagctagaacagcgcatcctgtcccagaccaggggtccccccgaatag

SEQ ID NO: 152864 - DNA, 1611 bp, Artificial Sequence
  derived and/or modified sequence
atggccgagcacgccccccggcgctgctgcctgggctgggacttcagcacccagcaggtgaaggtggtggccgtggatgctgagctgaatgtgttctatgaggagagcgtgcactttgaccgggacctgcctgagtttggcacccagggcggcgtgcacgtgcacaaggatggcctgactgtgaccagccctgtgctgatgtgggtgcaggccctggacatcatcctggagaagatgaaggccagcggctttgacttcagccaggtgctggccctgtctggagctggccagcagcacggcagcatctactggaaggccggggcccagcaggccctgaccagcctgagcccagacctgcggctgcaccagcagctgcaggactgcttcagcatcagtgactgccctgtgtggatggacagcagcaccacagcccagtgccggcagctggaggccgctgtgggcggggcccaggccctgagctgcctgaccggcagccgggcctatgagcgcttcaccggcaaccagatcgccaagatctaccagcagaaccctgaggcctacagccacacagagcgcatcagcctggtgagcagctttgctgccagcctcttcctgggcagctacagccccatcgactacagtgatggcagcggcatgaacctgctgcagatccaggacaaggtgtggagccaggcctgcctgggcgcctgtgccccccacctggaggagaagctgagcccccctgtgcccagctgcagcgtggtgggcgccatcagcagctactacgtgcagagatatggcttccccccaggctgcaaggtggtggccttcaccggggacaacccagccagcctggccggcatgaggctggaggagggggacattgctgtgtccctgggcaccagtgacaccctcttcctgtggctgcaggagcccatgcctgccctggagggccacatcttctgcaaccctgtggacagccagcactacatggccctgctgtgcttcaagaatggcagcctgatgagggagaagatcagaaatgaatctgtgagccgctcctggagcgacttcagcaaggccctgcagagcacagagatgggaaatggaggcaacctgggcttctactttgatgtgatggagatcaccccagagatcatcggccgccaccgcttcaacacagagaaccacaaggtggccgccttccctggagatgtggaggtgcgggccctgattgagggccagttcatggccaagagaattcatgctgagggcctgggctacagagtgatgagcaagaccaagatcctggccactggaggagccagccacaaccgggagatcctgcaggtgctggctgatgtgtttgatgcccctgtgtatgtgattgacacagccaacagcgcctgtgtgggcagcgcctaccgggccttccacggcctggccggcggcacagatgtgcccttcagcgaggtggtgaagctggcccccaacccccggctggccgccacccccagccctggggccagccaggtgtatgaggccctgctgccccagtatgccaagctggagcagaggatcctgagccagacccggggccccccagagtag

SEQ ID NO: 152865 - DNA, 1611 bp, Artificial Sequence
  derived and/or modified sequence
atggccgagcacgccccccggcggtgctgcctgggctgggacttctctacacagcaggtgaaagtcgtggcagtcgatgcagagttgaatgtgttttacgaagagagtgtgcattttgaccgtgacttgccagaattcggcacccaaggaggtgtgcacgtgcacaaggacgggctaacagtaacatcccctgtcctgatgtgggtccaggctcttgatataatcctggagaagatgaaggcttctggcttcgatttctcgcaggtgctagcactcagtggagctggtcagcagcacgggtctatttactggaaggctggcgctcagcaagctttaacttctctgtctcctgacctacgcctccaccagcagctgcaggattgcttcagtattagtgactgcccagtatggatggattcatctacaacagcgcagtgcagacagctcgaagccgccgtcggcggggcccaggctctctcttgtttaaccggcagccgggcttacgaaagattcactggcaatcagatcgccaagatatatcagcagaatcctgaggcctactcccatacagagaggatctctctggtgtccagctttgcggcttctctatttcttggatcctacagtcctatcgattattccgatgggtctggcatgaacctgctgcagatccaggacaaggtgtggtcccaagcctgtctcggcgcttgcgctccccatctagaagaaaagctcagccctcctgttccaagctgttccgtcgtgggggccatctcttcctattatgtccagaggtacggtttccctcctggttgcaaagtcgtggctttcacaggcgataatcctgccagtctggccggcatgaggcttgaggagggagatatagctgtttccctagggacgtctgatacactgtttttgtggctccaggagcccatgcctgcactcgagggacacattttctgtaatcccgttgatagtcagcattacatggctctgctgtgtttcaaaaatggatctctgatgcgcgagaagatcaggaatgaaagcgtcagccgaagttggtctgacttcagtaaggcactgcagagtaccgagatggggaacggaggaaatctgggcttctattttgacgtgatggaaattaccccagagatcattggcaggcataggttcaataccgaaaaccataaggttgcagccttccccggagacgtcgaagtgagggctctgattgagggccagttcatggcgaagcgcatccacgctgagggcctcggttaccgcgtgatgagcaaaacaaagatcctggccactggtggagcctctcacaaccgggaaatcctccaggtgctggcggacgtatttgatgcccccgtgtacgtgatcgacactgccaattccgcttgcgtgggctcggcatacagagccttccacggactcgcaggcggaacagatgtgcctttctctgaagtcgtgaagctggcccccaacccccgcctagccgcgactccctctcccggcgcctcccaggtgtacgaagctctattgccccagtacgccaaactggagcagcgaattctcagccagaccagagggcctcccgagtag

SEQ ID NO: 152866 - DNA, 1611 bp, Artificial Sequence
  derived and/or modified sequence
atggctgaacatgcccctcgccgttgttgtctgggctgggacttttcgacccaacaggtaaaagtcgtcgccgtggatgccgaactgaacgttttctacgaagaaagcgttcatttcgacagggacctccccgagtttggaacacaggggggtgtacatgtccacaaggatgggctgacagttacaagccccgtactgatgtgggtgcaagctctggatataattcttgaaaaaatgaaggccagcggttttgatttttcccaagttctcgccctgtcaggtgcgggtcagcaacacggcagcatatactggaaggcgggagcacagcaagctctcacaagccttagccctgatctgcggttacaccagcagttgcaggactgtttcagcatttcagattgcccagtctggatggatagtagcacgaccgcccaatgtcgacagctcgaggctgcggtgggaggcgctcaagcactgagctgtctgaccggctcccgggcatacgaacgtttcacaggtaatcaaattgcgaaaatttatcaacagaatcccgaggcctactcccatacagagagaatcagcctcgtttctagttttgccgctagccttttcctgggaagctactcccccattgactatagcgatggatccgggatgaacctactgcagatccaagataaagtttggagccaagcttgcctgggtgcttgtgcccctcacctcgaggaaaagctctcgcctccagttcccagctgttccgttgtcggagcaatttcatcctactacgtgcagcgttacgggtttcctcccggatgtaaagtagtggcatttacaggtgacaacccagctagtctggcagggatgcggttggaggagggagacattgctgtgagtttagggacatcagacaccctgtttctgtggttacaggaaccaatgcccgctttggaggggcacatcttttgtaacccggtggactctcagcattacatggccttgctttgctttaagaatgggtcattgatgagggagaagatccggaacgagagtgtaagccgttcctggtctgactttagcaaagccttgcagtccacggagatgggtaatggaggaaatctggggttttatttcgacgttatggaaataaccccggaaattatagggaggcatcggtttaataccgaaaaccacaaagtggccgcattccctggggacgtggaggtccgagccttaattgaaggtcagtttatggcaaagaggatccacgctgaaggactgggttaccgcgtaatgagcaagactaagattctggcgacggggggagcctcacacaatcgcgaaattctacaagttctggccgatgttttcgacgccccagtgtacgtgatcgataccgcgaattcagcctgtgtcggatcggcctacagggcctttcacgggctggctggcggaactgacgtccccttcagtgaagtcgtcaaacttgctcccaatcccagacttgcagccaccccgagccctggagcttcacaggtatacgaggctcttctgccccagtacgcaaagctcgagcagagaatcctctcccagaccagaggccctcccgagtag

SEQ ID NO: 152867 - DNA, 1200 bp, Artificial Sequence
  derived and/or modified sequence
atggacagcagcaccaccgcccagtgcagacagctggaggccgccgtgggcggcgcccaggccctgagctgcctgaccggcagcagagcctacgagagattcaccggcaaccagatcgccaagatctaccagcagaaccccgaggcctacagccacaccgagagaatcagcctggtgagcagcttcgccgccagcctgttcctgggcagctacagccccatcgactacagcgacggcagcggcatgaacctgctgcagatccaggacaaggtgtggagccaggcctgcctgggcgcctgcgccccccacctggaggagaagctgagcccccccgtgcccagctgcagcgtggtgggcgccatcagcagctactacgtgcagagatacggcttcccccccggctgcaaggtggtggccttcaccggcgacaaccccgccagcctggccggcatgagactggaggagggcgacatcgccgtgagcctgggcaccagcgacaccctgttcctgtggctgcaggagcccatgcccgccctggagggccacatcttctgcaaccccgtggacagccagcactacatggccctgctgtgcttcaagaacggcagcctgatgagagagaagatcagaaacgagagcgtgagcagaagctggagcgacttcagcaaggccctgcagagcaccgagatgggcaacggcggcaacctgggcttctacttcgacgtgatggagatcacccccgagatcatcggcagacacagattcaacaccgagaaccacaaggtggccgccttccccggcgacgtggaggtgagagccctgatcgagggccagttcatggccaagagaatccacgccgagggcctgggctacagagtgatgagcaagaccaagatcctggccaccggcggcgccagccacaacagagagatcctgcaggtgctggccgacgtgttcgacgcccccgtgtacgtgatcgacaccgccaacagcgcctgcgtgggcagcgcctacagagccttccacggcctggccggcggcaccgacgtgcccttcagcgaggtggtgaagctggcccccaaccccagactggccgccacccccagccccggcgccagccaggtgtacgaggccctgctgccccagtacgccaagctggagcagagaatcctgagccagaccagaggcccccccgagtag

SEQ ID NO: 152868 - DNA, 1200 bp, Artificial Sequence
  derived and/or modified sequence
atggatagcagcacaacggcccagtgtcggcagttggaggccgcggttggaggcgcccaggctctatcatgtctgacgggcagccgggcctatgagagatttaccggcaaccagatcgctaagatttatcaacagaatcctgaggcatatagtcacaccgaaagaatctccttggtttcctccttcgctgctagcctattcctcggaagttatagtcctatcgattactccgatggatcaggaatgaacctcctgcagatccaggacaaggtatggtctcaggcatgcctcggcgcatgtgcacctcatcttgaagagaaactgagtccccctgtccctagttgctctgtcgtcggcgccatctcatcttactacgtgcagagatatggcttccctcccgggtgcaaggttgttgcattcaccggggacaacccagcttccctggctggtatgcgactggaagaaggagatattgctgtgtcactgggtactagcgacaccctgtttctgtggttgcaagagccaatgcccgccttggagggacatatcttttgtaaccccgtagattctcaacactatatggctctgctctgtttcaaaaacggttcacttatgcgtgagaaaatccgcaacgagtcggttagcagatcctggtctgacttttccaaagctttacaatccacagagatgggaaatgggggcaacctgggattttatttcgatgttatggagattacaccagaaatcatcgggcggcataggttcaacaccgagaatcacaaggtggctgctttccctggcgacgtggaggtgcgcgcactgatcgagggacaatttatggccaagaggatacatgccgagggtctcgggtatagggttatgtcaaagaccaagatactcgcaaccggcggcgctagccacaatagggaaattttgcaggtgctggcggacgtgtttgatgctcctgtttatgtcatagatactgctaattctgcctgcgtgggtagcgcctacagggcattccacggtctggccggcggcaccgatgtgccttttagtgaagttgtaaagctagccccaaacccccggctggcggccaccccttctcccggagcctctcaggtgtatgaagccctactaccgcagtacgcgaagctcgagcagagaatcctcagtcagactcgtggacctcccgaatag

SEQ ID NO: 152869 - DNA, 1200 bp, Artificial Sequence
  derived and/or modified sequence
atggacagcagcaccacagcccagtgccggcagctggaggccgctgtgggcggggcccaggccctgagctgcctgaccggcagccgggcctatgagcgcttcaccggcaaccagatcgccaagatctaccagcagaaccctgaggcctacagccacacagagcgcatcagcctggtgtcctcctttgctgccagcctcttcctgggcagctacagccccatcgactacagtgatggcagcggcatgaacctgctgcagatccaggacaaggtgtggagccaggcctgcctgggcgcctgtgccccccacctggaggagaagctgagcccccctgtgcccagctgcagcgtggtgggcgccatcagcagctactacgtgcagagatatggcttccccccaggctgcaaggtggtggccttcaccggggacaacccagccagcctggccggcatgaggctggaggagggggacattgctgtgtccctgggcaccagtgacaccctcttcctgtggctgcaggagcccatgcctgccctggagggccacatcttctgcaaccctgtggacagccagcactacatggccctgctgtgcttcaagaatggcagcctgatgagggagaagatcagaaatgaatctgtgagccgctcctggagcgacttcagcaaggccctgcagagcacagagatgggaaatggaggcaacctgggcttctactttgatgtgatggagatcaccccagagatcatcggccgccaccgcttcaacacagagaaccacaaggtggccgccttccctggagatgtggaggtgcgggccctgattgagggccagttcatggccaagagaattcatgctgagggcctgggctacagagtgatgagcaagaccaagatcctggccaccggcggggccagccacaaccgggagatcctgcaggtgctggctgatgtgtttgatgcccctgtgtatgtgattgacacagccaacagcgcctgtgtgggcagcgcctaccgggccttccacggcctggccggcggcacagatgtgcccttcagcgaggtggtgaagctggcccccaacccccggctggccgccacccccagccctggggccagccaggtgtatgaggccctgctgccccagtatgccaagctggagcagaggatcctgagccagacccggggccccccagagtag

SEQ ID NO: 152870 - DNA, 1200 bp, Artificial Sequence
  derived and/or modified sequence
atggacagcagcaccaccgcccagtgccggcagctggaggccgccgttggcggggcccaggcactttcctgcttgacggggtcacgcgcctacgaacgctttacgggtaaccaaatagccaagatctaccagcagaatccagaagcctattctcatacagagaggattagccttgtgtccagtttcgccgctagtttgttcttgggctcatactcccctattgattactctgacggatccggcatgaatctactgcagattcaagacaaggtgtggtcccaagcctgtctgggcgcctgtgcaccccacctggaagagaaactgagcccccccgttccctcttgttccgtcgtcggtgccatcagcagttactatgtccaaagatacggcttcccaccggggtgtaaagtggtcgccttcaccggggataaccccgcatctctcgccggcatgcgcctagaggaaggcgatatcgcagtcagcctgggtacctcagatacacttttcctctggcttcaggagcccatgccagccttggaagggcatatattttgtaaccctgttgatagtcaacattatatggctctcctatgttttaagaacggtagtcttatgcgagagaagatccggaatgaaagtgttagtagaagctggagcgacttctccaaggcactccaatccaccgaaatggggaacggcggtaacctgggtttttactttgacgtaatggagatcacgcctgagattatcggcaggcatcgcttcaacaccgagaaccataaagtcgcagcctttccaggcgacgtagaggtgcgcgcgctcatagaaggccagtttatggctaagagaattcacgccgaagggctcggatatcgggtgatgtctaagacgaagatattggccacaggcggcgccagtcataacagagagatactccaggtgcttgctgacgtgttcgatgctccagtatacgtgatcgacacagctaattccgcttgcgtggggtcagcgtaccgagccttccacggcctagctggaggcacagatgtccccttcagtgaagttgtgaaactcgccccaaatccaaggcttgccgcaaccccgtccccaggcgctagccaggtgtatgaagctctgctgccacagtacgcgaaactcgaacagcgcatcctcagccagaccaggggaccgccggagtag

SEQ ID NO: 152871 - DNA, 1200 bp, Artificial Sequence
  derived and/or modified sequence
atggacagttcaactactgcacagtgcagacaactggaggctgccgtcggaggggctcaagctctctcttgtctgaccgggagtcgcgcttatgaacggttcacaggaaaccaaatcgccaagatttatcaacagaatccagaggcctacagtcacactgaacggatctctctggtgagtagttttgccgcatctttatttcttggctcttacagccctattgattatagcgacgggtccgggatgaacctgctgcagatccaggacaaggtctggtcccaagcctgcctgggagcctgcgccccacatctagaagaaaaactctcaccgcctgtccctagttgctccgtggtgggggcaatttctagctactacgtgcagagatatggctttccccctgggtgtaaagtggttgcattcaccggagacaatccagcgagtctggccggtatgaggttggaggaaggggatatcgctgtttctcttggtacctccgataccctgttcctgtggctgcaagagccgatgcccgcactggaaggacatattttttgcaatccagtggactcccaacattacatggcactgctatgcttcaagaatggcagcctcatgcgcgagaaaattaggaacgaaagcgttagtcgttcgtggagcgactttagcaaggccctgcagtcaacagagatggggaatggagggaatctaggcttctatttcgatgtgatggagattacaccagagattatcggccgtcacaggttcaacaccgaaaatcataaggtcgcagcctttcctggggatgtggaggtccgcgcactgatcgaggggcagtttatggctaaacgtattcacgcagaaggactgggataccgcgttatgtcaaagaccaagattttggccacaggcggagcttcccacaacagggagatcttgcaggtgctagcagatgtgttcgatgcaccagtgtacgtgattgatacggcgaattccgcttgtgtgggcagtgcatatcgcgcatttcatggactggccggaggaacagatgtgcccttctctgaggtcgtgaagctggcgcctaacccgcgattggccgcaacaccttcgccaggggcttctcaagtatatgaggcgcttctgcctcagtacgcgaagctcgagcagaggatattgagccaaactcggggacctccagaatag

SEQ ID NO: 152872 - DNA, 3664 bp, Artificial Sequence
  derived and/or modified sequence
ccctgcgtctctgggcgctggagcgcggcgactatcacgccgcgtggcggacggacggactgacggacgcgcagccttacccgaaaggccatggcggagcacgcccctcgccgctgctgcctgggctgggacttcagcacgcagcaggtaaaggttgttgctgttgatgcagagttgaatgtcttctatgaggaaagtgtgcattttgacagagatcttccagaatttgggactcagggtggtgttcatgtgcacaaggatgggctgacggtcacttctccagtactaatgtgggtccaggcactggatatcatcttggagaagatgaaggcttcgggcttcgacttctctcaagtcctagccttgtccggggcgggccagcaacacggaagtatatactggaaggctggagcccagcaggcactgacaagcttatcaccagacctccggctacaccagcagctgcaggactgtttctccatcagcgactgcccggtgtggatggactccagcaccacagcccagtgccgccagctggaggctgctgtgggtggtgctcaggctctcagctgcctcacggggtcccgtgcctatgagcgttttacagggaaccaaattgcaaaaatttaccagcagaaccccgaggcctactcacatacggagagaatttctttggtcagtagctttgctgcttccctgttccttggctcttactcccctattgactacagtgatggttctggaatgaatttgttgcagatacaggataaagtctggtcccaggcttgccttggtgcctgtgcacctcatttagaggagaagcttagcccaccagtaccatcatgctcagttgtgggagccatttcttcctactacgtccagcgctacggatttcctccaggatgcaaagtggtggccttcactggggacaacccagcgtcgctggcaggcatgagactggaggaaggtgacattgcggtcagcctgggcaccagtgacaccctgtttctctggctccaagagcccatgcctgccctggaaggccacatcttctgcaacccggttgactcccagcactacatggcactcctgtgctttaaaaatggctccctcatgagagagaagatccgcaacgagtctgtatcccgttcctggagcgatttctctaaggcactgcagtccacagagatgggcaacggtggaaacctgggtttttattttgatgtaatggagatcacccctgaaattattggacgtcataggtttaacacagaaaaccacaaggttgcagcattccctggggatgtggaggttcgagcactaattgaaggacaattcatggccaagaggattcacgcagaaggcctgggctatcgagtcatgtccaagacaaagattttggccacaggaggagcatctcacaatagagaaatcttacaggtgcttgcagatgtgtttgatgccccggtgtatgttatagacactgccaactcggcctgtgtgggttctgcataccgagcttttcatggtcttgcaggtggaacagatgtgcccttttcagaggttgtgaagttagctccaaatcccagactagctgctaccccaagcccgggagcttctcaggtctacgaggcccttctcccccagtatgccaaactcgagcagagaatcttgtctcagacccgggggcctccggagtgaacaggcatccctgttgcccctgcctgcccagatttactgaccccatttgtcgacatggccccagacaggagggatccacttctctgttctgaacagctcttcctgcccctactgactccttggagtgtccaggaccatcttaaagccgccctcagcacatctgcatgaagatagataggcactcctgtccctgtgcccgtgtgccccagggcaggaaagcatctctcttttcctgtcttttatcccaggaggcaggacaacactgagactgggatatgtccaataaaaactatgacttttccccttgcagaggcagaattaaagctaatctagggactcaaatcagcagaatgggggagacaaagcccggtctcaccccctaacctcatcctatctctttctccaaccctgactgcccactcctccacaaaccgtgacccatagccgcccccaccccataccttgatctaccatccatcctcttccccaatccaaaccccacagtctcttctctcccacaccctgccctccttgtttcagctgtctgaggtgcctcgcagggcctctcttacttgccccatgctcaccctttccatgctgtccccattctctcctttcaccatctctcctctccccctccttcatctctcctccctccccaaactcacttggcataattcacaacctcccacccaaacaatgggcctggtggacgtgcttcctgtgccctccctttagctatgcccacagatcactgagagggaccatctcccaagtggtgcagtttagaacttctctccctttttctccctcattccctctctcttcttgcagtccacttgctgaagaagttgtgtcatttctctggaagaatttccaaaattctggatttcttttttattttggagtatttcatcagctgaaaagtgattctcactttgagttttcttcctatatttgtatagtgagttcctttttccttcctctttatccctcctgttttactttatacctctctattccttgctcaaattattgcaaaagcctctatagaaagtcctctgtgatctgactcctgcagactcttccagatttttctgcccaaggcctttactgagctcaggactccagctaaatcaaaatacgcatgttctcacccagagtgacaaaatcctgcagataggtttaagacctagtggctcagagcagtagctactgggaagttaaaaggaaggggcttagaaaatgaatgggaccaaaggcatcacttctgatggagatgaagccatcttgaaagtgagtggtgtcctttggaggcatggtggatgaaaggcgcaaaggaagcaagaggttaaagataatggcccattagatacaacagcaagcccaagattccgaagaagacagacaactccccctagtaccacctagacattactttttaaagacattttacattattgtccagcagaaaaaggctgtcttggaccatgaaacagtaaactgtaactaaacacttcaacatgaatttgaaaataaataattgtggatataaaagaacaccagagatcagaaattcaaaaactcagaataaaaatgaaaaagctacaagcatatatgagaagagaactgactgaacttgggaaataatttgaacaaaaagataaatcttcacagatatgaatactaaattatatcttaatgaaaatagatatggtcacaagtacattaaggcacgtagaaggtaggagtaagaaaagctaagagaagcaaaacaaacaaagcaatattaaaggaagagccaaaaagacccagaaataaaatgacagataaagaagattgtcaaagaaaagatgatacaggtaagattggaactcatgaagacaaaagataagacagtggcatagagttaatatttaaaattcaaatattaaaactcaaataaaccccaaagaacttttgg

SEQ ID NO: 152873 - DNA, 1737 bp, Artificial Sequence
  derived and/or modified sequence
ttacccgaaaggccatggcggagcacgcccctcgccgctgctgcctgggctgggacttcagcacgcagcaggtaaaggttgttgctgttgatgcagagttgaatgtcttctatgaggaaagtgtgcattttgacagagatcttccagaatttggcaacacggaagtatatactggaaggctggagcccagcaggcactgacaagcttatcaccagacctccggctacaccagcagctgcaggactgtttctccatcagcgactgcccggtgtggatggactccagcaccacagcccagtgccgccagctggaggctgctgtgggtggtgctcaggctctcagctgcctcacggggtcccgtgcctatgagcgttttacagggaaccaaattgcaaaaatttaccagcagaaccccgaggcctactcacatacggagagaatttctttggtcagtagctttgctgcttccctgttccttggctcttactcccctattgactacagtgatggttctggaatgaatttgttgcagatacaggataaagtctggtcccaggcttgccttggtgcctgtgcacctcatttagaggagaagcttagcccaccagtaccatcatgctcagttgtgggagccatttcttcctactacgtccagcgctacggatttcctccaggatgcaaagtggtggccttcactggggacaacccagcgtcgctggcaggcatgagactggaggaaggtgacattgcggtcagcctgggcaccagtgacaccctgtttctctggctccaagagcccatgcctgccctggaaggccacatcttctgcaacccggttgactcccagcactacatggcactcctgtgctttaaaaatggctccctcatgagagagaagatccgcaacgagtctgtatcccgttcctggagcgatttctctaaggcactgcagtccacagagatgggcaacggtggaaacctgggtttttattttgatgtaatggagatcacccctgaaattattggacgtcataggtttaacacagaaaaccacaaggttgcagcattccctggggatgtggaggttcgagcactaattgaaggacaattcatggccaagaggattcacgcagaaggcctgggctatcgagtcatgtccaagacaaagattttggccacaggaggagcatctcacaatagagaaatcttacaggtgcttgcagatgtgtttgatgccccggtgtatgttatagacactgccaactcggcctgtgtgggttctgcataccgagcttttcatggtcttgcaggtggaacagatgtgcccttttcagaggttgtgaagttagctccaaatcccagactagctgctaccccaagcccgggagcttctcaggtctacgaggcccttctcccccagtatgccaaactcgagcagagaatcttgtctcagacccgggggcctccggagtgaacaggcatccctgttgcccctgcctgcccagatttactgaccccatttgtcgacatggccccagacaggagggatccacttctctgttctgaacagctcttcctgcccctactgactccttggagtgtccaggaccatcttaaagccgccctcagcacatctgcatgaagatagataggcactcctgtccctgtgcccgtgtgccccagggcaggaaagcatctctcttttcctgtcttttatcccaggaggcaggacaacac

SEQ ID NO: 152874 - protein, 527 aa, Artificial Sequence
  derived and/or modified sequence
MSEDSSALPWSINRDDYELQEVIGSGATAVVQAAYCAPKKEKVAIKRINLEKCQTSMDELLKEIQAMSQCHHPNIVSYYTSFVVKDELWLVMKLLSGGSVLDIIKHIVAKGEHKSGVLDESTIATILREVLEGLEYLHKNGQIHRDVKAGNILLGEDGSVQIADFGVSAFLATGGDITRNKVRKTFVGTPCWMAPEVMEQVRGYDFKADIWSFGITAIELATGAAPYHKYPPMKVLMLTLQNDPPSLETGVQDKEMLKKYGKSFRKMISLCLQKDPEKRPTAAELLRHKFFQKAKNKEFLQEKTLQRAPTISERAKKVRRVPGSSGRLHKTEDGGWEWSDDEFDEESEEGKAAISQLRSPRVKESISNSELFPTTDPVGTLLQVPEQISAHLPQPAGQIATQPTQVSLPPTAEPAKTAQALSSGSGSQETKIPISLVLRLRNSKKELNDIRFEFTPGRDTAEGVSQELISAGLVDGRDLVIVAANLQKIVEEPQSNRSVTFKLASGVEGSDIPDDGKLIGFAQLSIS

SEQ ID NO: 152875 - DNA, 1584 bp, Artificial Sequence
  derived and/or modified sequence
atgagcgaggacagcagcgccctgccctggagcatcaacagagacgactacgagctgcaggaggtgatcggcagcggcgccaccgccgtggtgcaggccgcctactgcgcccccaagaaggagaaggtggccatcaagagaatcaacctggagaagtgccagaccagcatggacgagctgctgaaggagatccaggccatgagccagtgccaccaccccaacatcgtgagctactacaccagcttcgtggtgaaggacgagctgtggctggtgatgaagctgctgagcggcggcagcgtgctggacatcatcaagcacatcgtggccaagggcgagcacaagagcggcgtgctggacgagagcaccatcgccaccatcctgagagaggtgctggagggcctggagtacctgcacaagaacggccagatccacagagacgtgaaggccggcaacatcctgctgggcgaggacggcagcgtgcagatcgccgacttcggcgtgagcgccttcctggccaccggcggcgacatcaccagaaacaaggtgagaaagaccttcgtgggcaccccctgctggatggcccccgaggtgatggagcaggtgagaggctacgacttcaaggccgacatctggagcttcggcatcaccgccatcgagctggccaccggcgccgccccctaccacaagtacccccccatgaaggtgctgatgctgaccctgcagaacgacccccccagcctggagaccggcgtgcaggacaaggagatgctgaagaagtacggcaagagcttcagaaagatgatcagcctgtgcctgcagaaggaccccgagaagagacccaccgccgccgagctgctgagacacaagttcttccagaaggccaagaacaaggagttcctgcaggagaagaccctgcagagagcccccaccatcagcgagagagccaagaaggtgagaagagtgcccggcagcagcggcagactgcacaagaccgaggacggcggctgggagtggagcgacgacgagttcgacgaggagagcgaggagggcaaggccgccatcagccagctgagaagccccagagtgaaggagagcatcagcaacagcgagctgttccccaccaccgaccccgtgggcaccctgctgcaggtgcccgagcagatcagcgcccacctgccccagcccgccggccagatcgccacccagcccacccaggtgagcctgccccccaccgccgagcccgccaagaccgcccaggccctgagcagcggcagcggcagccaggagaccaagatccccatcagcctggtgctgagactgagaaacagcaagaaggagctgaacgacatcagattcgagttcacccccggcagagacaccgccgagggcgtgagccaggagctgatcagcgccggcctggtggacggcagagacctggtgatcgtggccgccaacctgcagaagatcgtggaggagccccagagcaacagaagcgtgaccttcaagctggccagcggcgtggagggcagcgacatccccgacgacggcaagctgatcggcttcgcccagctgagcatcagctag

SEQ ID NO: 152876 - DNA, 1584 bp, Artificial Sequence
  derived and/or modified sequence
atgagcgaagattcttccgccctcccatggtccattaaccgggacgattacgagctgcaagaggtgataggaagtggcgccactgccgtggttcaggctgcctattgcgcacccaagaaggaaaaagtggcaattaaacgcatcaacttggaaaagtgccaaacatccatggacgaactgcttaaggaaatccaggctatgtctcagtgtcaccacccaaatattgtctcttattacacctcctttgttgtgaaagacgagttgtggctcgtgatgaagcttctgtccggcggaagcgtcctcgatatcattaagcatatcgttgctaaaggcgagcataaaagtggtgtactggacgaaagtacaatagctaccatcctgcgtgaggtactggagggactcgagtacctgcacaagaacgggcaaattcatcgcgacgtgaaggccgggaatatcctacttggcgaggacggatccgtgcagatagcagactttggagtatccgcattccttgcgacagggggcgatattaccagaaacaaagtccgaaagacattcgtgggcacgccgtgctggatggccccagaggtcatggaacaagtcagggggtacgactttaaagccgatatttggagcttcggcatcacagctatagagctggctacaggcgcagccccctatcataaatatcctccaatgaaggtgctgatgctgacgttgcagaatgatcccccgtcactcgaaaccggcgttcaggataaagagatgcttaagaaatacggcaaatcctttcggaaaatgatcagtctgtgcctccaaaaagaccctgagaagcggcccacagccgccgagctcttaaggcacaagttcttccagaaggccaagaacaaggagttcctgcaggagaagacattgcagcgcgctcccacgataagcgagagagcaaagaaggtgcggcgcgtccctggtagtagtggacgcctccacaagactgaggacgggggatgggaatggtcggacgatgagtttgacgaagaatcagaagaaggaaaggccgcaatctcacagctgagaagtcctcgagtgaaggagtctatatctaatagcgaactcttccctacaacggatcccgtggggacactactgcaggtcccggagcagattagcgcacatctgccacagcctgcaggccaaattgcgactcagcctacccaggtatccttgcctccaacggccgagcccgcaaaaaccgcgcaggccttgtcctccgggtcaggcagtcaggagacgaaaattcctattagcttggtgctgagactcagaaactcgaagaaagaattgaatgatatccgcttcgagttcactcccggtcgcgacaccgctgagggggtttcccaggaattaatttccgcaggcctcgtggatggtcgcgatttggtcatcgttgcagccaatcttcagaaaatcgtcgaggagcctcaatcaaaccggtccgttacattcaaattggcctcaggggtggagggcagtgatattccagatgatgggaagctgatagggttcgcccagttgtcaatcagttag

SEQ ID NO: 152877 - DNA, 1584 bp, Artificial Sequence
  derived and/or modified sequence
atgtctgaggacagcagcgccctgccctggagcatcaacagagatgattatgagctgcaggaggtgattggcagcggggccacagctgtggtgcaggccgcctactgtgcccccaagaaggagaaggtggccatcaagaggatcaacctggagaagtgccagacctccatggatgagctgctgaaggagatccaggccatgagccagtgccaccaccccaacatcgtgtcctactacaccagctttgtggtgaaggatgagctgtggctggtgatgaagctgctgagcggcggctctgtgctggacatcatcaagcacatcgtggccaagggggagcacaagtctggagtgctggatgagagcaccatcgccaccatcctgcgggaggtgctggagggcctggagtacctgcacaagaatggccagatccacagagatgtgaaggccggcaacatcctgctgggggaggatggctctgtgcagattgctgactttggagtgtctgccttcctggccactggaggagacatcaccaggaacaaggtgaggaagacctttgtgggcaccccctgctggatggcccctgaggtgatggagcaggtgcggggctatgacttcaaggctgacatctggagctttggcatcacagccatcgagctggccaccggggccgccccctaccacaagtacccacccatgaaggtgctgatgctgaccctgcagaatgacccccccagcctggagactggagtgcaggacaaggagatgctgaagaagtatggcaagagcttcaggaagatgatcagcctgtgcctgcagaaggaccctgagaagaggcccacagctgctgagctgctgcggcacaagttcttccagaaggccaagaacaaggagttcctgcaggagaagaccctgcagagggcccccaccatcagcgagcgggccaagaaggtgagaagagtgcccggcagcagcggccgcctgcacaagacagaagatggcggctgggagtggagcgatgatgaatttgatgaggagagcgaggagggcaaggccgccatcagccagctgcggagcccccgggtgaaggagagcatcagcaacagcgagctgttccccaccacagatcctgtgggcaccctgctgcaggtgcctgagcagatcagcgcccacctgccccagcctgctggccagatcgccacccagcccacccaggtgtccctgcccccaacagctgagcccgccaagacagcccaggccctgagcagcggcagcggcagccaggagaccaagatccccatcagcctggtgctgcggctgaggaacagcaagaaggagctgaatgacatccgctttgagttcaccccaggccgggacacagctgagggcgtgtcccaggagctgatctctgctggcctggtggatggccgggacctggtgattgtggccgccaacctgcagaagatcgtggaggagccccagagcaacagatctgtgaccttcaagctggccagcggcgtggagggcagtgacatcccagatgatggcaagctgattggatttgcccagctgagcatctcctag

SEQ ID NO: 152878 - DNA, 1584 bp, Artificial Sequence
  derived and/or modified sequence
atgagcgaggacagcagcgccctgccctggagcatcaaccgggacgactacgagttgcaggaggtcatcggtagcggtgctaccgcggtggtacaggctgcatactgtgcacctaaaaaagagaaggtggccataaaaagaattaacctggagaagtgtcagacctccatggacgaacttttaaaagaaattcaggctatgagccagtgccaccaccctaacatagtgtcctattacacaagttttgtggtaaaagacgagttgtggcttgttatgaagctgttgagtggaggttcggtgctagatatcattaaacacatcgtcgcaaagggcgaacacaagagcggcgtgcttgatgagtctaccattgccacgatcctgcgtgaagtgctagagggcctggagtatctgcataagaacggtcagattcaccgcgatgtgaaagcagggaacattttacttggcgaggatggcagcgttcagatcgccgacttcggcgtgagtgcctttttagccaccgggggagacatcactcggaacaaagtacggaaaacgttcgtgggcactccatgttggatggctccagaagtgatggagcaggtgcggggatacgatttcaaggctgatatctggtctttcgggatcacagccattgagcttgcgacaggagccgcaccctaccacaaatatcctccaatgaaggtgttgatgctgacgcttcagaatgaccctcctagcctcgagacaggcgttcaggacaaggagatgctaaaaaagtatggcaagagtttcaggaaaatgatcagcttatgtctgcagaaggacccagaaaagcggccaactgccgcagagctgctgaggcacaagttttttcagaaagccaaaaacaaggagtttctacaggaaaagacattgcagcgagctccaacaatctccgagcgcgccaaaaaggtgcgtagggtccctggcagttcaggtaggctgcataagacggaagacggagggtgggaatggtcggacgatgagtttgacgaagagtccgaggagggcaaagcggcgatttctcagctcaggagcccacgcgtcaaagagtcgataagcaattcggagctgtttccaacaacggatccggttggaaccctactgcaagtgcctgagcagatctctgcgcatttaccgcaacccgcggggcagatcgccacacaaccgacgcaggtatcattgcctccaaccgctgaacccgctaagacagcccaagcgttatctagtggctctggcagccaggaaaccaaaatccccatttctctggtccttcggctacgaaacagtaaaaaagagctcaacgacatccgttttgagttcacaccagggcgggatactgcagagggagtgagccaggagctcatctccgcagggctagtggatggaagggacctggtgatcgtcgcagctaacttacagaagatcgttgaagagcctcagtctaatcgctcagttacctttaagctggctagcggagtggagggctcagacatcccagatgacggcaagctgataggcttcgcgcagctgtcaataagctag

SEQ ID NO: 152879 - DNA, 4553 bp, Artificial Sequence
  derived and/or modified sequence
gtgtcggcaggtggaggaagaggggaaagtttggcccgtgcgtggggctggggtggagggcgggacagaggggctgggcccaggcaaagcttctgtcgctgctgctgcggaggccgaggacaggacgtgggctgggccgggcagtgccggactcggaggagcaggaggcgaggtccgccggagctctgagcccccgctgctctgccgcgcggtgaccccgcgccccggcgccgtccgacccgtggctgttccgagacgattggtgggggcgcggcggcggcggcggcggctgttgggggtggggagacgcgcggcgaggagacgagcgaggtcagcgagtttgagggaggaccgcgagccgctgccgccgtcatgtccgaggactcgagcgccctgccctggtccatcaacagggacgattacgagctgcaggaggtgatcgggagtggagcaactgctgtagtccaagcagcttattgtgcccctaaaaaggagaaagtggcaatcaaacggataaaccttgagaaatgtcaaactagcatggatgaactcctgaaagaaattcaagccatgagtcaatgccatcatcctaatattgtatcttactacacatcttttgtggtaaaagatgagctgtggcttgtcatgaagctgctaagtggaggttctgttctggatattattaagcacattgtggcaaaaggggaacacaaaagtggagtcctagatgaatctaccattgctacgatactccgagaagtactggaagggctggaatatctgcataaaaatggacagatccacagagatgtgaaagctggaaacattcttcttggagaagatggctcagtacagattgcagactttggggttagtgcttttttagcaactggtggtgatattacccgaaataaagtgagaaagacctttgttggcaccccttgttggatggcacctgaagttatggaacaggtccgtggttatgatttcaaagctgatatttggagttttggaattacagcaattgaattggctacaggggcggctccttatcataaatatccaccaatgaaggttttaatgctgacactgcagaacgatcctccttctttggaaactggtgttcaagataaagaaatgctgaaaaaatatggaaaatcatttagaaaaatgatttcattgtgccttcaaaaagatccagaaaaaagaccaacagcagcagaactattaaggcacaaatttttccagaaagcaaagaataaagaatttcttcaagaaaaaacattgcagagagcaccaaccatttctgaaagagcaaaaaaggttcggagagtaccaggttccagtgggcgtcttcataagacagaggatggaggctgggagtggagtgatgatgaatttgatgaagaaagtgaggaagggaaagcagcaatttcacaactcaggtctccccgagtgaaagaatcaatatcaaattctgagctctttccaacaactgatcctgtgggtactttgctccaagttccagaacagatctctgctcatctacctcagccagctgggcagattgctacacagccaactcaagtctctctcccacccaccgcagagccagcaaaaacagctcaggctttgtcttcaggatcaggttcacaagaaaccaagatcccaatcagtctagtactaagattaaggaattccaaaaaagaactaaatgatattcgatttgaatttactcctgggagagatacagcagagggtgtctctcaggaactcatttctgctggcctggtcgacggaagggatttagtaatagtggcagctaatttgcagaaaattgtggaagaacctcagtcaaatcgatctgtcactttcaaactggcatctggtgtcgaaggctcagatattcctgatgatggtaaactgataggatttgcccagctcagcatcagctaaaccacaaccctggaagaggcggcctaaggagattccacacatgcgtatctctgttgcttctattggcctaaacccactactgccaaagaacccagcaacaaacctcccggctaggagctttagaagtctttatgttcttcctgccatcattcctccttttcccacagggaaagaaaagttggatcactagtggccagcatccccagagttccgttagtaaacttacttcatatgtcccctgtcttcctccatctgagaagtggcccatgtgcttcaaggcccaggagggagatctgtcagctcattcttgccttactccaatgatggcccaggtggaaaagtagcagctgtatcgggcttcctcatcctgcctgttcccccacacctgccaggatatggacatcttgggatatctctttaccactgaagtagaattgattgttcagctggagcccagagaatttaatttaatgttttttctttgtacctgatgtgaattctagcaacctttgttaggaaaaagcacagcctcagatggaggcagcctaaactgtgttcttgttttgttcatggtgtttctaagcgttttgctgaagctgctctcaggcacccccttcttcattgctctctccagaaagggttgctagccttaacttcagctggtgcaaaacatctgactgtagccgaacttcagccatcagatccttcaaagtggaactttggattgtttttacagacaacatcgagtaatggcttgtaaatgtgaattttgccagaggtggtttttgaacaggaaaatcataattcatatcattggagaagtatttattttcaaatatcaaattgaagaaaaactcaatcctcccatgaaaatcagttcgcctggcctccaagtcgtgaggaaatgggtatgcaaggctgagatttctacagcaataaaggagacacacactgggccagagaggcctgccttctgcctgctctcctgcactgaccctttggagggggtctctgtgtgctgaagctaactcaagatggaaagtgaaaccacatgtgccgtgacctttaggttttatgagtagacagtgttcatttgattttctacagaaataatataaattattctttaggtttaaaaaagagcactcataatgcaatatgtgaataatcagtgaggttgatttttcttttttcctaccgtttcatagtctttgtctaactgctagtaaccctaccgagttttatatatgagtgggatactcaatctggccttaaaaagatacacaaagatgggctgtgggtccctggaaagggggagagttgccctttacagaatcactcgagccctttccagcactgttggtctgatgaacaaggttgttttaccttattttctcttggaacatatctgaaaaccttccccacaaataacttgtcacaccttttgtttcattctgagtctttagttttagtcatgggctttcttcacctgctctaggtgcaaaggcatgttgggaaagagatggatgttggggaggaagagaggagatggatttcagttgggagttaggaggagagtaggtgagatgatcagacaccggagttcaacgtcccagcagtcttggtaaaaggagggagcctgctgagccaggagggagaaaagaagattgaccagcttgctagaaaaatacttagcttttctttttctttttttgtggaggggggacggagaggaacaaggatggggaggtaggaatgaggtatagaaaagagatagcatcttctttggcacaagactagtggcttaccgcttaccttagagttttgttttttttttttcaaacccatcaaaatctacttatttatgaatccaaggggtggcagcatcactctgttctagcattctttgtggagatggtctggtgcctagctgggagtgagcagcagcccatcccctgttcactttctctagcccatcattacctgtgaactgcagtggggcagtcatggcaaatagaattgggctggggtttctccttcttttcagttcattgtttgccctgctaggaattagaagacagacaccatgtcccaggacagtgttacttcttctgcatgatgtgtggtagactccctttgctggcttgtgcagtgatactgagaaaatacatgaacagaaactgcccaggtggaacagcacgtaacctagtgagtgactgtactcctttctaggaatgctgattcagagtgcacctctttgactaggtcccaggatccccttgtccctggagtagggactaactatagcacaaagtaatatgtgccaatgctatttgtgaaatgtttggtctttctaaacgactaaaggatttgttgggtttttgcttaagttttgaaccaaatcctagagccagctgataatatttaataatctggaggagagaataatgatgtaccaataagtggagattcctccttatgatgtatgctaggttatggaagatgtaaaatattcaactttttcctcctttttttggactttgtattttactgcatgttttcttcatttttaatcaataaagagtaaattgtcctta

SEQ ID NO: 152880 - DNA, 1584 bp, Artificial Sequence
  derived and/or modified sequence
atgtctgaagatagcagtgccctgccgtggtcaatcaatagggacgattatgagctgcaggaagtaattggcagcggggctacagccgtggtacaggcggcatactgtgctcccaagaaggaaaaggttgcaattaagaggattaatttggaaaagtgccagacttccatggacgagctcctcaaagaaatccaagcaatgtctcagtgccatcatccaaacattgtcagttattacacaagtttcgtggtgaaggacgagctctggctggtgatgaaattgctaagcggagggagcgtgctcgacataatcaagcacatcgtggctaagggcgaacacaaatccggcgtactggatgaatcgaccattgccactatactgagagaggtgctcgaggggctggagtacctgcataagaatggccaaatacacagggatgttaaggctgggaatatcctactcggcgaagacggaagcgtccagatcgcagatttcggggtttccgcgttccttgctacaggaggcgatatcacaagaaacaaagttaggaagacgtttgttggcactccctgttggatggcccctgaagtgatggaacaggtgcggggttatgactttaaggcagacatctggagttttggcatcaccgccatcgaattggcaaccggggcagctccttaccacaaatatcctccaatgaaggtcttgatgctgacactgcagaatgacccaccgtcgctagaaacaggagtccaagacaaggagatgttgaagaaatacggcaagtcattcaggaaaatgatctccctgtgcttacagaaggaccccgagaagcggccaacagccgcagagctcctgcgccacaaattttttcagaaagctaagaataaggaatttctgcaggagaagaccctgcagcgcgctcctactatcagcgagcgcgcaaagaaggtcagacgggttcccggaagcagtgggcgtcttcacaagaccgaggatgggggttgggagtggagcgacgacgagttcgatgaggagtccgaggagggcaaagccgcaatatcacaactccggtcccccagagtaaaggaatccatcagtaattccgaactcttccccaccaccgatccagtcggcacacttcttcaggtcccggaacaaatcagcgcccatctcccacaaccagcgggacaaattgcaacccagccaacccaggtgagcctgcctccgacagccgaacctgccaaaaccgcccaagcgctctcatctgggtccggttcccaagaaaccaaaatccccatctctcttgtgcttcgtctcaggaacagcaaaaaagaacttaatgacatcaggttcgaatttacccctggaagagatactgccgagggagtttcccaggagctaatttccgctggtttggtggatgggagagatctggtcattgtggccgcaaacctccagaagatcgtggaagagcctcagtctaaccgatctgtgacctttaagttagcgagcggggtcgaggggagtgatatacccgacgatggaaagcttattgggttcgcacagctttcgattagttag

SEQ ID NO: 152881 - protein, 682 aa, Artificial Sequence
  derived and/or modified sequence
MCGIFAYMNYRVPRTRKEIFETLIKGLQRLEYRGYDSAGVAIDGNNHEVKERHIQLVKKRGKVKALDEELYKQDSMDLKVEFETHFGIAHTRWATHGVPSAVNSHPQRSDKGNEFVVIHNGIITNYKDLRKFLESKGYEFESETDTETIAKLIKYVFDNRETEDITFSTLVERVIQQLEGAFALVFKSVHYPGEAVATRRGSPLLIGVRSKYKLSTEQIPILYRTCTLENVKNICKTRMKRLDSSACLHAVGDKAVEFFFASDASAIIEHTNRVIFLEDDDIAAVADGKLSIHRVKRSASDDPSRAIQTLQMELQQIMKGNFSAFMQKEIFEQPESVFNTMRGRVNFETNTVLLGGLKDHLKEIRRCRRLIVIGCGTSYHAAVATRQVLEELTELPVMVELASDFLDRNTPVFRDDVCFFISQSGETADTLLALRYCKDRGALTVGVTNTVGSSISRETDCGVHINAGPEIGVASTKAYTSQFISLVMFGLMMSEDRISLQNRRQEIIRGLRSLPELIKEVLSLEEKIHDLALELYTQRSLLVMGRGYNYATCLEGALKIKEITYMHSEGILAGELKHGPLALIDKQMPVIMVIMKDPCFAKCQNALQQVTARQGRPIILCSKDDTESSKFAYKTIELPHTVDCLQGILSVIPLQLLSFHLAVLRGYDVDFPRNLAKSVTVE

SEQ ID NO: 152882 - DNA, 2049 bp, Artificial Sequence
  derived and/or modified sequence
atgtgcgggatcttcgcctatatgaattaccgagtgcctcgcacacggaaggaaatatttgagactttaatcaagggcctgcaaagactggagtaccgtggttatgatagtgcgggggtcgccatcgacggaaacaaccacgaagttaaggagagacatatccagctagtgaagaagagaggaaaggtgaaggccctggacgaagagctctataaacaagattctatggatctcaaagtagagtttgaaacccattttggtattgcccacaccagatgggctacccacggcgtgccatcggccgttaattcacatcctcaaaggtcagataaggggaacgagttcgtggttattcacaacggcatcatcacaaattacaaagatttgaggaaattcctcgagagtaaggggtacgagtttgaaagcgaaactgacaccgagacaatcgccaagctgataaaatacgtgtttgataacagggagactgaggatattaccttttcaacgctggtggaacgcgtgatccagcagttagaaggggcctttgcgctggtatttaagagtgttcattacccaggggaggcggtcgccacacggaggggatccccgctgttaattggcgttcgaagtaagtataaactgagtaccgaacaaattcctatcctgtaccggacctgtacactcgagaatgtgaagaatatttgtaagacacgcatgaagcggctggacagctcggcctgtctgcacgctgtgggtgacaaggccgtggagttcttcttcgcatcagatgcctccgccattatcgaacatactaatcgggtaatcttcttggaggacgatgacatcgccgcagtggcagatggcaagctcagcatccatcgagtgaagcgcagtgcctcggatgacccatcccgggcaattcagacccttcagatggaactgcagcaaataatgaagggcaatttcagcgcctttatgcaaaaagagatttttgagcagcccgagtccgttttcaataccatgcgcggacgcgtgaactttgagacgaatacagtgctcttgggcgggctaaaggatcatctaaaagagattcgtcgctgccggcgccttatcgtgattggctgtggcacgtcctatcatgcagcggtagcaacgagacaagtgttggaagagcttacagagctcccggtgatggttgaattggcatccgattttttagaccgcaatacacctgtttttcgcgacgacgtttgcttcttcatctcccagagcggtgagacagccgatactctgctggccctgagatactgcaaggatcgaggtgcccttaccgtcggagtgacgaacactgtaggttcttctatcagccgagagacagattgcggagtgcatatcaatgctggcccagagattggcgtcgcaagcaccaaggcatacacgagccaattcatctcacttgtgatgttcggactcatgatgtctgaagatcgcatttcgcttcaaaaccggaggcaggaaattataagggggttgcgcagcctacctgaacttatcaaggaggttctctcacttgaggaaaagattcacgatctggccctggaactctacactcagaggagcttgctggttatgggtaggggatacaattacgcaacttgcctcgagggggcgttgaaaattaaggaaataacatatatgcactcggagggaatactagccggcgaactcaaacacgggccactagccctgattgacaaacagatgccagtaattatggtgattatgaaggatccctgcttcgctaaatgtcagaatgcgttacagcaagtgaccgcccggcagggtaggccaattattctgtgctccaaggatgacacagaatcatctaagttcgcttacaaaacgatcgagctgccacacaccgtcgactgccttcagggaatccttagcgtgatccccctacagctgctgtcctttcatttggccgtcctgaggggatacgatgtggactttccaagaaatttagccaagtcggtcaccgtagagtag

SEQ ID NO: 152883 - DNA, 3093 bp, Artificial Sequence
  derived and/or modified sequence
cgccctctcggagggctccgggttataagggctggaggccgagcggacgggagctggagcccgcggagcccacggagcccacggagcccacggaggagcccacggaggagccccagcgtccgaacgggcagaccccctcgagccgcgaaggagcccgagaagcagccacgatgtgcggaatctttgcctacatgaactacagagtcccccggacgaggaaggagatcttcgaaaccctcatcaagggcctgcagcggctggagtacagaggctacgactcggcaggtgtggcgatcgatgggaataatcacgaagtcaaagaaagacacattcagctggtcaagaaaagggggaaagtcaaggctctcgatgaagaactttacaaacaagacagcatggacttaaaagtggagtttgagacacacttcggcattgcccacacgcgctgggccacccacggggtccccagtgctgtcaacagccaccctcagcgctcagacaaaggcaacgaatttgttgtcatccacaatgggatcatcacaaattacaaagatctgaggaaatttctggaaagcaaaggctacgagtttgagtcagaaacagatacagagaccatcgccaagctgattaaatatgtgttcgacaacagagaaactgaggacattacgttttcaacgttggtcgagagagtcattcagcagttggaaggtgcattcgcgctggttttcaagagtgtccactacccaggagaagccgttgccacacggagaggcagccccctgctcatcggagtccggagcaaatacaagctctccacagaacagatccctatcttatacaggacgtgcactctggagaatgtgaagaatatctgtaagacacggatgaagaggctggacagctccgcctgcctgcatgctgtgggcgacaaggccgtggaattcttctttgcttctgatgcaagcgctatcatagagcacaccaaccgggtcatcttcctggaggacgatgacatcgccgcagtggctgatgggaaactctccattcaccgggtcaagcgctcggccagtgatgacccatctcgagccatccagaccttgcagatggaactgcagcaaatcatgaaaggtaacttcagtgcgtttatgcagaaggagatcttcgaacagccagaatcagttttcaatactatgagaggtcgggtgaattttgaaaccaacacagtgctcctgggtggcttgaaggaccacttgaaggagattcgacgatgccgacggctcatcgtgattggctgtggaaccagctaccacgctgccgtggctacgcggcaagttttggaggaactgactgagcttcctgtgatggttgaacttgctagtgattttctggacaggaacacacctgtgttcagggatgacgtttgctttttcatcagccagtcaggcgagaccgcggacaccctcctggcgctgcgctactgtaaggaccgcggcgctctcaccgtgggcgtcaccaacaccgtgggcagctccatctctcgcgagaccgactgcggcgtccacatcaacgcagggccggagatcggcgtggccagcaccaaggcttataccagtcagttcatctctctggtgatgtttggtttgatgatgtctgaagaccgaatttcactacaaaacaggaggcaagagatcatccgtggcttgagatctttacctgagctgatcaaggaagtgctgtctctggaggagaagatccacgacttggccctggagctctacacgcagagatcgctgctggtgatggggcggggctacaactatgccacctgcctggaaggagccctgaaaattaaagagataacctacatgcactcagaaggcatcctggctggggagctgaagcacgggcccctggcactgattgacaagcagatgcccgtcatcatggtcattatgaaggatccttgcttcgccaaatgccagaacgccctgcagcaagtcacggcccgccagggtcgccccattatactgtgctccaaggacgatactgaaagttccaagtttgcgtataagacaattgagctgccccacactgtggactgcctccagggcatcctgagcgtgattccgctgcagctgctgtccttccacctggctgttctccgaggatatgacgttgacttccccagaaatctggccaagtctgtaactgtggaatgaggctgagaccgtgacaagaccatcaccacctttcatctgattccagacctgtcccaacagcagggatgctacatgggaagagaagtggacatcccacatgttctgcgtgctcctgtagagcttgacagcttccacgtgccttctacccaagtgcttttgcttacagcagatactgtttctctgtgtcctgaagtcgccagaggagaagggaatcattgtttacacatggggatcagagcagacttctccactactgtgcaatagagatacagctctcttcagagtaactgtgaaccttttataaccaacactagagttagttttaaaagacaagatatttataatgacgactgtatagcttttaagttatttttctagtatgtggctttctgtagccgtggtaacggccaaactgttcatcctagctacccatgctctgtgtccaggcttgctcctggcaggtggcattcatctcagatgtgagcacaaggcattggccctctggactcctttctccttttctttcctctctaggctgctcctgaatcctgttctctgacatccgtggagcccctcctgcatccacctatgcctcctataagtccagttgaaatctcagcctccttcaacattttcttctcgtgtgtggcccacatccctccacttctccaacttctgtttaatctgatcacggctctttttaagccctggcagcattttggtccctgctccttgcccatagtaaaacagcttgaaatatcccatgcaagagagtagtttcaagtgggcaactctgctctctatttaaaagcgtgcacaatcaaaagtactatgcaattttaggacaataaagaacatacagtttttttgtgtg

SEQ ID NO: 152884 - DNA, 2049 bp, Artificial Sequence
  derived and/or modified sequence
atgtgtggcatctttgcctacatgaactacagagtgcccaggaccaggaaggagatctttgagaccctcatcaagggcctgcagaggctggagtaccggggctatgattctgctggggtggccattgatggcaacaaccacgaggtgaaggagcggcacatccagctggtgaagaagaggggcaaggtgaaggccctggatgaggagctgtacaagcaggacagcatggacctgaaggtggagtttgagacccacttcggcatcgcccacacccgctgggccacccacggcgtgcccagcgctgtgaacagccacccccagaggagtgacaagggaaatgaatttgtggtgatccacaacggcatcatcaccaactacaaggacctgaggaagttcctggagagcaagggctatgaatttgagagcgagacagacacagagaccatcgccaagctgatcaagtatgtgtttgacaaccgggagacagaggacatcaccttcagcaccctggtggagagggtcatccagcagctggagggcgcctttgccctggtgttcaagtctgtgcactacccaggagaggccgtggccacccggcggggcagccccctgctgattggagtgcgcagcaagtacaagctgagcacagagcagatccccatcctgtaccgcacctgcaccctggagaatgtgaagaacatctgcaagaccaggatgaagaggctggacagcagcgcctgcctgcatgctgtgggggacaaggctgtggagttcttctttgccagtgatgccagcgccatcatcgagcacaccaacagagtcatcttcctggaggatgatgacattgctgctgtggctgatggcaagctgagcatccaccgggtgaagaggtctgccagtgatgaccccagccgggccatccagaccctgcagatggagctgcagcagatcatgaagggcaacttcagcgccttcatgcagaaggagatctttgagcagcctgagagcgtcttcaacaccatgaggggccgggtgaactttgagaccaacacagtgctgctgggcggcctgaaggaccacctgaaggagatccgccgctgccggcggctgattgtgattggctgcggcaccagctaccacgccgctgtggccacccggcaggtgctggaggagctgacagagctgcctgtgatggtggagctggccagtgacttcctggacaggaacacccctgtgttcagagatgatgtgtgcttcttcatcagccagagcggggagacagctgacaccctgctggccctgcgctactgcaaggacagaggagccctgactgtgggcgtgaccaacacagtgggcagcagcatcagccgggagacagactgtggggtgcacatcaatgccggccctgagattggagtggccagcaccaaggcctacaccagccagttcatcagcctggtgatgtttggcctgatgatgtctgaagatcgcatcagcctgcagaacagacggcaggagatcatccggggcctgcggagcctgcctgagctgatcaaggaggtgctgagcctggaggagaagatccatgacctggccctggagctgtacacccagaggagcctgctggtgatgggccggggctacaactatgccacctgcctggagggcgccctgaagatcaaggagatcacctacatgcacagcgagggcatcctggccggggagctgaagcacggccccctggccctgattgacaagcagatgcctgtgatcatggtgatcatgaaggacccctgctttgccaagtgccagaatgccctgcagcaggtgacagcccggcagggccggcccatcatcctgtgcagcaaggatgacacagagagcagcaagtttgcctacaagaccatcgagctgccccacacagtggactgcctgcagggcatcctgagcgtcatccccctgcagctgctgtccttccacctggccgtgctgcggggctatgatgtggacttccccaggaacctggccaagtctgtgacagtggagtag

SEQ ID NO: 152885 - DNA, 2049 bp, Artificial Sequence
  derived and/or modified sequence
atgtgcggcatcttcgcctacatgaactaccgggtgccccggacccggaaagaaatcttcgagactctgattaaaggcttgcaaagactcgagtaccggggttatgatagcgccggcgtggcgatcgatggcaacaatcatgaagtgaaggagagacatattcagcttgtaaaaaaacgcgggaaggtcaaagctctcgatgaggaactctacaaacaagattcaatggatctcaaggtcgagttcgaaacacacttcggcattgcacatacccggtgggctactcacggagtgccctctgcagtcaattcccaccctcagcgcagtgataagggtaatgagtttgtggtcattcacaatggcattataacaaattacaaggacttgcggaagttcttagaatctaaagggtacgaattcgagtcagagacagatacagaaaccatcgcaaaacttataaagtatgttttcgataaccgcgagaccgaagatattacgtttagtacactagttgagcgcgtcattcagcagctggagggcgcatttgccctggtctttaagagtgttcattatccgggcgaagccgttgctactcgacgcggctcacccctcctcattggggtccggtcaaaatataagctgagtaccgaacaaatccccatcctctaccgcacatgcacgctggagaatgttaagaatatctgtaagacccgcatgaaacgtcttgattcctcagcctgcttacatgccgttggagacaaagctgtcgaattcttcttcgcctcagacgcctccgccataattgaacacaccaacagagtgattttcttggaagacgatgatattgccgccgtggccgatggaaaactgtctattcatcgagtgaaacggagtgcctctgacgaccccagtagagccattcagaccctgcaaatggaattgcagcaaatcatgaaggggaacttcagcgcctttatgcagaaggagatattcgaacagcccgaaagcgtgttcaatacaatgagaggccgagtgaattttgaaaccaacactgtgctcttgggtggcctgaaggatcatctaaaggagatcaggcgatgtcgtcgattgattgtgatcggatgcggtacctcttaccatgctgcagtggctacccgccaggtgctggaggagctgactgagttgcccgtgatggtagaactggccagtgattttctcgacagaaacacacccgtgttcagggatgacgtgtgcttttttatctcccaaagcggagagacagcggacacactgcttgccctgaggtactgtaaggatcggggggcgttaactgtgggagtgaccaacacagtgggctcatccatttcccgggagactgattgcggcgtacatataaatgcgggacccgaaatcggagtggcctccactaaagcgtacacaagccagtttatctcactcgtgatgtttggtctgatgatgtccgaggacagaataagcctgcagaatcgcaggcaagagataatccgggggttgcgatcacttcctgagctgatcaaggaagtacttagcctggaggagaagatacacgatctggcattagaactttatacacagcggtcactgctcgttatggggaggggctacaattacgccacttgtctggagggggcccttaagattaaagagattacatacatgcatagcgaaggaattttagccggggagctgaaacatgggccacttgcccttatcgataaacagatgcctgtcatcatggttatcatgaaggatccttgttttgccaaatgtcagaatgcccttcagcaggtgaccgccagacagggtcggcccattatcttatgttctaaagacgacaccgagtctagtaagtttgcttacaaaaccattgaactaccccataccgtcgactgcctgcagggcatactctcagttatcccactgcaactgttgtccttccacctcgccgttctccggggatatgacgtggatttcccaagaaacctggccaaatctgtgacagtggagtag

SEQ ID NO: 152886 - DNA, 2049 bp, Artificial Sequence
  derived and/or modified sequence
atgtgtgggatctttgcctacatgaactatcgcgtgccaagaactaggaaggaaatcttcgaaaccctgataaagggcctccagcgtctggaatacaggggatatgattccgccggagtggccatagacggcaataatcatgaggtgaaggaaagacatattcaacttgtcaaaaaacgaggaaaggtgaaggcactggacgaagaactgtataaacaagacagcatggatctgaaggtggagtttgagacccatttcggaatcgcacacaccaggtgggccactcatggtgtgccttccgcggtgaattctcacccgcaaagatccgataagggcaacgagttcgtcgtgatacataacggcatcatcaccaactataaggatctccgcaaattcttggagagtaaaggctacgaatttgagtccgagaccgatactgagaccattgccaaattgatcaaatacgtattcgataatcgagagacggaggatattacattcagcacacttgtcgaacgcgtgattcagcaactggaaggtgcttttgctctagtctttaagagcgttcattatcccggagaagctgtggctactagacgcggttctcctctgctgattggcgttaggtctaagtacaagctgtcaactgagcaaatccccatcttgtaccgtacttgtacactcgagaacgtcaaaaatatctgcaagacacggatgaaacggctggactctagtgcttgtcttcatgccgttggagataaggcagtagagttctttttcgcatccgacgccagcgccataatcgagcacacgaatagggtgatattcctggaggacgacgacatagcggctgtggccgacgggaagctgtcgattcaccgggtcaagcggagcgcatctgatgacccatccagagccatccagaccctgcagatggaactgcagcagattatgaaaggcaatttttctgcatttatgcaaaaagagattttcgaacaaccggagtccgtatttaatacaatgcgcggtagagtgaacttcgagaccaatacagtcctactgggcggacttaaggatcatctgaaggaaatccgcagatgtcggcgactgattgttataggctgcggaaccagttaccacgccgctgtcgcaactcgccaggtgcttgaagagttgacagagctgcctgttatggtggaattggcttccgatttcctcgaccggaacacacccgtttttcgagacgacgtgtgtttctttatttcacagtccggggagactgcagatacactgcttgccctgcgatactgtaaggacagaggggcacttaccgttggagtaaccaacacagtagggagcagtatctcccgggaaacagactgcggtgtacatatcaacgcgggaccggaaattggagtcgccagtacaaaagcttatacaagtcaatttatatccttagtaatgttcggactgatgatgagcgaagacaggattagtctgcagaaccggagacaggaaatcatccggggactccgaagcctgcccgaactcattaaggaggttctgtccctggaagagaaaattcacgacctggctctggaactgtatacgcagcgctcactgctggtgatggggcgagggtacaattacgccacctgcctggagggagcgctcaagataaaagagattacctatatgcatagcgaggggattctggcgggtgagctgaaacatgggcctttagcccttatcgataagcaaatgcccgtgatcatggtgattatgaaggatccatgctttgcgaaatgtcaaaatgcactgcagcaggtcacagcccgtcagggaaggcctatcatcttgtgctctaaggatgatacagagagttccaaatttgcctacaaaactatcgagctcccgcacacagtagactgcctgcagggcatcctgagcgtgatccccctgcagcttctgagctttcacctggccgttctgcgcggttatgatgtagactttccgcgtaatctcgctaaatccgtgaccgtggaatag

SEQ ID NO: 152887 - DNA, 2049 bp, Artificial Sequence
  derived and/or modified sequence
atgtgcggcatcttcgcctacatgaactacagagtgcccagaaccagaaaggagatcttcgagaccctgatcaagggcctgcagagactggagtacagaggctacgacagcgccggcgtggccatcgacggcaacaaccacgaggtgaaggagagacacatccagctggtgaagaagagaggcaaggtgaaggccctggacgaggagctgtacaagcaggacagcatggacctgaaggtggagttcgagacccacttcggcatcgcccacaccagatgggccacccacggcgtgcccagcgccgtgaacagccacccccagagaagcgacaagggcaacgagttcgtggtgatccacaacggcatcatcaccaactacaaggacctgagaaagttcctggagagcaagggctacgagttcgagagcgagaccgacaccgagaccatcgccaagctgatcaagtacgtgttcgacaacagagagaccgaggacatcaccttcagcaccctggtggagagagtgatccagcagctggagggcgccttcgccctggtgttcaagagcgtgcactaccccggcgaggccgtggccaccagaagaggcagccccctgctgatcggcgtgagaagcaagtacaagctgagcaccgagcagatccccatcctgtacagaacctgcaccctggagaacgtgaagaacatctgcaagaccagaatgaagagactggacagcagcgcctgcctgcacgccgtgggcgacaaggccgtggagttcttcttcgccagcgacgccagcgccatcatcgagcacaccaacagagtgatcttcctggaggacgacgacatcgccgccgtggccgacggcaagctgagcatccacagagtgaagagaagcgccagcgacgaccccagcagagccatccagaccctgcagatggagctgcagcagatcatgaagggcaacttcagcgccttcatgcagaaggagatcttcgagcagcccgagagcgtgttcaacaccatgagaggcagagtgaacttcgagaccaacaccgtgctgctgggcggcctgaaggaccacctgaaggagatcagaagatgcagaagactgatcgtgatcggctgcggcaccagctaccacgccgccgtggccaccagacaggtgctggaggagctgaccgagctgcccgtgatggtggagctggccagcgacttcctggacagaaacacccccgtgttcagagacgacgtgtgcttcttcatcagccagagcggcgagaccgccgacaccctgctggccctgagatactgcaaggacagaggcgccctgaccgtgggcgtgaccaacaccgtgggcagcagcatcagcagagagaccgactgcggcgtgcacatcaacgccggccccgagatcggcgtggccagcaccaaggcctacaccagccagttcatcagcctggtgatgttcggcctgatgatgagcgaggacagaatcagcctgcagaacagaagacaggagatcatcagaggcctgagaagcctgcccgagctgatcaaggaggtgctgagcctggaggagaagatccacgacctggccctggagctgtacacccagagaagcctgctggtgatgggcagaggctacaactacgccacctgcctggagggcgccctgaagatcaaggagatcacctacatgcacagcgagggcatcctggccggcgagctgaagcacggccccctggccctgatcgacaagcagatgcccgtgatcatggtgatcatgaaggacccctgcttcgccaagtgccagaacgccctgcagcaggtgaccgccagacagggcagacccatcatcctgtgcagcaaggacgacaccgagagcagcaagttcgcctacaagaccatcgagctgccccacaccgtggactgcctgcagggcatcctgagcgtgatccccctgcagctgctgagcttccacctggccgtgctgagaggctacgacgtggacttccccagaaacctggccaagagcgtgaccgtggagtag

SEQ ID NO: 152888 - protein, 466 aa, Artificial Sequence
  derived and/or modified sequence
MPYEIKKVFASLPQVERGVSKIIGGDPKGNNFLYTNGKCVILRNIDDHSRFVNCVRFSPDGNRFATASADGQIYIYDGKTGEKVCALGGSKAHDGGIYAISWSPDSTHLLSASGDKTSKIWDVSVNSVVSTFPMGSTVLDQQLGCLWQKDHLLSVSLSGYINYLDRNNPSKPLHVIKGHSKSIQCLTVHKNGGKSYIYSGSHDGHINYWDSETGENDSFAGKGHTNQVSRMTVDESGQLISCSMDDTVRYTSLMLRDYSGQGVVKLDVQPKCVAVGPGGYAVVVCIGQIVLLKDQRKCFSIDNPGYEPEVVAVHPGGDTVAIGGVDGNVRLYSILGTTLKDEGKLLEAKGPVTDVAYSHDGAFLAVCDASKVVTVFSVADGYSENNVFYGHHAKIVCLAWSPDNEHFASGGMDMMVYVWTLSDPETRVKIQDAHRLHHVSSLAWLDEHTLVTTSHDASVKEWTITY

SEQ ID NO: 152889 - protein, 176 aa, Artificial Sequence
  derived and/or modified sequence
PAETEKVFASLPQVERGVSKIIGGDPKGNNFLYTNGKCVILRNIDDHSRFVNCVRFSPDGNRFATASADGQCLPAPVTAQSRRLPNASPDMQNLDIALPTSADSSSEPKPQSMEKLPPWSAHFPWAPRFWTSSWAAYGRRTTCSVSPCPGTSTIWTETTPASPCTSSRVTVNRSSV

SEQ ID NO: 152890 - DNA, 1401 bp, Artificial Sequence
  derived and/or modified sequence
atgccctacgagatcaagaaggtgttcgccagcctgccccaggtggagagaggcgtgagcaagatcatcggcggcgaccccaagggcaacaacttcctgtacaccaacggcaagtgcgtgatcctgagaaacatcgacgaccacagcagattcgtgaactgcgtgagattcagccccgacggcaacagattcgccaccgccagcgccgacggccagatctacatctacgacggcaagaccggcgagaaggtgtgcgccctgggcggcagcaaggcccacgacggcggcatctacgccatcagctggagccccgacagcacccacctgctgagcgccagcggcgacaagaccagcaagatctgggacgtgagcgtgaacagcgtggtgagcaccttccccatgggcagcaccgtgctggaccagcagctgggctgcctgtggcagaaggaccacctgctgagcgtgagcctgagcggctacatcaactacctggacagaaacaaccccagcaagcccctgcacgtgatcaagggccacagcaagagcatccagtgcctgaccgtgcacaagaacggcggcaagagctacatctacagcggcagccacgacggccacatcaactactgggacagcgagaccggcgagaacgacagcttcgccggcaagggccacaccaaccaggtgagcagaatgaccgtggacgagagcggccagctgatcagctgcagcatggacgacaccgtgagatacaccagcctgatgctgagagactacagcggccagggcgtggtgaagctggacgtgcagcccaagtgcgtggccgtgggccccggcggctacgccgtggtggtgtgcatcggccagatcgtgctgctgaaggaccagagaaagtgcttcagcatcgacaaccccggctacgagcccgaggtggtggccgtgcaccccggcggcgacaccgtggccatcggcggcgtggacggcaacgtgagactgtacagcatcctgggcaccaccctgaaggacgagggcaagctgctggaggccaagggccccgtgaccgacgtggcctacagccacgacggcgccttcctggccgtgtgcgacgccagcaaggtggtgaccgtgttcagcgtggccgacggctacagcgagaacaacgtgttctacggccaccacgccaagatcgtgtgcctggcctggagccccgacaacgagcacttcgccagcggcggcatggacatgatggtgtacgtgtggaccctgagcgaccccgagaccagagtgaagatccaggacgcccacagactgcaccacgtgagcagcctggcctggctggacgagcacaccctggtgaccaccagccacgacgccagcgtgaaggagtggaccatcacctactag

SEQ ID NO: 152891 - DNA, 531 bp, Artificial Sequence
  derived and/or modified sequence
cccgccgagaccgagaaggtgttcgccagcctgccccaggtggagagaggcgtgagcaagatcatcggcggcgaccccaagggcaacaacttcctgtacaccaacggcaagtgcgtgatcctgagaaacatcgacgaccacagcagattcgtgaactgcgtgagattcagccccgacggcaacagattcgccaccgccagcgccgacggccagtgcctgcccgcccccgtgaccgcccagagcagaagactgcccaacgccagccccgacatgcagaacctggacatcgccctgcccaccagcgccgacagcagcagcgagcccaagccccagagcatggagaagctgcccccctggagcgcccacttcccctgggcccccagattctggaccagcagctgggccgcctacggcagaagaaccacctgcagcgtgagcccctgccccggcaccagcaccatctggaccgagaccacccccgccagcccctgcaccagcagcagagtgaccgtgaacagaagcagcgtgtag

SEQ ID NO: 152892 - DNA, 1401 bp, Artificial Sequence
  derived and/or modified sequence
atgccttacgaaatcaaaaaggtattcgcatccctgcctcaagttgaacggggggtgtctaaaattatcggcggagatccaaagggaaacaacttcctctacaccaacgggaaatgcgtgattcttaggaacattgacgatcactcgaggttcgttaattgcgttagattctcccccgatggtaatcggtttgcaactgcgtccgccgatgggcaaatctacatctacgatggtaaaaccggcgaaaaagtctgcgctttgggaggatccaaggcccacgacggcgggatatacgctatttcttggtcacccgattcaactcacttgttgtccgccagcggagacaaaacttcaaaaatttgggacgtgagcgttaacagcgttgtctctacgttccccatggggagcaccgtgctggaccagcaactggggtgcttatggcagaaggaccacctcctgtccgtatcgctctctggctacataaactatctggatagaaacaacccgtccaaacccctgcatgtcataaaaggccacagcaagtctattcagtgcctgaccgtccacaaaaacgggggaaaaagctatatttacagtggatctcatgacggccatatcaactattgggactctgagacaggtgaaaatgacagtttcgctggcaagggacatacgaatcaggtgtcgaggatgacagtggacgagagcggtcaactgatctcgtgttctatggatgacacggtgaggtatacgtctctgatgcttcgagactattccggccagggcgtggtgaagctggatgtacagccaaagtgtgtggccgtgggccctggcggctacgcagtggtggtttgtataggccagatcgtgctgctgaaagatcagagaaagtgttttagcatcgataatccaggatacgagccggaagtggtcgcagtgcatcctggaggagacacagtagccataggcggggtcgatggaaatgtgaggctatattccatcttgggaaccacactgaaagatgagggcaagctcctggaagccaaaggaccggtgactgacgtggcctactcccatgatggggcctttctggctgtctgtgatgcaagtaaggtggtgaccgtgtttagcgttgcagacgggtattccgagaacaacgtgttctacggccatcatgccaaaatcgtgtgcctggcctggtctcctgacaacgagcacttcgccagtggcggcatggacatgatggtctacgtgtggaccctttcagaccccgagacccgtgtgaaaatccaggatgcacatagactgcaccatgtctccagtctcgcctggcttgacgagcacacgctggtaactacctcccacgatgcctctgtgaaggagtggaccatcacatactag

SEQ ID NO: 152893 - DNA, 531 bp, Artificial Sequence
  derived and/or modified sequence
ccagcagaaacagagaaagtcttcgctagccttccacaggtggagcgaggcgttagcaagatcatcgggggggatccaaagggaaacaatttcctatacactaatgggaagtgcgtgattttgagaaatatcgatgaccacagtcgctttgtaaactgcgtgcggttttcacccgacgggaacaggttcgccaccgcatccgccgacgggcaatgtctgcctgccccggtcaccgctcagtcccggcgactgcctaacgcaagtcctgacatgcaaaatctggacatagctctgcccacttccgccgattcctcatcagagcccaagccccaatccatggaaaagctgcccccttggtccgcccattttccgtgggctccaaggttctggactagctcatgggcagcttacgggagacgcacaacttgctccgttagcccctgtccgggtacttctaccatctggacagaaacgacccccgctagtccctgtacctcctctcgtgtcaccgtaaaccgatcatcagtgtag

SEQ ID NO: 152894 - DNA, 1401 bp, Artificial Sequence
  derived and/or modified sequence
atgccttatgagatcaaaaaggtgttcgcttctctgccacaagtggagcggggcgttagcaagattatcggaggagatcccaagggaaataacttcctgtacacaaatggaaagtgcgttatcttgagaaatattgatgatcatagccgtttcgtgaactgtgtgcggttttctcccgatggcaacaggtttgccactgccagtgctgatgggcagatctatatttacgacggaaagacaggagaaaaggtgtgtgccctgggcggctcaaaggcccacgatgggggtatttacgcaatcagttggtcacctgactctacccatctgctttctgctagcggagacaagacctccaaaatttgggacgttagcgtcaattccgttgtctcgacctttcccatggggtctacggttctggaccagcagttgggatgtctctggcagaaggatcatttgctgtctgtgagtctgagcggatacatcaattacctggatcgaaataacccctctaagccgctgcatgtgatcaaaggacacagtaaatccattcagtgcctgactgtgcataagaatggcgggaagtcttatatttacagtgggagccacgatggccacataaattactgggattctgaaaccggcgagaacgattccttcgctgggaaagggcataccaatcaggtcagtcggatgactgtggacgaaagcggccagcttatctcttgctccatggacgacaccgtgagatacacctccttaatgctccgggattactctgggcagggagtcgtgaaattggatgttcagcccaagtgcgtagctgtggggcccggcgggtatgccgtcgttgtgtgcatcgggcagattgtgctgctgaaggaccagcgcaagtgttttagtattgacaatcccggctatgagccagaggttgttgctgtccaccccgggggcgacacggtagcaattggcggggtggatgggaacgtgcgtctatacagtatcctgggcacaacactgaaagacgagggaaagctcctggaagcgaaaggtcctgtcactgacgtcgcctacagtcacgacggtgccttcctcgcggtatgtgacgcctctaaagtggtcactgtcttcagtgtggcagacggatattcagagaataacgtgttctatggtcatcacgcaaaaatcgtttgcttggcatggagccccgataatgaacatttcgcttcaggtggtatggatatgatggtttacgtttggaccttatcagatcccgaaactcgagttaagatccaggatgctcaccgattacatcacgtttcttcgctcgcgtggctggacgaacatacacttgttaccacgtcacacgacgcttccgtgaaggagtggaccattacatattag

SEQ ID NO: 152895 - DNA, 1401 bp, Artificial Sequence
  derived and/or modified sequence
atgccctatgagatcaagaaggtgtttgccagcctgccccaggtggagcggggcgtgtccaagatcattggaggagaccccaagggcaacaacttcctgtacaccaacgggaaatgtgtgatcctgagaaatattgatgaccacagcagatttgtgaactgtgtgcgcttctccccagatggcaacagatttgccacagccagcgcagatggccagatctacatctatgatggcaagacaggagagaaggtgtgtgccctgggcggcagcaaggcccatgatggcggcatctatgccatctcctggagcccagacagcacccacctgctgagcgccagcggggacaagaccagcaagatctgggatgtgtctgtgaacagcgtggtgtccaccttccccatgggcagcacagtgctggaccagcagctgggctgcctgtggcagaaggaccacctgctgtctgtgtccctgagcggctacatcaactacctggacaggaacaaccccagcaagcccctgcacgtgatcaagggccacagcaagagcatccagtgcctgactgtgcacaagaatggaggcaagagctacatctacagcggcagccatgatggccacatcaactactgggacagcgagactggagaaaatgacagctttgctgggaagggccacaccaaccaggtgtccaggatgacagtggatgagagcggccagctgatcagctgcagcatggatgacacagtgcgctacaccagcctgatgctgcgggactacagcggccagggcgtggtgaagctggatgtgcagcccaagtgtgtggccgtgggccctgggggctatgctgtggtggtgtgcatcggccagatcgtgctgctgaaggaccagaggaagtgcttcagcattgacaaccctggctatgagcctgaggtggtggccgtgcaccctggaggagacacagtggccatcggcggcgtggatggaaatgtgcggctgtacagcatcctgggcaccaccctgaaggatgagggcaagctgctggaggccaagggccctgtgacagatgtggcctacagccatgatggagccttcctggccgtgtgtgatgccagcaaggtggtgaccgtcttctctgtggctgatggctacagcgagaacaacgtgttctacggccaccacgccaagatcgtgtgcctggcctggagcccagacaatgagcactttgccagcggcggcatggacatgatggtgtatgtgtggaccctgagtgaccctgagaccagggtgaagatccaggatgcccaccggctgcaccacgtgagcagcctggcctggctggatgagcacaccctggtgaccaccagccatgatgcctctgtgaaggagtggaccatcacctactag

SEQ ID NO: 152896 - DNA, 531 bp, Artificial Sequence
  derived and/or modified sequence
ccagctgagacagagaaggtgtttgccagcctgccccaggtggagcggggcgtgtccaagatcatcggcggggaccccaagggcaacaacttcctgtacaccaatggaaaatgtgtgatcctgaggaacattgatgaccacagcagatttgtgaactgtgtgcgcttctccccagatggcaacagatttgccacagccagcgcagatggccagtgcctgcctgcccctgtgacagcccagagccggcggctgcccaatgccagcccagacatgcagaacctggacatcgccctgcccaccagcgctgacagcagcagcgagcccaagccccagagcatggagaagctgcccccctggagcgcccacttcccctgggccccccgcttctggaccagctcctgggccgcctatggaagaaggaccacctgcagcgtgagcccctgccccggcaccagcaccatctggacagagaccaccccagccagcccctgcaccagcagccgggtgacagtgaacagaagctctgtgtag

SEQ ID NO: 152897 - DNA, 1401 bp, Artificial Sequence
  derived and/or modified sequence
atgccctacgagatcaagaaggtgttcgccagcctgccccaggtggagagaggggtgtcaaagattattggaggagaccccaaaggaaacaactttctgtatactaatggaaagtgcgtgatcctgcgtaatatcgatgaccacagccgctttgtgaactgcgtgcggttttcccccgacggtaatagatttgccacggccagtgctgacgggcagatctatatttacgatggtaaaacaggggagaaagtgtgtgcactgggcggatcgaaggcccacgacgggggtatatatgccatatcgtggtcgcccgacagcactcaccttctgtctgccagcggagacaagacgagcaagatttgggacgtgtctgtgaattccgtcgtgtccaccttcccgatggggagtaccgttcttgaccaacagctcggctgcctttggcagaaagaccacctccttagtgtgagtcttagtggctatattaactatctggatcgcaacaatccttccaaacctcttcacgtgatcaagggccattccaaaagcattcagtgcttgaccgtgcacaaaaatggcggaaagtcgtatatttatagtgggtctcatgacgggcacattaattactgggatagcgagaccggcgagaacgacagtttcgccggaaaaggacataccaaccaagtttccagaatgaccgttgacgaaagtggtcagctgattagttgttcgatggacgacacggtgcgctatacaagcttgatgctgcgcgattatagtgggcagggcgtcgttaaattggatgtgcagccaaagtgtgtcgctgtggggccagggggctatgctgtggtggtgtgtatcggccagattgtgttgctgaaagaccagaggaagtgtttctccattgacaaccccggctatgaaccagaggtggtggccgtgcatccaggcggcgacactgtggctatcggaggggtcgacggtaatgtgaggctgtattcaatccttgggacaactcttaaagacgaaggaaagcttctggaggctaaagggcccgtcacagacgtggcctacagtcacgacggcgcattcctggccgtgtgtgacgctagcaaagttgtcaccgtgttctctgttgccgacggatatagtgagaacaatgtgttttacgggcaccacgctaaaattgtatgtctggcctggagcccagataatgagcactttgcttccggcgggatggacatgatggtgtatgtatggacactgagtgatcctgaaacgcgggtgaagattcaggacgctcatcgtttgcaccacgtcagctctctcgcctggttggacgagcacaccctagtcacaacatctcatgatgccagtgtgaaggaatggaccattacctattag

SEQ ID NO: 152898 - DNA, 531 bp, Artificial Sequence
  derived and/or modified sequence
cccgccgagaccgagaaggtgttcgccagcctgccccaggtggagcggggtgtgagtaagataattggcggcgacccaaaggggaacaactttctctataccaatggcaagtgtgtcatcctccgcaatatcgacgatcattcacggtttgtcaactgtgtgcgattttcacctgatggcaaccgcttcgctactgcctccgcggatggccagtgtcttcctgcccctgtgaccgcccagtcacgacggctacccaacgcttcacccgacatgcagaacttggatatcgctttacccaccagtgcagattcatctagcgagcctaagccacagtccatggagaagctgcccccttggtccgcccacttcccatgggctcctaggttttggacttcttcatgggcggcctatggccgccggacaacatgcagcgtttccccgtgtcctggcacaagtactatttggaccgagaccactcccgcaagcccctgcacgagctcccgtgtcacagttaataggtccagtgtgtag

SEQ ID NO: 152899 - DNA, 1401 bp, Artificial Sequence
  derived and/or modified sequence
atgccctacgagatcaagaaggtgttcgccagcctgccccaggtggaaagaggagttagcaagattattggtggagatccaaaggggaataacttcctctatactaatggaaaatgcgtcatcttacgcaatatcgacgatcactcacggttcgtcaactgcgtgcgctttagcccagatggcaaccgctttgctactgcaagcgctgacgggcagatatacatttacgatggcaagaccggtgagaaagtctgtgcccttgggggttctaaggcgcatgatggaggcatttacgctatctcctggagccccgactctacacatctgctatcagcctctggcgataagacatcaaaaatttgggacgtgtccgtgaactccgtggtcagtacgtttccgatggggtcaacagtgctggaccagcagctgggatgtctctggcagaaggaccatctgctgagcgttagcctttccggatacatcaattatctcgaccggaacaatccatctaaacccctccatgttatcaagggccactcgaaaagtatccaatgcctcacggtccataaaaatggaggaaaaagttatatatacagcggctcgcacgatggccacataaattattgggactccgagaccggcgaaaatgatagctttgctggtaaaggccacaccaaccaggttagtcggatgactgtggacgagtctggacagctgataagctgcagtatggatgacaccgtccgctatacatccctcatgctcagggactactctggacagggagtcgtaaagctcgacgtccaacctaaatgcgtagctgtgggccccgggggctatgctgtggtggtctgtatcgggcagattgttcttctcaaagaccaaaggaagtgtttctcgattgacaatcctggctatgaacccgaggtcgtcgccgtgcaccctgggggagacaccgttgccatcgggggagttgatggcaacgttcggctttactccattctgggcacaacactgaaggatgaggggaagctcctggaggcaaagggcccagtcacagacgtcgcttacagtcacgacggcgcgttcctggcagtgtgcgacgcttctaaggtcgtaacggtgtttagcgtcgctgatggatactcggagaataacgtgttttacggacatcatgccaagattgtgtgcctggcttggagtcctgataacgaacacttcgcaagcggtgggatggacatgatggtttacgtttggacgctcagcgaccctgagaccagggtcaaaatccaggatgcccatcgcctgcatcatgtgtcttccctcgcctggttggacgaacacacactggttaccacatcccatgacgcatcggtcaaggaatggactataacatactag

SEQ ID NO: 152900 - DNA, 1401 bp, Artificial Sequence
  derived and/or modified sequence
atgccttacgaaataaagaaagtgttcgcatctttgcctcaggtagagagaggggtaagcaaaatcatagggggtgatcccaagggaaacaatttcctctataccaacgggaagtgtgtgatcttgcggaacatagatgaccactcacgctttgtcaactgcgtgaggttcagccctgacggtaatcggtttgcaaccgcctccgccgacgggcaaatttacatctacgacgggaaaaccggcgaaaaggtgtgcgccctggggggatcgaaggcccacgacggtggaatctatgctatttcttggtcaccggactccacccatctcctgtcggccagtggcgacaaaaccagcaagatctgggatgtatctgtgaattcagtggtatccacttttcccatgggctctaccgtcctcgaccagcagctcggttgtctttggcagaaggatcaccttctaagcgtgtccctgagcggctatatcaactatttggacaggaacaatccctccaagccactgcatgtgataaagggccattccaaatccatccagtgccttacagtgcacaagaacggcggtaaatcatacatatattcaggttcacacgatggacacatcaattactgggattcagaaaccggtgaaaatgatagcttcgcagggaaggggcacacaaatcaggtcagccggatgacagtggatgaatctggacagctaatttcatgttccatggacgatacggtgagatatacatctttgatgctacgagattactcagggcaaggggtagtgaagctagatgtacagcccaagtgcgtggccgtgggccctggtggctatgcagtggtggtgtgtattggccaaatcgtgttattaaaagaccagcgcaaatgtttctcaatagacaatcctggttacgagccagaagtagtggctgtgcatccgggaggggacaccgtggctattggcggagtcgatggtaatgtcagattgtacagcatcctgggcactaccctgaaggatgaggggaagttacttgaggcaaagggtcccgtgaccgacgtagcttattctcacgatggcgcttttcttgcagtgtgcgatgcctccaaagtggtcactgtgttctcagttgccgacgggtactctgaaaacaatgtcttttatggtcatcacgccaagatcgtctgcctggcctggtccccggacaatgagcacttcgcaagcggaggcatggacatgatggtctacgtctggactctgtccgaccccgaaacccgagtcaaaatccaggacgcgcaccggttgcaccatgttagttcactcgcctggcttgatgaacataccctcgtcactacctcccatgacgcatctgtgaaggaatggacaatcacatactag

SEQ ID NO: 152901 - DNA, 531 bp, Artificial Sequence
  derived and/or modified sequence
ccagcagagactgaaaaggtgtttgccagcctccctcaggtggaaagaggagttagtaaaatcattgggggtgaccccaagggaaacaacttcctctacacaaacggaaagtgcgttatactccgaaacatagatgatcattcaagatttgtgaattgcgtgagattctctccggacggcaatagattcgctactgcgtcggctgacggacagtgcctccccgctccggtgacagctcaatcccgacgactacctaacgcttcacccgacatgcagaacttggacattgctcttccaacttctgccgacagttccagtgagccaaagccacagagtatggaaaagctgcctccctggtccgctcatttcccgtgggccccacgtttttggacaagttcttgggctgcctatggacgacgcacaacctgcagtgtgtctccgtgccctggaacatcgaccatctggacagagacaacccccgcaagtccctgtacaagctcacgcgtaaccgtaaaccgcagtagcgtatag

SEQ ID NO: 152902 - DNA, 1401 bp, Artificial Sequence
  derived and/or modified sequence
atgccttatgagatcaaaaaagtgttcgccagccttccccaggtggagaggggtgtctcaaagatcatcggcggagaccctaaggggaataattttctctatactaacggtaagtgcgtcatcctgcgaaacattgacgaccacagtaggttcgtgaattgcgtccgcttctcccccgatggtaatcggttcgcaaccgcctctgccgatggccaaatttacatctatgacggcaagacaggggaaaaagtctgtgctctcgggggttccaaagctcacgacggcggtatctacgcaattagttggtcgcctgatagcacgcacctcctctcagcaagcggcgacaaaacatccaaaatttgggacgtaagcgtcaactctgtcgttagcaccttccccatggggtctaccgttctcgaccagcagctgggctgcctttggcagaaagatcatctcttgtccgtctccctctcaggatatatcaattatctggaccgcaacaatccctccaagccgctgcacgtcataaagggccactctaaaagtatacagtgcttgactgtccacaagaatggcggaaagtcgtacatttattctgggtctcatgacggtcatattaactattgggattccgagactggggagaatgatagttttgccggaaagggtcataccaatcaggtatccagaatgactgtcgacgaatccgggcaactgatctcctgcagcatggacgataccgttaggtatacatcactaatgctcagggactactcagggcagggggtcgtgaagctggacgtccaacccaagtgtgttgcggtaggcccaggcggatacgccgtggtggtttgcatcggtcagatcgtgctcctgaaagatcagcggaagtgttttagtatagacaacccagggtacgaacccgaagttgtcgccgtgcacccagggggtgatacggttgcaatcggcggagtcgatggcaacgtgagactttatagtattttgggcacaaccctgaaggacgagggaaaactacttgaggccaaaggtccagttacagacgttgcgtactctcatgacggcgctttcctcgccgtgtgtgatgctagtaaggtcgttaccgtcttcagcgtcgccgacggctactcagagaacaacgtcttctacggacatcacgccaagattgtgtgtctggcatggtctccggataatgaacactttgcctctgggggtatggatatgatggtctatgtttggacgctgtctgaccctgagacgagagttaaaattcaggacgcccacagattgcaccatgtgtcttcattagcttggttagacgagcacacattagtcacgacatcacacgacgcaagcgtgaaggagtggaccattacttactag

SEQ ID NO: 152903 - DNA, 2722 bp, Artificial Sequence
  derived and/or modified sequence
ccgcagccgccgagccgagcgcttgactatatatggtcaaagctgggggcgagccgcgcgcgggaccgcgcttccgggttcggggcgtccgcaaccacagcgcgcagggcaggcgcgagctggcctctgagccccggcctcggaccgcccactccactcccggcacgcccggtgccgccttccggctccagtccccgggctcggcctcggcgaggtgtaattcgcagcgcgggccggccccggaggctctcggcgagcgcggcgcggtaacaagtgggcgaggatgccgtacgagatcaagaaggtgttcgccagcctcccgcaggtggagaggggcgtctccaagatcatcggcggcgaccctaagggcaacaattttctgtacaccaatggaaagtgcgtcatcctaaggaacatcgacgaccacagccgctttgtcaactgtgtgcgattctctcctgatgggaacagatttgccacagccagtgctgacggccagatatacatctatgacgggaagactggggagaaggtgtgcgcgctgggcggaagcaaggcccacgacggtgggatttacgcaattagttggagtcccgacagcacccatttgctttctgcttctggggacaaaacttccaagatttgggacgtcagcgtgaactccgtggtcagcacatttcccatgggctccacggttctggaccagcagctgggctgcctatggcagaaggaccacctgctcagtgtctccctgtccgggtacatcaactatctggacagaaacaaccccagcaagcccctgcacgtcatcaagggtcacagtaaatcgatccagtgtctgacggtgcataaaaacggcggcaagtcctacatttactctgggagccacgacggacacattaattactgggattcagagacgggggagaacgactccttcgctgggaaaggccacacgaaccaggtgtccaggatgaccgtggatgagtcggggcagctcatcagctgcagcatggacgacaccgtgcggtacaccagcctcatgctgcgggactacagcggacaaggagttgtgaaactggacgttcagccaaagtgcgtagccgtcggccccgggggatacgccgtggtcgtgtgcattggacagattgtcctgctgaaggatcagaggaagtgcttcagcatcgacaaccccggctacgagcccgaagttgtggcagtgcaccccggcggggacacggtggcaattgggggtgtggacggcaacgtccgcctgtattccatcctgggcaccacgctgaaggatgagggcaagctcctagaggccaagggccccgtgaccgacgtggcctactcccacgacggcgccttcctcgcggtgtgcgacgccagcaaggtggtcacagtgttcagcgttgctgacggctactcggagaacaatgttttttatggacaccatgcaaaaatcgtctgcctggcctggtccccagacaatgaacactttgcctccggtggcatggacatgatggtgtatgtttggaccctgagtgacccggaaaccagagtcaagatccaagatgcacaccggctgcaccatgtcagcagcctggcctggctggacgagcacacgctggtcacgacctcccatgatgcctctgtcaaggagtggacaatcacctactgaggagccccacccccgcctctggatggaccgaatcagggactagagtttaactgcagcggaacatgtcatttctctatttctgtgacgcgcccccatgcccccaccccaccacaagaggcaggagggcccagtcatgaccctcgtctctgcagggtgtctgtacacgttcttctgaaagctttagacagtaacagtttgcacatgaaaaataaagcgagcacctaaacaatgtgtggagcataactaaaacccacagcccaaccaaaccttgagaatgcgaaacattccagaggcagtagcctccaaagcacacagagcccctggccccgccgcggctctcactatctgtcaggggaggttgtacaggtgaatgagccggggggctcatgttcctgcctgcagaacatttctgtactagtgagaagagggaatatgcattgcagttcagcaaagccggaattctgtgttgaacagatgtctgtctccctagtgtgtgactcacaccttgtggctgccttcagagcgccacctccagatcagatggggacacacaacccctggatatgtttcattgtcagattttgtgcttgattttaagaatggaattgtgggtatctttcctttttttttaatgtatcttaactgttgcctgtcagtgtttacaaactagtgcgttgacggcaccgtgtccaagtttttagaacccttgttagccagaccgaggtgtcctggtcaccgtttcaccatcatgctttgatgttcccctgtctttccctcttctgctctcaagagcaaaggttaatttaaggacaaagatgaagtcactgtaaactaatctgtcattgtttttaccttccttttctttttcagtgcagaaattaaaagtaagtataaagcaccgtgattgggagtgtttttgcgtgtgtcggaatcactggtaaatgttggctgagaacaatccctccccttgcacttgtgaaaacactttgagcgctttaagagattagcctgagaaataattaaatatcttttctcttc

SEQ ID NO: 152904 - DNA, 1691 bp, Artificial Sequence
  derived and/or modified sequence
cgcagcgcgggccggccccggaggctctcggcgagcgcggcgcggtaacaagtgggcgaggatgccgtacgagatcaagaaggtgttcgccagcctcccgcaggtggagaggggcgtctccaagatcatcggcggcgaccctaagggcaacaattttctgtacaccaatggaaagtgcgtcatcctaaggaacatcgacgaccacagccgctttgtcaactgtgtgcgattctctcctgatgggaacagatttgccacagccagtgctgacggccagatatacatctatgacgggaagactggggagaaggtgtgcgcgctgggcggaagcaaggcccacgacggtgggatttacgcaattagttggagtcccgacagcacccatttgctttctgcttctggggacaaaacttccaagatttgggacgtcagcgtgaactccgtggtcagcacatttcccatgggctccacggttctggaccagcagctgggctgcctatggcagaaggaccacctgctcagtgtctccctgtccgggtacatcaactatctggacagaaacaaccccagcaagcccctgcacgtcatcaagggtcacagtaaatcgatccagtgtctgacggtgcataaaaacggcggcaagtcctacatttactctgggagccacgacggacacattaattactgggattcagagacgggggagaacgactccttcgctgggaaaggccacacgaaccaggtgtccaggatgaccgtggatgagtcggggcagctcatcagctgcagcatggacgacaccgtgcggtacaccagcctcatgctgcgggactacagcggacaaggagttgtgaaactggacgttcagccaaagtgcgtagccgtcggccccgggggatacgccgtggtcgtgtgcattggacagattgtcctgctgaaggatcagaggaagtgcttcagcatcgacaaccccggctacgagcccgaagttgtggcagtgcaccccggcggggacacggtggcaattgggggtgtggacggcaacgtccgcctgtattccatcctgggcaccacgctgaaggatgagggcaagctcctagaggccaagggccccgtgaccgacgtggcctactcccacgacggcgccttcctcgcggtgtgcgacgccagcaaggtggtcacagtgttcagcgttgctgacggctactcggagaacaatgttttttatggacaccatgcaaaaatcgtctgcctggcctggtccccagacaatgaacactttgcctccggtggcatggacatgatggtgtatgtttggaccctgagtgacccggaaaccagagtcaagatccaagatgcacaccggctgcaccatgtcagcagcctggcctggctggacgagcacacgctggtcacgacctcccatgatgcctctgtcaaggagtggacaatcacctactgaggagccccacccccgcctctggatggaccgaatcagggactagagtttaactgcagcggaacatgtcatttctctatttctgtgacgcgcccccatgcccccaccccaccacaagaggcaggagggcccagtcatgaccctcgtctctgcagggtgtctgtacacgttcttctgaaagctttagacagtaacagtttgcacatgaaaaataaagcgagcacctaaacaa

SEQ ID NO: 152905 - protein, 731 aa, Artificial Sequence
  derived and/or modified sequence
MSWFVDLAGKAEDLLNRVDQGAATALSRKDNASNIYSKNTDYTELHQQNTDLIYQTGPKSTYISSAADNIRNQKATILAGTANVKVGSRTPVEASHPVENASVPRPSSHFVRRKKSEPDDELLFDFLNSSQKEPTGRVEIRKEKGKTPVFQSSQTSSVSSVNPSVTTIKTIEENSFGSQTHEAASNSDSSHEGQEESSKENVSSNAACPDHTPTPNDDGKSHELSNLRLENQLLRNEVQSLNQEMASLLQRSKETQEELNKARARVEKWNADHSKSDRMTRGLRAQVDDLTEAVAAKDSQLAVLKVRLQEADQLLSTRTEALEALQSEKSRIMQDQSEGNSLQNQALQTFQERLHEADATLKREQESYKQMQSEFAARLNKVEMERQNLAEAITLAERKYSDEKKRVDELQQQVKLYKLNLESSKQELIDYKQKATRILQSKEKLINSLKEGSGFEGLDSSTASSMELEELRHEKEMQREEIQKLMGQIHQLRSELQDMEAQQVNEAESAREQLQDLHDQIAGQKASKQELETELERLKQEFHYIEEDLYRTKNTLQSRIKDRDEEIQKLRNQLTNKTLSNSSQSELENRLHQLTETLIQKQTMLESLSTEKNSLVFQLERLEQQMNSASGSSSNGSSINMSGIDNGEGTRLRNVPVLFNDTETNLAGMYGKVRKAASSIDQFSIRLGIFLRRYPIARVFVIIYMALLHLWVMIVLLTYTPEMHHDQPYGK

SEQ ID NO: 152906 - protein, 640 aa, Artificial Sequence
  derived and/or modified sequence
MSWFVDLAGKAEDLLNRVDQGAATALSRKDNASNIYSKNTDYTELHQQNTDLIYQTGPKSTYISSAADNIRNQKATIKTIEENSFGSQTHEAASNSDSSHEGQEESSKENVSSNAACPDHTPTPNDDGKSHELSNLRLENQLLRNEVQSLNQEMASLLQRSKETQEELNKARARVEKWNADHSKSDRMTRGLRAQVDDLTEAVAAKDSQLAVLKVRLQEADQLLSTRTEALEALQSEKSRIMQDQSEGNSLQNQALQTFQERLHEADATLKREQESYKQMQSEFAARLNKVEMERQNLAEAITLAERKYSDEKKRVDELQQQVKLYKLNLESSKQELIDYKQKATRILQSKEKLINSLKEGSGFEGLDSSTASSMELEELRHEKEMQREEIQKLMGQIHQLRSELQDMEAQQVNEAESAREQLQDLHDQIAGQKASKQELETELERLKQEFHYIEEDLYRTKNTLQSRIKDRDEEIQKLRNQLTNKTLSNSSQSELENRLHQLTETLIQKQTMLESLSTEKNSLVFQLERLEQQMNSASGSSSNGSSINMSGIDNGEGTRLRNVPVLFNDTETNLAGMYGKVRKAASSIDQFSIRLGIFLRRYPIARVFVIIYMALLHLWVMIVLLTYTPEMHHDQPYGK

SEQ ID NO: 152907 - DNA, 2196 bp, Artificial Sequence
  derived and/or modified sequence
atgtcgtggtttgtggatttagcagggaaagctgaggaccttctgaatcgggtagatcagggagccgccaccgctctttctcggaaggacaatgcctcgaacatatatagtaaaaatactgactacactgagttacatcaacagaacacagacctaatttatcagaccggcccaaagtcaacatatattagcagcgctgccgataacatcaggaatcagaaagcaaccattctggctggaaccgccaacgtgaaggtgggaagccggactcctgttgaggcgtcacacccagtggagaatgcttctgttccacgcccctcctctcacttcgttcggcgcaaaaaatcagagccagacgacgaactgctctttgattttctgaactcatctcagaaggagcctaccgggcgcgtagagatcaggaaagagaagggcaagacaccagttttccagtcatcccagacttctagcgtctcctctgtcaacccaagcgtgaccactataaagactatcgaggaaaactcatttgggagtcagacacacgaggctgcttctaattctgacagttcccacgagggccaagaagagagctccaaagagaacgtatcctctaacgccgcttgtcccgatcacacacccacccccaacgatgacggcaagagtcacgagctgtctaatctgagactggagaaccagctgcttcgcaacgaggtacagtctctgaatcaggagatggcttctctgttacagcgatcaaaagaaactcaggaagagcttaacaaggcacgggcccgcgttgaaaaatggaacgccgatcactcaaaaagtgatcgcatgaccagaggccttcgcgcccaggtggacgatttaacagaggcggtcgccgcaaaagacagccagttagcagtgctcaaagttaggcttcaagaggcagatcagctgctaagcactagaaccgaagcactggaggcactgcagtccgaaaaatctaggatcatgcaagaccagagcgaaggcaactccttgcagaatcaggctctgcagaccttccaggaaagattgcacgaagctgacgcgacattaaaaagggaacaggagtcctataaacagatgcaatctgaattcgctgctagactgaataaggtggagatggagaggcagaacctcgctgaggctattactctggcggaaaggaaatattctgatgagaagaaaagggttgacgaattgcagcaacaggtaaaattatacaagttaaacctggagtcctctaagcaggaattgatcgattacaagcagaaggctacaaggatactgcagtcgaaagaaaaactgatcaactccctgaaggagggcagcggctttgagggactcgattccagcaccgcgtcttctatggagctggaagagctgaggcacgagaaagaaatgcagagagaggagatccaaaagctgatggggcagattcaccagttaagatcggaactgcaagacatggaagcacagcaggtcaacgaagcagagtccgcgagagaacaactgcaggatctgcatgaccaaatcgccggccagaaggcctctaaacaggaactggaaacagagctggagagattgaaacaagaatttcactacatagaggaagacctgtaccgaaccaagaatactctacagagtcgtatcaaggatagagacgaagagatccagaagcttcgcaaccagctgacgaataagacccttagtaactcttcacagtcagaactggagaacagattacaccaactcaccgaaaccttaatccagaagcaaacaatgctggagtcgctgtccactgaaaaaaattccctggtgttccagctagagcggctggaacagcagatgaactcagccagtggctcaagctccaacggctcctcaattaacatgtctggaattgataacggcgaagggacccggctgagaaacgtccccgtcctgtttaacgacactgaaactaatctggctggcatgtatggaaaggtccgcaaggctgcctcatcaatcgaccagtttagtatcaggcttggaatcttcctcaggaggtacccaattgccagagttttcgtgatcatctacatggccttgctgcatctctgggtcatgatcgtgctgctgacatacaccccagagatgcatcatgatcagccatacggcaaatag

SEQ ID NO: 152908 - DNA, 1923 bp, Artificial Sequence
  derived and/or modified sequence
atgtcctggttcgttgatctcgccggaaaggccgaagacctcctaaatcgtgtcgaccagggggccgctactgccctgtcaagaaaggacaatgccagtaatatctacagcaagaacaccgattataccgagctccaccagcagaataccgatttgatctaccagacgggacctaaaagtacatatatctcttcagccgctgataacatacggaaccaaaaagccactattaagacaattgaggagaactcattcgggagtcagacacatgaagctgcctcgaactcagacagttcccacgaaggtcaagaggaaagctcaaaggaaaatgtctcatcgaacgctgcctgcccagatcatactccgaccccaaacgatgatggcaagtcccacgagctgagcaatttaaggcttgagaatcagctgctgagaaatgaggtgcaatcattgaaccaagaaatggcctcgctcctccaaagaagcaaggaaactcaggaagagctgaacaaggcccgagctagggtggagaagtggaatgcagatcatagtaagagcgacaggatgacacgtggcctccgcgcacaagtagatgatcttacggaggctgttgctgccaaggatagtcagttggccgttcttaaagtgcgccttcaggaagcagaccagctcctatctactcgcacggaagcactcgaggccctccaaagtgagaaatcaagaattatgcaggatcaatctgagggcaattcactccagaatcaggccctccaaacctttcaggaacggcttcacgaagccgatgcgactttaaagagagaacaggagagctataagcagatgcagtcagagttcgcggcacggctcaacaaggtggagatggagcgccagaacttagccgaggcgattaccttggctgagaggaaatattctgacgaaaagaagagggtcgacgaacttcagcagcaggtcaaactgtataaacttaatttagaatcgtcgaagcaggaacttatagactacaaacagaaagccacaagaattctgcaaagcaaggagaaactgattaacagcctgaaagagggctctggcttcgaaggacttgacagctctaccgctagctctatggaactggaggagctgcgtcatgagaaggaaatgcaacgggaggagatacagaagctcatgggtcagatccaccaacttagaagtgaacttcaggatatggaggctcagcaggtaaatgaagctgagagcgcacgtgaacagctccaagatctgcacgaccagattgctggccagaaagccagcaagcaggagttagaaacagaactcgagcgtctgaagcaggagttccattatattgaagaggacttgtataggaccaagaacacactgcagagtaggatcaaagatagagatgaagagatacaaaagctgcgcaatcagctgacgaataagacgttatccaattcctctcagtccgaattggagaaccgcctccatcagctgaccgagactctcattcagaagcagaccatgttggagtccctgagtacggagaagaatagtctggtctttcaactcgagaggcttgagcagcaaatgaattcggcatctggttcttccagtaacgggtcctcgataaatatgtccgggattgacaatggggaggggacacgcctcagaaacgtgccggtgctatttaacgacaccgagactaacctggccggcatgtatggtaaggtcaggaaggcagcgtctagcatcgaccagttcagcatcaggttaggtatcttcctgagaaggtatcccatcgcacgggtgtttgtgattatctatatggctctcctgcatttgtgggtgatgatagttctgctcacatacactccagagatgcaccatgaccaaccgtatggaaaatag

SEQ ID NO: 152909 - DNA, 2969 bp, Artificial Sequence
  derived and/or modified sequence
agtcgcctgcaggtggctgttcgcgtctccctgccgtgcaggcagctcgaaagccactctgttgtggggtcctcgcttcccttccacgtctcccggaagcggtagcagggccccggcgggtcggggaggaggtttactcagcttgggccccctccgggccagccgccgagggggcgcggcccaggacggcggctaggccgtagtgcagcctctccggagtcctcaggtttgccaataggattatcctgctgccatcatgtcttggtttgttgatcttgctggaaaggcagaagatcttttaaaccgagttgatcaaggggctgcaacagctctcagtaggaaagacaatgccagcaacatatatagcaaaaatactgactatactgaacttcaccagcaaaatacagatttgatatatcagactggacctaaatctacgtatatttcatcagcagctgataacattcgaaatcaaaaagccaccatcttagctggcactgcaaatgtgaaagtaggatctcggacaccagtagaggcctctcatcctgttgaaaatgcatctgttcctaggccttcatcccattttgtgcgaagaaaaaagtcagaacctgatgatgagctgctgtttgattttcttaatagttcacagaaggagcctaccgggagggtggaaatcagaaaggaaaaaggcaagacacctgtctttcagagctctcagacatcaagtgtcagttctgtgaaccccagtgtaaccaccatcaaaaccattgaagaaaattcttttgggagccaaacccacgaagctgccagtaactcagattctagccatgaaggtcaagaggaatcttcaaaggaaaatgtgtcatcaaatgctgcctgccctgaccacaccccaacacctaatgatgatggcaaatcacatgaactgtctaaccttcgactggagaatcagctgctgaggaatgaagttcagtctttaaatcaagaaatggcctcgttactccaaagatccaaagagactcaagaagaattaaacaaagcaagagcaagagttgaaaagtggaatgctgaccattcaaagagtgatcgaatgactcgaggactccgagcccaagtagatgacctgactgaagctgtggctgcaaaggattcccagctggctgtactgaaagtgagactccaggaagctgaccagctactgagtactcgcacagaagcattagaagccttacagagtgaaaaatcacgaataatgcaggatcaaagtgaaggtaacagcctgcagaatcaagctctgcagacttttcaggagagactgcatgaagcggatgccactctgaagagagagcaggagagctataaacagatgcagagcgagtttgctgcacgccttaataaagtggaaatggaacgtcagaatttagcagaagcaattacactggccgaaagaaaatactcagatgagaagaagagggttgatgaactgcagcagcaagtcaagctgtataagttgaacttggagtcctctaagcaggaattaattgactacaagcaaaaagctactagaatactgcaatctaaggaaaaattgattaacagcttgaaagaaggctctggttttgaaggcctagatagcagcactgccagtagcatggagctggaagaacttcggcatgagaaagagatgcagagggaggaaatacagaagctgatgggccagatacatcagctcagatccgaattacaggatatggaggcacagcaagttaatgaagcagaatcagcaagagaacagttacaggatctgcatgaccaaatagctgggcagaaagcatccaaacaagaactagagacagaactggagcgactgaagcaggagttccactatatagaagaagatctttatcgaacaaagaacacattgcaaagcagaattaaagatcgagacgaagaaattcaaaaactcaggaatcagcttaccaataaaactttaagcaatagcagtcagtctgagttagaaaatcgactccatcagctaacagagactctcatccagaaacagaccatgctggagagtctcagcacagaaaagaactccctggtctttcaactggagcgcctcgaacagcagatgaactccgcctctggaagtagtagtaatgggtcttcgattaatatgtctggaattgacaatggtgaaggcactcgtctgcgaaatgttcctgttctttttaatgacacagaaactaatctggcaggaatgtacggaaaagttcgcaaagctgctagttcaattgatcagtttagtattcgcctgggaatttttctccgaagataccccatagcgcgagtttttgtaattatatatatggctttgcttcacctctgggtcatgattgttctgttgacttacacaccagaaatgcaccacgaccaaccatatggcaaatgaaccaagcccagttgttgcagtgattggttgtctttttctagacttgggatctgcaagaaggccaattgcctaaaatttctgagaacagtgcacaagattattttatcactacaagcttttaactttttaagttattgtacaagtattctacctaaatcttccaatttcctttaaatggtaagagtttctaaaacagacaataatttaacaagctcagctctgctttatctgagtttagtggtcctaatatatatgtagagaaagatggtggggttgttcacctctgtacagaccatctgtatgttaggtgacattgattatgggttataatcagggaaactaattgtatttagtgacaaaaataaaaagtttttttttataattcagtctgcttttggattttcatatatttaactttgcaaaaagatttactttgtacatgttacaggcttgattggtgtaaatctttttataaatacataaataaaagaaaaatatgcatttttcttttctaaaa

SEQ ID NO: 152910 - DNA, 2418 bp, Artificial Sequence
  derived and/or modified sequence
ggaagcggtagcagggccccggcgggtcggggaggaggtttactcagcttgggccccctccgggccagccgccgagggggcgcggcccaggacggcggctaggccgtagtgcagcctctccggagtcctcaggtttgccaataggattatcctgctgccatcatgtcttggtttgttgatcttgctggaaaggcagaagatcttttaaaccgagttgatcaaggggctgcaacagctctcagtaggaaagacaatgccagcaacatatatagcaaaaatactgactatactgaacttcaccagcaaaatacagatttgatatatcagactggacctaaatctacgtatatttcatcagcagctgataacattcgaaatcaaaaagccaccatcaaaaccattgaagaaaattcttttgggagccaaacccacgaagctgccagtaactcagattctagccatgaaggtcaagaggaatcttcaaaggaaaatgtgtcatcaaatgctgcctgccctgaccacaccccaacacctaatgatgatggcaaatcacatgaactgtctaaccttcgactggagaatcagctgctgaggaatgaagttcagtctttaaatcaagaaatggcctcgttactccaaagatccaaagagactcaagaagaattaaacaaagcaagagcaagagttgaaaagtggaatgctgaccattcaaagagtgatcgaatgactcgaggactccgagcccaagtagatgacctgactgaagctgtggctgcaaaggattcccagctggctgtactgaaagtgagactccaggaagctgaccagctactgagtactcgcacagaagcattagaagccttacagagtgaaaaatcacgaataatgcaggatcaaagtgaaggtaacagcctgcagaatcaagctctgcagacttttcaggagagactgcatgaagcggatgccactctgaagagagagcaggagagctataaacagatgcagagcgagtttgctgcacgccttaataaagtggaaatggaacgtcagaatttagcagaagcaattacactggccgaaagaaaatactcagatgagaagaagagggttgatgaactgcagcagcaagtcaagctgtataagttgaacttggagtcctctaagcaggaattaattgactacaagcaaaaagctactagaatactgcaatctaaggaaaaattgattaacagcttgaaagaaggctctggttttgaaggcctagatagcagcactgccagtagcatggagctggaagaacttcggcatgagaaagagatgcagagggaggaaatacagaagctgatgggccagatacatcagctcagatccgaattacaggatatggaggcacagcaagttaatgaagcagaatcagcaagagaacagttacaggatctgcatgaccaaatagctgggcagaaagcatccaaacaagaactagagacagaactggagcgactgaagcaggagttccactatatagaagaagatctttatcgaacaaagaacacattgcaaagcagaattaaagatcgagacgaagaaattcaaaaactcaggaatcagcttaccaataaaactttaagcaatagcagtcagtctgagttagaaaatcgactccatcagctaacagagactctcatccagaaacagaccatgctggagagtctcagcacagaaaagaactccctggtctttcaactggagcgcctcgaacagcagatgaactccgcctctggaagtagtagtaatgggtcttcgattaatatgtctggaattgacaatggtgaaggcactcgtctgcgaaatgttcctgttctttttaatgacacagaaactaatctggcaggaatgtacggaaaagttcgcaaagctgctagttcaattgatcagtttagtattcgcctgggaatttttctccgaagataccccatagcgcgagtttttgtaattatatatatggctttgcttcacctctgggtcatgattgttctgttgacttacacaccagaaatgcaccacgaccaaccatatggcaaatgaaccaagcccagttgttgcagtgattggttgtctttttctagacttgggatctgcaagaaggccaattgcctaaaatttctgagaacagtgcacaagattattttatcactacaagcttttaactttttaagttattgtacaagtattctacctaaatcttccaatttcctttaaatggtaagagtttctaaaacagacaataatttaacaagctcagctctgctttatctgagtttagtggtcctaatatatatgtagagaaagatggtggggttgttcacctctgtacagaccatctgtatgttaggtgacattgattatgggttataatca

SEQ ID NO: 152911 - DNA, 2196 bp, Artificial Sequence
  derived and/or modified sequence
atgtcctggtttgtggacctggccggcaaggccgaggacctgctgaacagagtggaccagggcgccgccacagccctgagcaggaaggacaatgccagcaacatctacagcaagaacacagactacacagagctgcaccagcagaacacagacctgatctaccagacaggccccaagagcacctacatcagcagcgctgctgacaacatccggaaccagaaggccaccatcctggccggcacagccaacgtgaaggtgggcagcaggacccctgtggaggccagccaccctgtggagaatgcctctgtgccccggcccagcagccactttgtgcggaggaagaagtctgagccagatgatgagctgctgtttgacttcctgaacagcagccagaaggagcccaccggccgggtggagatcaggaaggagaagggcaagacccctgtgttccagagcagccagaccagctctgtgtcctctgtgaaccccagcgtgaccaccatcaagaccattgaagaaaattcctttggcagccagacccatgaagctgccagcaacagcgacagcagccatgagggccaggaggagagcagcaaagaaaatgtgagcagcaatgctgcctgcccagaccacacccccaccccaaatgatgatggcaagagccatgagctgagcaacctgcggctggagaaccagctgctgagaaatgaggtgcagagcctgaaccaggagatggccagcctgctgcagaggagcaaggagacccaggaggagctgaacaaggcccgggcccgggtggagaagtggaatgctgaccacagcaagagtgacaggatgacccggggcctgcgggcccaggtggatgacctgacagaagctgtggccgccaaggacagccagctggccgtgctgaaggtgcggctgcaggaggccgaccagctgctgagcaccaggacagaggccctggaggccctgcagagcgagaagagccgcatcatgcaggaccagagcgagggcaacagcctgcagaaccaggccctgcagaccttccaggagcggctgcatgaagcagatgccaccctgaagcgggagcaggagagctacaagcagatgcagagcgagtttgctgcccggctgaacaaggtggagatggagcggcagaacctggccgaggccatcaccctggccgagaggaagtacagtgatgagaagaagagggtggatgagctgcagcagcaggtgaagctgtacaagctgaacctggagagcagcaagcaggagctgattgactacaagcagaaggccacccgcatcctgcagagcaaggagaagctgatcaacagcctgaaggagggcagcggctttgagggcctggacagcagcacagccagctccatggagctggaggagctgcggcatgagaaggagatgcagcgggaggagatccagaagctgatgggccagatccaccagctgcggtctgagctgcaggacatggaggcccagcaggtgaatgaagctgagagcgcccgggagcagctgcaggacctgcatgaccagattgctggccagaaggccagcaagcaggagctggagacagagctggagcggctgaagcaggagttccactacattgaagaagatctctaccgcaccaagaacaccctgcagagccgcatcaaggacagagatgaggagatccagaagctgaggaaccagctgaccaacaagaccctgagcaacagcagccagagcgagctggagaaccggctgcaccagctgacagagaccctcatccagaagcagaccatgctggagagcctgagcacagagaagaacagcctggtgttccagctggagcggctggagcagcagatgaacagcgccagcggcagcagcagcaatggcagcagcatcaacatgagcggcatcgacaacggggagggcacccggctgagaaatgtgcctgtgctcttcaatgacacagagaccaacctggccggcatgtatggcaaggtgaggaaggccgccagcagcattgaccagttcagcatccggctgggcatcttcctgcggcgctaccccatcgcccgggtgtttgtgatcatctacatggccctgctgcacctgtgggtgatgattgtgctgctgacctacaccccagagatgcaccacgaccagccctacggcaagtag

SEQ ID NO: 152912 - DNA, 1923 bp, Artificial Sequence
  derived and/or modified sequence
atgtcctggtttgtggacctggccggcaaggccgaggacctgctgaacagagtggaccagggcgccgccacagccctgagcaggaaggacaatgccagcaacatctacagcaagaacacagactacacagagctgcaccagcagaacacagacctgatctaccagacaggccccaagagcacctacatcagcagcgctgctgacaacatccggaaccagaaggccaccatcaagaccatcgaggagaacagctttggcagccagacccatgaggccgccagcaacagcgacagcagccatgagggccaggaggagagcagcaaagaaaatgtgagcagcaatgctgcctgcccagaccacacccccaccccaaatgatgatggcaagagccatgagctgagcaacctgcggctggagaaccagctgctgagaaatgaggtgcagagcctgaaccaggagatggccagcctgctgcagaggagcaaggagacccaggaggagctgaacaaggcccgggcccgggtggagaagtggaatgctgaccacagcaagagtgacaggatgacccggggcctgcgggcccaggtggatgacctgacagaggccgtggccgccaaggacagccagctggccgtgctgaaggtgcggctgcaggaggccgaccagctgctgagcaccaggacagaggccctggaggccctgcagagcgagaagagccgcatcatgcaggaccagagcgagggcaacagcctgcagaaccaggccctgcagaccttccaggagcggctgcacgaggctgatgccaccctgaagcgggagcaggagagctacaagcagatgcagagcgagtttgctgcccggctgaacaaggtggagatggagcggcagaacctggccgaggccatcaccctggccgagaggaagtacagtgatgagaagaagagggtggatgagctgcagcagcaggtgaagctgtacaagctgaacctggagagcagcaagcaggagctgattgactacaagcagaaggccacccgcatcctgcagagcaaggagaagctgatcaacagcctgaaggagggcagcggctttgagggcctggacagcagcacagccagctccatggagctggaggagctgcggcatgagaaggagatgcagcgggaggagatccagaagctgatgggccagatccaccagctgcggtctgagctgcaggacatggaggcccagcaggtgaatgaggccgagagcgcccgggagcagctgcaggacctgcatgaccagattgctggccagaaggccagcaagcaggagctggagacagagctggagcggctgaagcaggagttccactacatcgaggaggacctgtaccgcaccaagaacaccctgcagagccgcatcaaggacagagatgaggagatccagaagctgaggaaccagctgaccaacaagaccctgagcaacagcagccagagcgagctggagaaccggctgcaccagctgacagagaccctcatccagaagcagaccatgctggagagcctgagcacagagaagaacagcctggtgttccagctggagcggctggagcagcagatgaacagcgccagcggcagcagcagcaatggcagcagcatcaacatgtctggaattgacaatggagagggcacccggctgagaaatgtgcctgtgctcttcaatgacacagagaccaacctggccggcatgtatggcaaggtgaggaaggccgccagcagcattgaccagttcagcatccggctgggcatcttcctgcggcgctaccccatcgcccgggtgtttgtgatcatctacatggccctgctgcacctgtgggtgatgattgtgctgctgacctacaccccagagatgcaccacgaccagccctacggcaagtag

SEQ ID NO: 152913 - DNA, 2196 bp, Artificial Sequence
  derived and/or modified sequence
atgagctggttcgtggacctggccggcaaggccgaggacctgctgaaccgagtggaccagggcgctgccactgcactgtcacgtaaggataacgcctccaacatatattcaaagaacacagactataccgaactgcaccagcagaacactgacctgatatatcagacaggtcccaagtctacttatatctcaagtgcagctgacaatatcaggaatcagaaagccactatcctcgccgggacagctaatgtcaaggttggcagtcggaccccggtagaagcgagtcatccagtggaaaacgccagcgtgcctcgcccttcttctcacttcgtccgacgcaagaagagtgagccagatgatgagctcttattcgacttcttgaatagtagtcagaaagagccaaccggacgggtagagatccggaaagaaaagggtaaaacacccgttttccagtcctctcagacaagcagtgtgagctcagttaatcctagtgtgacgacaataaagactatcgaagaaaactccttcgggtcacagacccacgaagcagccagcaactcagactcatctcatgaagggcaggaagagagttctaaggagaacgtgagtagtaatgcggcgtgccccgaccatacccccaccccgaacgatgacgggaagtcccatgagctgtcaaatctgaggctggagaaccagctcctaaggaatgaagtccagagcctgaatcaggaaatggcgtctctgttgcagcggtccaaggagacccaggaggaactcaacaaagcccgcgcgagggtagagaaatggaatgccgatcacagcaaaagcgaccgaatgacaagaggacttagagctcaagttgacgatctgactgaagcggtagctgcgaaggattcccagctggctgtattgaaggtgaggctccaggaggctgaccagctccttagcacccgcactgaggcattagaagccctgcaatccgaaaagagccgcatcatgcaagaccagtccgagggtaattctctgcagaatcaggccctccagaccttccaggaaaggctccacgaagccgacgcaacccttaaacgcgagcaagagtcttataagcagatgcagtctgaattcgcagcgcgcctgaacaaagtggaaatggaacgccagaacctggctgaagcgatcacactggccgaaaggaagtattctgacgagaagaagagggtggacgagcttcagcagcaagtaaagctgtacaagctgaatctggagagcagcaaacaggagctgatagattacaagcagaaagcaacacgcattcttcaaagtaaagagaaattgattaacagccttaaggaggggagtggctttgaaggactcgacagcagcaccgcaagctccatggagcttgaggaactgcggcatgaaaaggagatgcagcgggaggaaattcagaagctgatgggacagattcaccaactcagatctgagttgcaagacatggaggctcaacaagttaatgaggccgagtccgccagggaacagttacaggatctgcacgatcagatcgccggacagaaggcctctaaacaggagctggagacggaactcgaaagacttaagcaagagtttcactacatcgaggaggatctataccgaactaaaaatacacttcagtcccgaatcaaagatagggatgaagaaattcagaagctgcggaaccagttgaccaataagaccctgagcaactcctctcagtccgaactcgaaaaccgccttcatcagctcactgagactcttattcaaaaacagacgatgcttgaatcattgtcgactgagaaaaattctctggtgtttcaactggagcgcctggagcagcagatgaattcagccagcggatcctcctccaatggcagttccatcaacatgagtggaatcgacaacggagaagggactcggctgcggaacgtccccgttctgttcaacgacacagaaaccaacctggccgggatgtatggcaaagttcgaaaggctgcttccagtatagaccagttctctatcagattgggtatttttctaagacgctaccccatcgccagagtgttcgttatcatctacatggcgctcttgcacctgtgggtaatgatcgtcctgctgacatatactcccgagatgcaccacgatcagccttacggcaaatag

SEQ ID NO: 152914 - DNA, 1923 bp, Artificial Sequence
  derived and/or modified sequence
atgagctggttcgtggacctggccggcaaggccgaggacctgctgaaccgtgtggaccagggtgccgctacagccctgagccgaaaagataacgcttccaatatctactcaaagaataccgattatacggaactccaccaacaaaatacagatctcatttatcagaccggcccaaaaagcacctatatatcctcagccgccgataatatccgcaaccagaaggcaaccataaagactattgaggaaaactcattcggatctcaaacgcacgaagctgcttctaatagcgactctagccacgaagggcaggaggagagttccaaagagaatgtgagcagcaacgccgcctgtcccgaccatactcccactccaaatgacgatggcaagtcccacgaactctcaaatctgagactcgagaaccagttgctgcgtaatgaagtacagagtttgaatcaggaaatggctagtctgctgcagcgttctaaagagactcaggaagaactcaacaaggcccgtgcacgcgtggagaagtggaacgctgaccattctaagagtgacaggatgacacgggggctgcgggcccaagtggatgacctgaccgaggccgtggcagctaaagatagtcagctcgccgtgctcaaagtcaggcttcaggaagcggaccaattactctccactcgcactgaggctctggaagccctgcagagcgaaaagagccgcatcatgcaggaccagtccgaagggaatagcctccagaatcaggcgctccagaccttccaggagcgattgcacgaagcagacgccaccttaaagcgagagcaggaatcctacaagcaaatgcagtcagagtttgctgcgagactgaataaggttgaaatggaaagacagaatctggctgaggccatcacgctcgctgagcgtaaatattctgatgagaagaagcgagtggacgagctccagcagcaagtgaaactctataaactgaacctggaaagcagcaaacaggagctcattgattataagcaaaaggcgactaggatcctgcaaagcaaggagaaactgattaattccctgaaggaagggtcaggatttgaaggcctggactcttctactgccagttctatggagctcgaagagctccggcatgagaaggagatgcagcgggaagagatacagaagctgatgggccagatacaccagctgcggagtgagttacaggatatggaagcgcagcaggtcaatgaggctgagtcagctcgggaacaactgcaggacctgcatgatcagatcgcaggccagaaggcttccaagcaggagctggaaaccgagctagaacgccttaaacaggaattccactacatcgaggaggacctctaccggaccaagaacaccttacagtcccggataaaggaccgtgatgaagaaattcagaagctgagaaatcaattgaccaataaaaccctatccaattcttcccaaagtgaactggagaatcgactgcatcagctcaccgaaaccctaatccagaaacagacaatgcttgagtctctctccacagaaaaaaattctttagtgttccagctggagcgcctcgagcaacagatgaattccgcctccggcagcagctcaaatggctctagtatcaacatgtctggaattgataacggcgaggggacgaggctgcgcaatgttccagtactatttaatgacacggagaccaacttagcgggtatgtatggcaaggtgcggaaagctgcctcatcgatcgaccagttttctatcaggctcggcatttttctgagaaggtaccctatagccagggttttcgtgataatttatatggccctgcttcatctgtgggtgatgatcgtcctgctgacatatactccagagatgcatcatgaccagccctacggtaagtag

SEQ ID NO: 152915 - DNA, 2196 bp, Artificial Sequence
  derived and/or modified sequence
atgtcctggttcgtcgatctcgcaggtaaggccgaggatctgcttaacagagttgaccaaggcgctgcgactgcactgtcgagaaaagataatgcctccaatatttactctaagaatacagactatactgagctgcatcagcaaaataccgacctgatctatcagacaggacctaaatccacctatatctcctcagcagccgacaacattaggaatcaaaaagctactatcttggctggcactgccaatgttaaggtaggatcgcggacccccgtagaagcctcccaccccgttgagaatgcatccgtgcctcgcccaagttcccattttgtacggaggaagaagtctgaacccgacgatgaactcctcttcgacttcctgaacagttctcaaaaggaacccaccggccgtgtcgaaatcaggaaagaaaaaggaaagaccccggttttccagagcagccagacttcttccgttagcagcgtgaaccccagtgtgaccaccatcaaaaccatcgaggagaactcattcggcagccaaactcatgaggccgcaagtaatagcgacagttctcacgagggacaggaagagtccagtaaagagaacgtttcgagtaacgccgcttgcccggaccatacccctactccgaatgatgatggtaagtcacatgagctttctaatctgcgcttagagaaccagcttctacggaacgaagtccaatccctcaatcaggagatggccagcctgttacagaggagcaaggaaacgcaagaagaactcaataaagcgagggccagagtcgaaaagtggaatgcagaccattcaaagtcagatcggatgacccgcggtctgcgggctcaggtagacgatctcaccgaagctgtcgcagctaaggactcccaacttgccgtactgaaagtccgcctgcaagaagcagaccagctgctctcgaccaggacagaggccctggaggccttgcagagtgagaaatctcggatcatgcaggatcagtccgaagggaattctttgcagaaccaggctctgcaaacattccaagaacggctgcacgaggccgatgctactctcaaacgcgagcaggagtcttataaacagatgcagtctgagtttgcggctcggctaaataaagtggaaatggaacggcagaatctggccgaggctatcactttggctgagagaaagtatagcgatgagaaaaaacgcgtggatgagctgcagcagcaggtgaaactctacaagttaaatctcgagtcgagcaaacaggagcttattgactataagcagaaggccacgcggatattacaatctaaagaaaagctaatcaattcattaaaagagggcagtggctttgaggggctggactcttctacagcttcgtctatggagcttgaggaacttcgccatgagaaagagatgcagagggaagagattcagaaactcatgggccagatacaccagttgcgaagcgaactacaggacatggaggcacagcaagtgaacgaggcagaatccgcgagggagcagctgcaagatctgcacgaccaaattgcaggccaaaaggccagtaaacaggagctcgagactgagctggaacgcctgaagcaggaatttcactacatcgaagaagacttgtacaggactaagaatacactgcagtcacggattaaggatcgggacgaagagatccagaaacttagaaaccagctgacaaataagacgctgagcaactctagccagtcggaactggaaaaccggctgcaccagctgaccgagacactgatacaaaagcagacaatgctcgagtccttgtcaaccgagaaaaattccctagtctttcagttggagagattagagcagcagatgaactcagcctcagggagttcctccaatggttcttcaatcaatatgtcaggaatagacaatggggaagggacccgtcttaggaatgtcccggttcttttcaatgacactgagacaaatttggctggtatgtacggcaaagtgaggaaggctgcatcttccattgaccagttttccatcaggctaggcatcttcctgcgacgatatcctatcgccagagtgtttgtcataatttatatggcactcctacatctctgggtcatgatcgtgctccttacctacactcccgagatgcatcacgaccagccatacggcaagtag

SEQ ID NO: 152916 - DNA, 1923 bp, Artificial Sequence
  derived and/or modified sequence
atgagctggttcgttgatcttgctggaaaggcggaagacctgctgaacagggtcgatcaaggcgctgcaaccgcattgtcaagaaaggacaatgcttcaaacatatattcaaagaacacagactacacagagctccatcagcaaaatacagaccttatctaccagacaggacctaagtctacctatatcagctctgctgctgataatattcggaaccagaaggccaccatcaaaactattgaagaaaatagcttcggcagccagacgcacgaagccgcatccaacagtgattcaagccacgagggccaggaggagtcatcgaaggaaaatgtgtccagtaacgctgcctgccctgaccacactcctactccgaatgatgacggcaaaagccatgaactgtctaatttaaggctagagaaccagctattgcgaaacgaagttcagagtcttaaccaggaaatggcatcccttttacagcgcagtaaggagacccaggaggaactgaacaaggcacgtgctagggtcgagaaatggaacgctgaccactctaaatcagatagaatgacacgcggtttgcgcgcacaggtagacgacttgacggaggcagtggcggctaaggactcccagctagccgttctaaaagtaaggctccaagaggctgaccagttgttaagtactaggactgaagcgctggaagcacttcagagtgaaaagtcacggataatgcaagatcaatccgaaggaaattcgctacagaatcaggccttgcagacctttcaggaacgattgcatgaagctgacgccaccctgaaaagagagcaggagtcgtataagcagatgcagtcagagttcgcggcacgcctgaacaaggtggagatggaaaggcagaacctggccgaggcaattacactcgccgagaggaagtacagcgacgaaaaaaagcgcgttgatgaactacagcaacaggtgaaactgtacaagctcaacctagagtcctcaaagcaggagttaatcgattataagcagaaggccaccaggattctccagagcaaggaaaagctcatcaatagtttaaaggaaggttcaggcttcgaaggtcttgactctagtactgccagcagcatggagctggaagaacttaggcatgagaaggagatgcagcgcgaggagatccaaaagctgatggggcagatccaccagctgagaagtgagctccaagatatggaagcccaacaggttaacgaagctgagagcgcccgagagcaactgcaggacctacatgaccagattgcaggccaaaaagcatctaaacaggagctggagaccgagctggagcggttgaagcaggagttccattatatcgaagaggacctgtaccgcaccaaaaatactctccagagccgtattaaagatagagatgaggagatacagaagctacgcaatcagctgactaacaagaccttgtccaatagctctcaaagcgagttggaaaacaggctgcaccagctgactgaaactctgatccaaaaacagactatgctcgagagtctgagtaccgagaagaactcacttgtgtttcaattagagaggctggaacagcaaatgaacagtgctagtggatcctcttcaaacggatccagtattaacatgagcggcatagataatggagaaggtactcgacttaggaacgtccccgtgttgttcaacgatactgaaacaaacctggctggcatgtacggcaaagtccgcaaggcggcttcatcaattgatcagttttccatcaggctggggatcttccttcggcgttacccgattgcccgtgtatttgtgataatttatatggccctgctacatctgtgggtgatgatagtactgcttacctacacgcccgagatgcaccacgaccagccatacggtaagtag

SEQ ID NO: 152917 - DNA, 2196 bp, Artificial Sequence
  derived and/or modified sequence
atgagctggtttgttgatctggctggcaaagccgaggaccttttaaaccgcgtcgaccaaggcgccgccactgccttatcccgaaaagataacgccagtaatatctactcaaaaaacactgactataccgagcttcaccagcagaacaccgacctcatttaccagacaggacccaaaagcacctacatctcatccgccgctgacaatatccgcaatcagaaagccactatccttgctggaacagcaaacgtgaaggtgggctcccggacacctgtcgaagccagccaccctgtggaaaatgcatcggtcccccggccaagctcccattttgtgaggaggaaaaagtccgaaccagacgacgagctgctcttcgatttcctgaactccagtcagaaggaaccaacagggagggtggaaatccgcaaagaaaaaggtaagacaccagtgtttcaatcaagtcagacttccagtgtttcctccgtcaacccatccgttacaaccatcaaaacaattgaggagaactcatttggatcccagacccatgaagcggctagtaactctgattcatctcacgaaggacaggaagaatcatctaaggagaatgtttcatcaaatgctgcatgtccggatcacacaccgacgcccaacgacgatgggaagtcccatgaactgtctaaccttcggctcgagaatcaactcctgaggaacgaggtacagtctctaaatcaggaaatggcaagtcttttacagaggagcaaggagacacaggaagaactgaacaaagctcgcgcccgcgttgagaaatggaacgcagatcactccaaatcggaccggatgacccggggcctgcgagcccaagtggatgacctgactgaggccgtggccgccaaggacagtcagttagcagtcttaaaggtgcggctgcaagaagccgatcagttgctctcgacaagaacggaagcactggaggccctccagagtgaaaagtctagaatcatgcaggatcagagcgaggggaattcgctccagaatcaggccctgcaaacgtttcaggaaagactgcatgaggccgacgcaacactgaagagggaacaggaatcatataagcaaatgcagtcggagttcgctgccagactgaataaggttgagatggagagacagaacctggccgaagctattaccctggcggagaggaaatactctgatgagaaaaagcgtgtagacgaactgcagcagcaagtgaaactgtataagctgaacctggagtccagcaagcaggaactgatcgactataagcaaaaggctacacggattcttcagagtaaagaaaagctgatcaatagtcttaaggaagggagtgggtttgaaggcttagatagcagtactgcgtcttcaatggagctggaagagctccgccatgaaaaagaaatgcagagagaagaaatccagaagctgatgggccagatacaccagctgcggtccgagttgcaggacatggaagctcaacaggttaatgaagccgaaagcgctagggagcagctgcaggacttacatgaccaaattgccggacagaaggcatcaaagcaggaactggagaccgagctggagagactgaaacaagaattccattacattgaggaggacttgtacagaaccaaaaacaccctgcagagccgaataaaggacagggacgaggagattcagaagctgcggaaccagttgaccaacaaaactctgagcaattcttcccagtcggaactcgaaaataggctccaccagctaacagagacactaattcagaaacagaccatgttagaatctctttctactgaaaagaactccctcgtcttccagctggagaggctggagcagcagatgaactcagcgtcaggctctagtagtaacggatcgtcgatcaacatgtcaggaatcgacaatggtgaaggaactcggctccggaacgtgcctgtgctgttcaacgacaccgagaccaatctcgcaggaatgtacggcaaggtcagaaaagctgcatcctcgatcgaccaattttcaatccgtttaggtatcttcttgcgacgttacccaatcgcgcgggtattcgtcatcatttatatggccctgttgcacctttgggttatgatcgtgttgttgacatacacccctgaaatgcaccacgaccagccctatggcaagtag

SEQ ID NO: 152918 - DNA, 2196 bp, Artificial Sequence
  derived and/or modified sequence
atgagttggtttgtcgatctggctggcaaagccgaggatctactcaatagggtcgaccagggagcagccacagccctgagccggaaggacaacgctagcaacatctatagcaagaataccgactatacagaactacaccagcaaaatacagacttaatctaccagactgggcccaaatccacctacatttcttccgcagcggacaacatcaggaaccaaaaggcgacaatattggctggcacagcaaacgtgaaggtcggttcacggacaccagtagaagcatcacaccctgtcgaaaacgctagcgtgccccgaccttcttcgcattttgtccggcgcaaaaaatccgaacccgacgacgagttgctctttgactttctcaactcctcgcagaaggaaccaacaggtcgggtcgaaatacggaaagagaagggtaagacaccagtctttcaaagctcccagacatcttccgtgtcctcagttaatccttccgtcacaacaataaagaccattgaagaaaattcattcggctcccagacacacgaggctgcctccaactccgattcgtcccacgaaggtcaagaagagtccagcaaggagaacgtgtcctccaatgccgcatgccccgaccataccccaacccctaatgacgacggaaaatcccacgaactcagcaatcttcggttggagaatcaactgttgagaaacgaggttcagtccttgaaccaggagatggcaagtctactgcagagatccaaagagacccaagaggagctcaacaaggcaagagcaagggtggagaagtggaatgccgaccatagtaaaagtgacagaatgactcgaggccttagggcacaggtggacgatctaacagaagccgtagcagccaaggattcccagctggcggtgctcaaagtgaggttacaggaagcagaccagctattgtccacacgaaccgaagcactggaagctctgcaatcagaaaaatcccgaattatgcaagaccaatccgaaggtaactctctgcagaaccaagcccttcaaactttccaggaacggctgcacgaggcagatgcaactttgaaaagggaacaagagagttataaacagatgcagtccgagtttgcagcacgcctgaacaaggttgagatggagagacaaaacctggccgaggcaatcaccttggctgaaagaaaatattccgacgagaaaaagcgagtggacgaattgcagcagcaagtaaagctttacaagctgaacctggaaagctctaaacaagaactaatagattacaaacaaaaggcaacccgcattcttcagagtaaagaaaaactgattaactctcttaaagagggcagtggtttcgagggtctggactcctctaccgcctcatccatggaactcgaggaattaagacatgagaaggaaatgcagagagaggaaatacagaagctgatgggacaaattcaccagctgaggtctgagttacaggacatggaagcgcaacaagtgaatgaagctgaatcagccagagaacaactccaagacctgcacgatcagatcgccggacaaaaggcctccaagcaagaactcgagaccgaattggaaagactaaagcaggaattccactatatcgaagaggatctataccgaaccaaaaatacgctacagtcaagaatcaaagatcgggacgaagaaatacagaaacttaggaaccagctgacgaataagacccttagcaactcatctcaaagcgagttagaaaaccgtttacaccagctgacagagactctgatccagaagcagactatgctcgagtctttgtctactgagaagaactcactcgttttccagctggagcgtttggaacagcaaatgaacagtgcatccggaagcagcagcaacggatccagtatcaacatgtcagggatcgacaatggggagggcaccagacttcgcaacgttccggtgctattcaacgacactgaaactaacctcgcgggtatgtacggcaaggtgcgaaaggcagcaagcagcatcgatcaatttagcatccgactgggaattttccttcgccgataccccatcgctcgcgtctttgttatcatctacatggccctactccacctgtgggttatgattgttctcttgacttacacgcccgaaatgcatcacgatcagccttacggtaaatag

SEQ ID NO: 152919 - DNA, 2196 bp, Artificial Sequence
  derived and/or modified sequence
atgagctggttcgtggacctggccggcaaggccgaggacctgctgaacagagtggaccagggcgccgccaccgccctgagcagaaaggacaacgccagcaacatctacagcaagaacaccgactacaccgagctgcaccagcagaacaccgacctgatctaccagaccggccccaagagcacctacatcagcagcgccgccgacaacatcagaaaccagaaggccaccatcctggccggcaccgccaacgtgaaggtgggcagcagaacccccgtggaggccagccaccccgtggagaacgccagcgtgcccagacccagcagccacttcgtgagaagaaagaagagcgagcccgacgacgagctgctgttcgacttcctgaacagcagccagaaggagcccaccggcagagtggagatcagaaaggagaagggcaagacccccgtgttccagagcagccagaccagcagcgtgagcagcgtgaaccccagcgtgaccaccatcaagaccatcgaggagaacagcttcggcagccagacccacgaggccgccagcaacagcgacagcagccacgagggccaggaggagagcagcaaggagaacgtgagcagcaacgccgcctgccccgaccacacccccacccccaacgacgacggcaagagccacgagctgagcaacctgagactggagaaccagctgctgagaaacgaggtgcagagcctgaaccaggagatggccagcctgctgcagagaagcaaggagacccaggaggagctgaacaaggccagagccagagtggagaagtggaacgccgaccacagcaagagcgacagaatgaccagaggcctgagagcccaggtggacgacctgaccgaggccgtggccgccaaggacagccagctggccgtgctgaaggtgagactgcaggaggccgaccagctgctgagcaccagaaccgaggccctggaggccctgcagagcgagaagagcagaatcatgcaggaccagagcgagggcaacagcctgcagaaccaggccctgcagaccttccaggagagactgcacgaggccgacgccaccctgaagagagagcaggagagctacaagcagatgcagagcgagttcgccgccagactgaacaaggtggagatggagagacagaacctggccgaggccatcaccctggccgagagaaagtacagcgacgagaagaagagagtggacgagctgcagcagcaggtgaagctgtacaagctgaacctggagagcagcaagcaggagctgatcgactacaagcagaaggccaccagaatcctgcagagcaaggagaagctgatcaacagcctgaaggagggcagcggcttcgagggcctggacagcagcaccgccagcagcatggagctggaggagctgagacacgagaaggagatgcagagagaggagatccagaagctgatgggccagatccaccagctgagaagcgagctgcaggacatggaggcccagcaggtgaacgaggccgagagcgccagagagcagctgcaggacctgcacgaccagatcgccggccagaaggccagcaagcaggagctggagaccgagctggagagactgaagcaggagttccactacatcgaggaggacctgtacagaaccaagaacaccctgcagagcagaatcaaggacagagacgaggagatccagaagctgagaaaccagctgaccaacaagaccctgagcaacagcagccagagcgagctggagaacagactgcaccagctgaccgagaccctgatccagaagcagaccatgctggagagcctgagcaccgagaagaacagcctggtgttccagctggagagactggagcagcagatgaacagcgccagcggcagcagcagcaacggcagcagcatcaacatgagcggcatcgacaacggcgagggcaccagactgagaaacgtgcccgtgctgttcaacgacaccgagaccaacctggccggcatgtacggcaaggtgagaaaggccgccagcagcatcgaccagttcagcatcagactgggcatcttcctgagaagataccccatcgccagagtgttcgtgatcatctacatggccctgctgcacctgtgggtgatgatcgtgctgctgacctacacccccgagatgcaccacgaccagccctacggcaagtag

SEQ ID NO: 152920 - DNA, 1923 bp, Artificial Sequence
  derived and/or modified sequence
atgagctggttcgtggacctggccggcaaggccgaggacctgctgaacagagtggaccagggcgccgccaccgccctgagcagaaaggacaacgccagcaacatctacagcaagaacaccgactacaccgagctgcaccagcagaacaccgacctgatctaccagaccggccccaagagcacctacatcagcagcgccgccgacaacatcagaaaccagaaggccaccatcaagaccatcgaggagaacagcttcggcagccagacccacgaggccgccagcaacagcgacagcagccacgagggccaggaggagagcagcaaggagaacgtgagcagcaacgccgcctgccccgaccacacccccacccccaacgacgacggcaagagccacgagctgagcaacctgagactggagaaccagctgctgagaaacgaggtgcagagcctgaaccaggagatggccagcctgctgcagagaagcaaggagacccaggaggagctgaacaaggccagagccagagtggagaagtggaacgccgaccacagcaagagcgacagaatgaccagaggcctgagagcccaggtggacgacctgaccgaggccgtggccgccaaggacagccagctggccgtgctgaaggtgagactgcaggaggccgaccagctgctgagcaccagaaccgaggccctggaggccctgcagagcgagaagagcagaatcatgcaggaccagagcgagggcaacagcctgcagaaccaggccctgcagaccttccaggagagactgcacgaggccgacgccaccctgaagagagagcaggagagctacaagcagatgcagagcgagttcgccgccagactgaacaaggtggagatggagagacagaacctggccgaggccatcaccctggccgagagaaagtacagcgacgagaagaagagagtggacgagctgcagcagcaggtgaagctgtacaagctgaacctggagagcagcaagcaggagctgatcgactacaagcagaaggccaccagaatcctgcagagcaaggagaagctgatcaacagcctgaaggagggcagcggcttcgagggcctggacagcagcaccgccagcagcatggagctggaggagctgagacacgagaaggagatgcagagagaggagatccagaagctgatgggccagatccaccagctgagaagcgagctgcaggacatggaggcccagcaggtgaacgaggccgagagcgccagagagcagctgcaggacctgcacgaccagatcgccggccagaaggccagcaagcaggagctggagaccgagctggagagactgaagcaggagttccactacatcgaggaggacctgtacagaaccaagaacaccctgcagagcagaatcaaggacagagacgaggagatccagaagctgagaaaccagctgaccaacaagaccctgagcaacagcagccagagcgagctggagaacagactgcaccagctgaccgagaccctgatccagaagcagaccatgctggagagcctgagcaccgagaagaacagcctggtgttccagctggagagactggagcagcagatgaacagcgccagcggcagcagcagcaacggcagcagcatcaacatgagcggcatcgacaacggcgagggcaccagactgagaaacgtgcccgtgctgttcaacgacaccgagaccaacctggccggcatgtacggcaaggtgagaaaggccgccagcagcatcgaccagttcagcatcagactgggcatcttcctgagaagataccccatcgccagagtgttcgtgatcatctacatggccctgctgcacctgtgggtgatgatcgtgctgctgacctacacccccgagatgcaccacgaccagccctacggcaagtag

SEQ ID NO: 152921 - protein, 307 aa, Artificial Sequence
  derived and/or modified sequence
MAALLLGAVLLVAQPQLVPSRPAELGQQELLRKAGTLQDDVRDGVAPNGSAQQLPQTIIIGVRKGGTRALLEMLSLHPDVAAAENEVHFFDWEEHYSHGLGWYLSQMPFSWPHQLTVEKTPAYFTSPKVPERVYSMNPSIRLLLILRDPSERVLSDYTQVFYNHMQKHKPYPSIEEFLVRDGRLNVDYKALNRSLYHVHMQNWLRFFPLRHIHIVDGDRLIRDPFPEIQKVERFLKLSPQINASNFYFNKTKGFYCLRDSGRDRCLHESKGRAHPQVDPKLLNKLHEYFHEPNKKFFELVGRTFDWH

SEQ ID NO: 152922 - protein, 83 aa, Artificial Sequence
  derived and/or modified sequence
MAALLLGAVLLVAQPQLVPSRPAELGQQELLRKAGTLQDDVRDGVAPNGSAQQLPQTIIIGVRKGGTRALLEMLSLHPDVAAA

SEQ ID NO: 152923 - DNA, 924 bp, Artificial Sequence
  derived and/or modified sequence
atggccgccctgctgctgggcgccgtgctgctggtggcccagccccagctggtgcccagcagacccgccgagctgggccagcaggagctgctgagaaaggccggcaccctgcaggacgacgtgagagacggcgtggcccccaacggcagcgcccagcagctgccccagaccatcatcatcggcgtgagaaagggcggcaccagagccctgctggagatgctgagcctgcaccccgacgtggccgccgccgagaacgaggtgcacttcttcgactgggaggagcactacagccacggcctgggctggtacctgagccagatgcccttcagctggccccaccagctgaccgtggagaagacccccgcctacttcaccagccccaaggtgcccgagagagtgtacagcatgaaccccagcatcagactgctgctgatcctgagagaccccagcgagagagtgctgagcgactacacccaggtgttctacaaccacatgcagaagcacaagccctaccccagcatcgaggagttcctggtgagagacggcagactgaacgtggactacaaggccctgaacagaagcctgtaccacgtgcacatgcagaactggctgagattcttccccctgagacacatccacatcgtggacggcgacagactgatcagagaccccttccccgagatccagaaggtggagagattcctgaagctgagcccccagatcaacgccagcaacttctacttcaacaagaccaagggcttctactgcctgagagacagcggcagagacagatgcctgcacgagagcaagggcagagcccacccccaggtggaccccaagctgctgaacaagctgcacgagtacttccacgagcccaacaagaagttcttcgagctggtgggcagaaccttcgactggcactag

SEQ ID NO: 152924 - DNA, 252 bp, Artificial Sequence
  derived and/or modified sequence
atggccgccctgctgctgggcgccgtgctgctggtggcccagccccagctggtgcccagcagacccgccgagctgggccagcaggagctgctgagaaaggccggcaccctgcaggacgacgtgagagacggcgtggcccccaacggcagcgcccagcagctgccccagaccatcatcatcggcgtgagaaagggcggcaccagagccctgctggagatgctgagcctgcaccccgacgtggccgccgcctag

SEQ ID NO: 152925 - DNA, 924 bp, Artificial Sequence
  derived and/or modified sequence
atggctgccctgctcctcggggccgtcctgcttgtggcacagccccagttagttccaagccgcccagcagaacttggccagcaggagttgctgcgaaaagccgggaccctccaggacgacgtgcgcgatggagtcgcacccaatggcagcgcccagcagttgccacagaccatcatcatcggagtccgtaagggggggacccgggcactgctggaaatgcttagtcttcatcccgacgtagctgcagccgagaatgaggtccacttttttgattgggaagaacattactcacatgggcttggttggtacctctcgcaaatgccgtttagctggccccatcagctcactgtcgagaaaacgcctgcatactttacatcccccaaagttcccgagcgagtatattccatgaatccttcgataagactgctgttaattctccgggacccctccgaaagggtgctgtccgactacactcaagtcttttataatcatatgcagaagcacaaaccatacccatccatcgaagagtttcttgtccgagatggacgccttaatgtggattataaggccctgaatcgcagtctttaccatgttcatatgcagaactggcttaggtttttcccccttcgacacattcacatcgtggacggagatagattaattagggatccatttcccgagattcagaaggtcgaacggtttttgaagttgtcaccccagatcaatgcaagtaacttctattttaataaaaccaaaggcttctactgtctgagagattcaggtcgggatagatgcttgcatgaaagtaagggcagggctcaccctcaggttgacccaaagctcttgaataagctgcatgaatatttccatgaaccaaataagaagttcttcgaactggtcggaaggaccttcgactggcactag

SEQ ID NO: 152926 - DNA, 252 bp, Artificial Sequence
  derived and/or modified sequence
atggcggcactcctcctcggggccgtcctcctggttgcccaaccccagctggttccatctcgcccagccgagctgggccagcaggagctgcttagaaaggcagggacactgcaggacgacgtcagggacggcgtggccccaaacggctccgctcaacagcttcctcaaactatcatcatcggggtccggaaaggcggcacccgtgccctattggagatgctcagtctgcacccagacgtcgccgcagcctag

SEQ ID NO: 152927 - DNA, 252 bp, Artificial Sequence
  derived and/or modified sequence
atggccgctctgcttttaggcgcagtcttgcttgtcgcccagccccagctggtgccctctaggcctgctgaactgggccagcaggagctgcttcgtaaggccggaactctgcaggacgacgtcagagatggcgtagcccctaacggttctgctcagcagttgccacagaccatcatcattggtgtacgtaagggtggaacaagggcactgctggagatgctcagcctgcaccctgatgtcgccgctgcttag

SEQ ID NO: 152928 - DNA, 8031 bp, Artificial Sequence
  derived and/or modified sequence
agaacctcccagcttccggaatagaggagcggggcagaaatatcctgctttttatttcagagctgacgtttgcaatcctagtgcactagcggaaaaaaaaaaaaaaaaaaaaaaaaaaaaaagctgaattttccgcgctctcctggcaaattggcgtccgctctccgacgctaaaccaaaggaaaaggagtgttcaatggcgacagggcgctctttgaagccggctcctcacgcggattctggcccaggccgccgctccggtcccagtccggctgcagagcgaattggagaggatggcacctcctgcttcccggggggcggaaggagcgccagcgcctaaggtgggtcacctgccaggaagggaatacgcatggtgcagactcacgtgggaggagcacaggtcccgggtacaagtgccgagctggcgacttagagaagaggtagactcgggctcagaccaagcaggcgtaagggagtagacgggacgtcccgtgtttgcagtgacggcggagtcacccatcccagcagcctcaccttcttggagcgctggtccctccccttggactgaaaccccaggggccaccgcaccgggtgggcgggaccgactactacccgaccagccgctggagctgcgtgccaggcggggctgtgcggagcagctgagcgcagagcggagcaccaggcacctagcgggccggactctgggcggcacccgagcgggccgggcagcagtgggcgctcgcgatcctcctctgcccaacgcgctctccctccgggcccggcctcctccgtcccctccttttgctcccgctcctcctcccgctcctccccctcctcgggattgagcaccaaaacgcccgcctgcaaggtcctctgcgccctggcagccaggagtcgccgccacgacagccgggtctcagtgggtgcctgcgccttctccccgcccgcctgccccgggccatccagaaacttgctctacccgccgcgggtgctcggcagtgctgcccatggcccagcctaggagcctatttagggcgccggacgggctggacagaggcgcggctcagtaattgaaggcctgaaacgcccatgtgccactgactaggaggcttccctgctgcggcacttcatgacccagcggcgcgcggcccagtgaagccaccgtggtgtccagcatggccgcgctgctcctgggcgcggtgctgctggtggcccagccccagctagtgccttcccgccccgccgagctaggccagcaggagcttctgcggaaagcggggaccctccaggatgacgtccgcgatggcgtggccccaaacggctctgcccagcagttgccgcagaccatcatcatcggcgtgcgcaagggcggcacgcgcgcactgctggagatgctcagcctgcaccccgacgtggcggccgcggagaacgaggtccacttcttcgactgggaggagcattacagccacggcttgggctggtacctcagccagatgcccttctcctggccacaccagctcacagtggagaagacccccgcgtatttcacgtcgcccaaagtgcctgagcgagtctacagcatgaacccgtccatccggctgctgctcatcctgcgagacccgtcggagcgcgtgctatctgactacacccaagtgttctacaaccacatgcagaagcacaagccctacccgtccatcgaggagttcctggtgcgcgatggcaggctcaatgtggactacaaggccctcaaccgcagcctctaccacgtgcacatgcagaactggctgcgctttttcccgctgcgccacatccacattgtggacggcgaccgcctcatcagggaccccttccctgagatccaaaaggtcgagaggttcctaaagctgtcgccgcagatcaatgcttcgaacttctactttaacaaaaccaagggcttttactgcctgcgggacagcggccgggaccgctgcttacatgagtccaaaggccgggcgcacccccaagtcgatcccaaactactcaataaactgcacgaatattttcatgagccaaataagaagttcttcgagcttgttggcagaacatttgactggcactgatttgcaataagctaagctcagaaactttcctactgtaagttctggtgtacatctgaggggaaaaagaattttaaaaaagcatttaaggtataatttatttgtaaaatccataaagtacttctgtacagtattagattcacaattgccatatatactagttatatttttctacttgttaaatggagggcattttgtattgtttttcatggttgttaacattgtgtaatatgtctctatatgaaggaactaaactatttcactgaaaaaaaaaaaaagattttttctggagacgctatgtttttttgaatataattaacttgcccccaactcaaaatagctgtctgtgttgcaatcattgcaaaatctaaattcttttgttacttaaaaaaacatgtttttcatggctattacaatcctctctctcccctctcctttctgcattgctctttttaatttttaatgtctcattgtgatcatcagatttatttttacttggattgtaagatttatctcctcggcgattccttgtcatttttggaggtcacagttttactcattcccatgtgtaaacttcaagtaaacaaagcaatattcaggatggagaagcagttagtgactggctagaggtctcttgggatccatcttgacctcaaagaatatttgcacatgcttctgatctcagcagttataataaagaggattaaacccttggccttcagaatgatcttggacctggatactttgccccaggtggcagctggcctccagaaagccaattagaatagaaaagagaaactgcgaaatctatgcgtgtcttcatcctgtcggttctgtgaaaggctgactaaaagggtagtagtcttttgcttagtctgaaagtctgcttacttcctgaaagacacattggcattatagacatatattccatatgcactgagacataaatatgtgtatgtttcaaaatcaactctaaatttggagtcctgaatgtgaaagaaaaagtaagttcccaagtgttgaagttaaaaagagaaaagggcagagttgaaggtagcacctaagagaaccactgtacctgcccccagaggagtggctggagttcagttttacttctgcccctgagcagccagcttgttggagatggtcacataaacccttcttatcctcagttttttcatgcattcttcatgcagtcagccttttacagaattaaacccattggattttaataaaaataaaacattcattacagtaaaagagaaaatacaaacaagcaaaataaaccggcttcctgacatggtttataccgcaggaaaatgacagaaatggacgttattaatcatctcctacacttaagaactcattgaaatttctccaagcaaccccaggatgcagatattattatggaaatttcaaagaggaggaattaggcccagagaacatgagaaacttgcccaaggtcacattgactataaactcaggcttagaggctactcagagccaaagcacaggttatttatgtatttagtttttacccaactctttctgaactcaaaaggaaaagcccagactcagagccagttcttcctgacctgacttaacatttcttcccaggtgccaaatatcttccatcctaagaggtgtgtcccagatacaggaagggcaagaagaagcctgcatttttctcagcagtgttatcagggaagtgagtcaccttggtacgtttcagcagctccagcctgacctgaccttagcatggcctatgccccaccccatatcatgaacagagagcagagaggatgccttcctctttagaatccattgaagttgtcattaagccatcatctcccccagaggaagtagcagaaatatttacagcaggcccctggtggacatggtacttttcaataggcagagagcctccctctgcagcacatcgttggatcttgcttttaccatactccttgaagagctgaagaaataagagggcccagcaaggttaagtcaagtttccaagcctgttcaggaatatggtgactgaaaggaaactgcaatgagagtctctgactgaagaagatgctctttgcaaactgcctgtaaattcctgtcccctgacagggatggtctggtagaagcatgaactgtggatgcaagaggcagcggggaggagtggaggaagacaggaccagcacatggaatataatctagctgctgggactggcatagtcgatggaggcggtggtccagtgtaaaatgatcagtgaatgtaaattcaatatgttttcatttgggggtgcagagtcgtggctaaaggaatgttcaaatgagtctaccatgagcaagggatcagaggtcctagtggcactatctgttcattcatttttggtacaaccccagccagtcattgagaaggtacactgtgtaagaaaccatcactccagacttacccaaggtatttattgctagatctcaccaagcactgtcaaattcaaaggaggccctgtagtagaccctgggctgtccttacagggccaaaatgcagtgactcaggagcctaatagcacccggtccctccaaaacatgccttctaccaattccattaacagagacaggtgtcagtggaaggggtgggtctcctgtccagaccaccccggcccgggagcagcctgggggatctaggtgggtccttccagagaggcaagtgagaacaactgaaccaagcctcagctattagatttggaatattcacacacttgacactccagagtcagaacagccccttccctttcccttcctcctggaatcagatagggttgaaatccttttaacaccatttggttatcagctcacaacctgaaggtttgcaagtttaggaaaagtgacatgcctctgagcacagggtgctttactccttctgtgcttggaggcttacccaactgaaaggagatggagggcaggagaggccgatgcctagcgtgcctgctgcttacaggggtggtgtcacaggtcaccattattcattaaaattttacttttttgatcccctaccacatgctcaacatggtattgagtcctcaagaatataaaaagaaaatacaacaggaaccagtagtcattaactgtttgttctggactttaataaaagtacagagggtcttggagtacaaaggcaaagacatttagctgtgtatagaatgggtgggggaatgtgttccatggtttggcattcagttcagcaacattcctgagagaaatcaactagcccccttatagagaagaggaaactgagatttaaaaagtggtcctggccgggtgtagtggctcacgcctgtaatcccagcactttgggaggccaagacaggtgaatcacgaggtcaggagttcaagaccagcctgaccaacatggtgaaaccccatctctactaaaaatacaaaaatgtgccaggcatggtggcgagtgcctgtaatcccagctactcaggacactgaggcaagagaaccacttgaacctggcaggtggaggttgcagggggccgagatgatgccactgcactccagcctgggcaacagagcaagactccatctcaaaaaaaaaaaaaaaaaaaaaagataaattaataataaaaaaataaaaaagtaatcctgacttcaagtcatttttttcagaagaaaggattcttgctcactccagggaaatagtccagaaatggaaaatgttgacatcacaaatcacaaaagaaggtgaaaaatatcagagaccctctccagaatgtcatttctcagaaatattaagaaatagagaatcttcccagaggtcgcatgtcagggcaggtcacttaacttgtgggccacagagaccctgaccttcctgtgggaaggcttcatggaggaattgccataaagctggggcacgcacgaatggcagtagtgtcaccagagcagggcattctgaacaagggaagcttgagacatgaagacagtggtcacggggagaggctgggggtagagggtagaggtaggcaagagatttgtctgagtggcatgtcaaatgtgttaaactcaatgagaagctactgctttccaaggctggagtgttggaagcttacttagcaggcacccatgtgaatttggctcctgtgcaggtgtatctgttgcataaaaatagctatcatttgttgcacacctgccatgtgcttggtattttaaatatattgcttctaacctatataacaaccctaggaagtagaaaatgggctactaattttacagaaaaataaactcagaaattaaagggcttgcccatgttgatagagccattacttcttacaaatgaaattttgtctccgatgtctctgctccttttcagtccatctatttgtgggtaagtggaggaagatataaagcatatgcatctgtctattaggcagagcctgtaagggaaattatgggcatctaggatttggagttggacagttagggtgatatcaagattaccttcaagcaaagcagtggctgggatttgatgcaacagggacgtgataaaacatgctcctaaccggcagcagctcatttcggaagactgagcctgagttaaaggccagagcaacataacagagttctccaaacagcacacagtgagagaaggccaaagctaaagaggacatcatcggatttagctgcttcactaaagtgttttgatgtagaaaatgaccttggtgctttagttatccctgatgtcaagacctttactctattttgcccaaatttctcagttagataacagcaaagagagagagccagaagacctgggtgtgcatcctagctgtaccaatcactgaccatgggatcttagattcagactctgagaacctccatttccttctccataaaaatgggcagatatgtactgtactctgttgggggaaaactccaactcaatgagataaagtaggtaaaaactataaacccagtgcatatgttacttagtggttaaaaacatttgggactttaggagacagaccaaaactggttttgaaccagtcggcagaaatgcgctgccttttttcctcctctgcttcccagctatgtgactgtagctattgctgttaatgctccatccagagctcatttaccagggaagtgctctcaaccccagctgccacaaagattgtcttctgtactattttctgaaggatttctcttagttggcaggagttttcttacctgaagatgcctgagaaatgttgtccaccccactcccctgctttcctagggttagggcatgactaatgattgactgacccatgtgggatggggcatgggggtagtagggtaacagtccaccctcattgcctccaggcaggacaacctctggtgcaactcatgctcagagctcctcgtgagatcaggctgaggctagacttctcctgaaactgtacttttacttatttcttccgaaacttcatccttttcccacattaccttactcatttcttctgctaccctattctcagtaaatgtgtttcccaagaaaacaggaatcccccctcagactttgcttctagaccatccactctaaagtcttaaccttgcatgcatgttttcttctctctgtattttacatgtataacgtgatcaacccacggagttattagaattcttccaattaaatgagatatagcagagaatgagtctattttattggctagcaaatagcaaagtgttaaattcaataatggctgaaattgttaccaagtagtaggctcttttattagcttatcggactaccaaaatagtataatgcatcaatatcaaacttaaatttcaacttcataaaacaattctgggcccaacaaatatgaaggtattgctccatcttatgtagcaacatcttgtatttctattgtttgataaatattccacttagaactaa

SEQ ID NO: 152929 - DNA, 496 bp, Artificial Sequence
  derived and/or modified sequence
gacagggcgctctttgaagccggctcctcacgcggattctggcccaggccgccgctccggtcccagtccggctgcagagcgaattggagaggatggcacctcctgcttcccggggggcggaaggagcgccagcgcctaagtaattgaaggcctgaaacgcccatgtgccactgactaggaggcttccctgctgcggcacttcatgacccagcggcgcgcggcccagtgaagccaccgtggtgtccagcatggccgcgctgctcctgggcgcggtgctgctggtggcccagccccagctagtgccttcccgccccgccgagctaggccagcaggagcttctgcggaaagcggggaccctccaggatgacgtccgcgatggcgtggccccaaacggctctgcccagcagttgccgcagaccatcatcatcggcgtgcgcaagggcggcacgcgcgcactgctggagatgctcagcctgcaccccgacgtggcggccgc

SEQ ID NO: 152930 - DNA, 491 bp, Artificial Sequence
  derived and/or modified sequence
ctaagaagaatcgaggctggagcaggtggagtggatgcagagggaaccaggaagcaaaggctggggattttcccatcctcctcacctcctgccctagcacctctgctctggaagtcccgagggaccggttgatcttaattgaaggcctgaaacgcccatgtgccactgactaggaggcttccctgctgcggcacttcatgacccagcggcgcgcggcccagtgaagccaccgtggtgtccagcatggccgcgctgctcctgggcgcggtgctgctggtggcccagccccagctagtgccttcccgccccgccgagctaggccagcaggagcttctgcggaaagcggggaccctccaggatgacgtccgcgatggcgtggccccaaacggctctgcccagcagttgccgcagaccatcatcatcggcgtgcgcaagggcggcacgcgcgcactgctggagatgctcagcctgcaccccgacgtggcggccgc

SEQ ID NO: 152931 - DNA, 924 bp, Artificial Sequence
  derived and/or modified sequence
atggccgccctgctgctgggcgctgtgctgctggtggcccagccccagctggtgcccagcaggcctgctgagctgggccagcaggagctgctgaggaaggccggcaccctgcaggatgatgtgagagatggagtggcccccaacggcagcgcccagcagctgccccagaccatcatcatcggcgtgaggaagggcggcacccgggccctgctggagatgctgagcctgcacccagatgtggccgctgctgaaaatgaggtgcacttctttgactgggaggagcactacagccacggcctgggctggtacctgagccagatgcccttctcctggccccaccagctgactgtggagaagaccccagcctacttcaccagccccaaggtgcctgagcgggtgtacagcatgaaccccagcatccggctgctgctgatcctgcgggaccccagcgagcgggtgctgagtgactacacccaggtgttctacaaccacatgcagaagcacaagccctaccccagcattgaggagttcctggtgagagatggccgcctgaatgtggactacaaggccctgaacagaagcctgtaccacgtgcacatgcagaactggctgcgcttcttccccctgcggcacatccacatcgtggatggagacaggctcatccgggaccccttccctgagatccagaaggtggagcgcttcctgaagctgagcccccagatcaatgccagcaacttctacttcaacaagaccaagggcttctactgcctgcgggacagcggccgggaccgctgcctgcacgagagcaagggccgggcccacccccaggtggaccccaagctgctgaacaagctgcacgagtacttccacgagcccaacaagaagttctttgagctggtgggccgcacctttgactggcactag

SEQ ID NO: 152932 - DNA, 252 bp, Artificial Sequence
  derived and/or modified sequence
atggccgccctgctgctgggcgctgtgctgctggtggcccagccccagctggtgcccagcaggcctgctgagctgggccagcaggagctgctgaggaaggccggcaccctgcaggatgatgtgagagatggagtggcccccaacggcagcgcccagcagctgccccagaccatcatcatcggcgtgaggaagggcggcacccgggccctgctggagatgctgagcctgcacccagatgtggccgccgcctag

SEQ ID NO: 152933 - DNA, 924 bp, Artificial Sequence
  derived and/or modified sequence
atggccgccctgctgctgggcgccgtgctgctggtggcccagccccagctggtacctagtaggccagcggaactgggtcagcaggaacttctacgcaaagccggtacattacaggatgacgtcagggacggggtggcacccaacggcagtgcccaacagctgcctcagaccatcatcatcggagtccgcaagggcggcacccgcgctctgctggagatgctgtctctgcatcccgacgtggccgctgccgaaaacgaggtgcacttcttcgactgggaagagcactattcccacgggctgggctggtacctgagccagatgccattctcttggccacaccagctaaccgtcgaaaagactccagcttactttacctccccaaaagtgccagagcgtgtgtattctatgaaccccagcataaggttactgctgatacttcgcgatccttctgaaagagtgctctcagactatacacaagtgttctataaccatatgcagaaacacaaaccttatcccagcattgaggaatttctcgttcgcgatgggcgtttaaacgtcgattacaaggctctgaaccgtagcctttaccacgtacatatgcaaaactggctgagattctttcccctccgacacattcacatagtggatggggatcgcctgatacgggacccttttcctgagattcaaaaagtggaaagattcctcaaactctcaccacagattaatgcatctaatttttacttcaacaagactaaaggcttctactgtctacgggattcaggccgtgaccggtgcctccatgaatcaaaggggcgggctcatcctcaggtggatccgaagcttctcaataagctgcatgaatattttcacgaacctaacaaaaaattttttgaactagtgggccgcacatttgattggcactag

SEQ ID NO: 152934 - DNA, 252 bp, Artificial Sequence
  derived and/or modified sequence
atggccgccctgctgctgggcgccgtgctgctggtggcccagccccagctggtgccgtctcgccccgcggagctggggcaacaggagcttctccggaaagccggtactcttcaggacgatgtgcgcgatggtgtagctccaaatgggagcgctcagcagttgccacagacgatcattatcggcgtgaggaagggcggaactagggccctgctggagatgctctctctgcatccagacgtcgctgctgcatag

SEQ ID NO: 152935 - DNA, 252 bp, Artificial Sequence
  derived and/or modified sequence
atggccgccctgctgctgggcgccgtgctgctggtggcccagccccagctggtgccctcccggcctgccgagctgggccagcaggaactgctgcgcaaggcagggacgctccaggacgatgtgcgggatggcgtggctcccaatggctccgcacaacagctacctcagacgatcattatcggagtgagaaaggggggaactagagctttgttggaaatgctgtctttacacccagatgtggcagctgcctag

SEQ ID NO: 152936 - DNA, 924 bp, Artificial Sequence
  derived and/or modified sequence
atggctgcactcctcctgggtgctgtgctgctggtggcacagccacagcttgtgcccagtcggccagccgaactcgggcaacaagagcttctcagaaaagcaggcacactacaggacgatgtgcgcgatggtgtggccccaaatgggtctgctcagcaattaccccagaccataattataggggttcgcaaaggagggactcgtgccctgctggaaatgttgtccctgcaccctgatgtcgctgctgcagagaacgaagtacacttcttcgactgggaggaacattactcacatgggctgggctggtatctgtcacagatgccgttcagctggccgcatcagttaactgttgagaaaacccctgcctacttcacctctcccaaagtgccagaaagagtttactccatgaatccgagcatcaggttgcttcttatcctgcgcgaccccagcgagcgggtgctatctgattacacccaggtgttctataatcacatgcagaaacacaagccctacccaagcattgaagagttcctggttcgcgacggtcgcttgaatgtggattataaggccctcaaccgctctctgtaccacgtgcacatgcaaaactggctaagattcttccctctcagacacatccacatcgtagatggtgaccggctgatccgggatccattccctgagattcagaaagttgagcgattcctcaaattatctccgcagatcaacgctagtaatttctatttcaacaagacgaaaggcttctattgcttgagagacagtgggagagatcgctgtttgcacgaatcaaaaggacgagcccatccacaggtggacccaaagctcctgaacaagcttcatgagtacttccacgagccaaacaaaaagtttttcgagttggtcggccgtacattcgattggcattag

SEQ ID NO: 152937 - DNA, 252 bp, Artificial Sequence
  derived and/or modified sequence
atggctgcactgctgctcggcgctgttctgctggtggcacaacctcagctagttccttcccgccctgcagagctcggccagcaggagttgctgcgcaaagcgggtacactgcaggacgatgtgcgcgacggcgtggcccctaatgggtcagcccagcagcttccccagactattattatcggcgtgaggaaaggcggtaccagggcactcctcgagatgctgtctctgcaccccgacgtcgctgccgcatag

SEQ ID NO: 152938 - DNA, 252 bp, Artificial Sequence
  derived and/or modified sequence
atggcggctctgttactaggggctgtcttgctagtcgctcagccgcagctggtccctagccggcctgctgaactcgggcaacaggaactattgcggaaagcgggtactctgcaagacgacgtaagagacggtgttgccccaaacggcagcgcccagcagctgccccagactattataataggcgtgcgtaagggtggcaccagagcgctgctcgagatgctgtcccttcatccggacgtggccgctgcgtag

SEQ ID NO: 152939 - DNA, 924 bp, Artificial Sequence
  derived and/or modified sequence
atggccgccttgttacttggagctgttctgcttgttgcccagcctcaacttgtcccgtctagacccgcagagttgggccagcaggagctgctgcgcaaagctggtacattgcaagacgatgttcgcgatggagtcgcgcctaacgggtccgcacaacagctccctcagacaattatcataggggtccgaaagggcggtacacgcgctcttctcgaaatgctgagtctgcaccctgacgttgctgccgccgagaatgaagtccactttttcgactgggaagagcactattctcatggactgggctggtacctatcacaaatgcccttctcatggccacaccagctgacagtcgaaaagactcctgcctattttaccagccctaaggtccccgaacgagtttatagtatgaacccaagcattaggttattactcattctcagggatccctccgagcgagtcctgagtgattatacccaggttttttataaccatatgcaaaagcataaaccctacccctctatcgaggagttcttagttcgcgatggacggctgaacgtagactataaagccctcaaccgcagcctttaccatgtacacatgcagaactggctcaggtttttcccactgcgccatattcacattgttgatggagaccggctaatccgagatcctttcccagaaatccagaaggtcgagagatttctgaagctgagccctcagatcaatgcatcgaacttctattttaataaaactaaaggtttctactgtttaagagattcgggcagagatagatgcctgcatgagtccaaagggagggcccacccacaagttgatcctaagctgctgaacaagctccacgagtacttccatgaacctaacaagaaattctttgagttagtcggaagaaccttcgattggcattag

SEQ ID NO: 152940 - DNA, 924 bp, Artificial Sequence
  derived and/or modified sequence
atggcagctcttctgcttggagccgtcctcctggtcgctcagccccagctggtaccgagtcgaccagccgagttgggacagcaggaactgcttagaaaggccggtactttgcaagatgacgttcgtgacggagtagcgccgaacggaagtgctcaacagttaccacaaactatcataattggcgtgagaaaaggtgggacaagagctctgctggaaatgttatctcttcatcctgacgtcgccgccgctgaaaacgaagttcacttcttcgattgggaagaacactacagccacggcctgggttggtacctgtcacagatgccattttcatggccacaccaactcacagtggagaaaactcccgcgtattttaccagcccaaaagttccagaacgcgtttactcgatgaatcctagcataagattgttgctgattctacgtgatccttctgaacgcgtcctgagtgactacacacaagtattttacaatcacatgcagaaacacaaaccttatcctagcatcgaagaatttcttgttagagacggacggctaaacgtcgactataaggcattaaacagatcattgtaccatgtacatatgcagaattggttacgcttcttccccttgagacatattcatatagtcgatggagaccgcctaatcagggatcctttccccgaaattcaaaaagtcgagagatttctgaagctgagcccacaaatcaacgcctccaacttctatttcaacaaaacaaagggattttattgtcttcgcgattctgggcgagaccgttgtctgcacgaatctaagggaagggcacatccccaggtggatcctaaattactaaacaagctgcacgaatacttccacgaaccaaataaaaaattctttgagttagttggacggacttttgattggcattag

SEQ ID NO: 152941 - RNA, 924 nt, Artificial Sequence
  derived and/or modified sequence
auggccgccuuguuacuuggagcuguucugcuuguugcccagccucaacuugucccgucuagacccgcagaguugggccagcaggagcugcugcgcaaagcugguacauugcaagacgauguucgcgauggagucgcgccuaacggguccgcacaacagcucccucagacaauuaucauagggguccgaaagggcgguacacgcgcucuucucgaaaugcugagucugcacccugacguugcugccgccgagaaugaaguccacuuuuucgacugggaagagcacuauucucauggacugggcugguaccuaucacaaaugcccuucucauggccacaccagcugacagucgaaaagacuccugccuauuuuaccagcccuaagguccccgaacgaguuuauaguaugaacccaagcauuagguuauuacucauucucagggaucccuccgagcgaguccugagugauuauacccagguuuuuuauaaccauaugcaaaagcauaaacccuaccccucuaucgaggaguucuuaguucgcgauggacggcugaacguagacuauaaagcccucaaccgcagccuuuaccauguacacaugcagaacuggcucagguuuuucccacugcgccauauucacauuguugauggagaccggcuaauccgagauccuuucccagaaauccagaaggucgagagauuucugaagcugagcccucagaucaaugcaucgaacuucuauuuuaauaaaacuaaagguuucuacuguuuaagagauucgggcagagauagaugccugcaugaguccaaagggagggcccacccacaaguugauccuaagcugcugaacaagcuccacgaguacuuccaugaaccuaacaagaaauucuuugaguuagucggaagaaccuucgauuggcauuag

SEQ ID NO: 152942 - RNA, 924 nt, Artificial Sequence
  derived and/or modified sequence
auggcagcucuucugcuuggagccguccuccuggucgcucagccccagcugguaccgagucgaccagccgaguugggacagcaggaacugcuuagaaaggccgguacuuugcaagaugacguucgugacggaguagcgccgaacggaagugcucaacaguuaccacaaacuaucauaauuggcgugagaaaaggugggacaagagcucugcuggaaauguuaucucuucauccugacgucgccgccgcugaaaacgaaguucacuucuucgauugggaagaacacuacagccacggccuggguugguaccugucacagaugccauuuucauggccacaccaacucacaguggagaaaacucccgcguauuuuaccagcccaaaaguuccagaacgcguuuacucgaugaauccuagcauaagauuguugcugauucuacgugauccuucugaacgcguccugagugacuacacacaaguauuuuacaaucacaugcagaaacacaaaccuuauccuagcaucgaagaauuucuuguuagagacggacggcuaaacgucgacuauaaggcauuaaacagaucauuguaccauguacauaugcagaauugguuacgcuucuuccccuugagacauauucauauagucgauggagaccgccuaaucagggauccuuuccccgaaauucaaaaagucgagagauuucugaagcugagcccacaaaucaacgccuccaacuucuauuucaacaaaacaaagggauuuuauugucuucgcgauucugggcgagaccguugucugcacgaaucuaagggaagggcacauccccagguggauccuaaauuacuaaacaagcugcacgaauacuuccacgaaccaaauaaaaaauucuuugaguuaguuggacggacuuuugauuggcauuag

SEQ ID NO: 152943 - protein, 650 aa, Artificial Sequence
  derived and/or modified sequence
MMGIGKNTTSKSMEAGSSTEGKYEDEAKHPAFFTLPVVINGGATSSGEQDNEDTELMAIYTTENGIAEKSSLAETLDSTGSLDPQRSDMIYTIEDVPPWYLCIFLGLQHYLTCFSGTIAVPFLLADAMCVGYDQWATSQLIGTIFFCVGITTLLQTTFGCRLPLFQASAFAFLAPARAILSLDKWKCNTTDVSVANGTAELLHTEHIWYPRIREIQGAIIMSSLIEVVIGLLGLPGALLKYIGPLTITPTVALIGLSGFQAAGERAGKHWGIAMLTIFLVLLFSQYARNVKFPLPIYKSKKGWTAYKLQLFKMFPIILAILVSWLLCFIFTVTDVFPPDSTKYGFYARTDARQGVLLVAPWFKVPYPFQWGLPTVSAAGVIGMLSAVVASIIESIGDYYACARLSCAPPPPIHAINRGIFVEGLSCVLDGIFGTGNGSTSSSPNIGVLGITKVGSRRVIQCGAALMLALGMIGKFSALFASLPDPVLGALFCTLFGMITAVGLSNLQFIDLNSSRNLFVLGFSIFFGLVLPSYLRQNPLVTGITGIDQVLNVLLTTAMFVGGCVAFILDNTIPGTPEERGIRKWKKGVGKGNKSLDGMESYNLPFGMNIIKKYRCFSYLPISPTFVGYTWKGLRKSDNSRSSDEDSQATG

SEQ ID NO: 152944 - protein, 304 aa, Artificial Sequence
  derived and/or modified sequence
  misc_feature (1)..(1): Xaa can be any naturally occurring amino acid
XGYDQWATSQLIGTIFFCVGITTLLQTTFGCRTIFLVLLFSQYARNVKFPLPIYKSKKGWTAYKLQLFKMFPIILAILVSWLLCFIFTVTDVFPPDSTKYGFYARTDARQGVLLVAPWFKVPYPFQWGLPTVSAAGVIGMLSAVVASIIESIGDYYACARLSCAPPPPIHAINRGIFVEGLSCVLDGIFGTGNGSTSSSPNIGVLGITKVGSRRVIQCGAALMLALGMIGKFSALFASLPDPVLGALFCTLFGMITAVGLSNLQFIDLNSSRNLFVLGFSIFFGLVLPSYLRQNPLVTGITGID

SEQ ID NO: 152945 - protein, 536 aa, Artificial Sequence
  derived and/or modified sequence
MMGIGKNTTSKSMEAGSSTEGKYEDEAKHPAFFTLPVVINGGATSSGEQDNEDTELMAIYTTENGIAEKSSLAETLDSTGSLDPQRSDMIYTIEDVPPWYLCIFLGLQHYLTCFSGTIAVPFLLADAMCVGYDQWATSQLIGTIFFCVGITTLLQTTFGCRTIFLVLLFSQYARNVKFPLPIYKSKKGWTAYKLQLFKMFPIILAILVSWLLCFIFTVTDVFPPDSTKYGFYARTDARQGVLLVAPWFKVPYPFQWGLPTVSAAGVIGMLSAVVASIIESIGDYYACARLSCAPPPPIHAINRGIFVEGLSCVLDGIFGTGNGSTSSSPNIGVLGITKVGSRRVIQCGAALMLALGMIGKFSALFASLPDPVLGALFCTLFGMITAVGLSNLQFIDLNSSRNLFVLGFSIFFGLVLPSYLRQNPLVTGITGIDQVLNVLLTTAMFVGGCVAFILDNTIPGTPEERGIRKWKKGVGKGNKSLDGMESYNLPFGMNIIKKYRCFSYLPISPTFVGYTWKGLRKSDNSRSSDEDSQATG

SEQ ID NO: 152946 - DNA, 1953 bp, Artificial Sequence
  derived and/or modified sequence
atgatgggaattgggaaaaataccacttccaaatctatggaggctgggtcctctacagagggcaagtacgaagatgaggccaagcacccggcctttttcacgctgcccgtggtgatcaacggaggcgcaacttcgagcggggagcaggacaacgaagatactgaactgatggccatttacacgacggagaatggaatcgcggaaaagtcttctctcgccgagactctcgatagcacggggtctctagacccgcagcgcagtgacatgatatacactatcgaagacgtccctccttggtatctgtgcatttttttaggtctccagcattatctcacctgtttctccggcactattgcggtgcccttcctgctcgcagatgccatgtgcgtggggtatgaccaatgggcgacgtcccagctaattggaactatattcttttgcgtgggaatcaccaccctgctgcagaccactttcggttgccgactgcctctgttccaggcatctgcatttgctttcttagcacctgcccgagcaatactatccctggataaatggaaatgcaatacgacagacgtctccgtagcaaatggcactgctgaattactgcataccgaacatatctggtatccgcgtatcagagaaatccaaggggccattatcatgagctcacttatcgaggtggtaatcggcctcctaggattacccggtgctctgctgaagtatatcgggccattaactatcacccctacggttgcattaatcgggctgtccgggtttcaagcggcaggagaaagggccgggaagcattggggcatcgctatgttgaccatctttctggtgctgttgtttagtcaatacgcaaggaatgtcaagttccctctgccgatctacaaaagcaagaagggctggaccgcttataagttgcagctgtttaaaatgtttcctattatactggccatcctggtctcttggttactctgctttatctttacagtcactgacgtgttccctcctgactcaacaaagtatggattttacgctcgcacagacgcaagacaaggggtactgcttgtggctccttggttcaaagtcccgtatccattccagtggggattacctaccgtttcggccgctggagtgattggaatgttaagtgccgtcgtcgcatctataatagaatcgatcggtgactactatgcttgcgcaaggctgtcatgcgcccccccccctcccatacacgcaatcaaccgtgggatattcgtcgagggactctcatgtgtgcttgatggcatctttggtacaggcaacgggagcacatcatcatcacctaatatcggagtcttggggattaccaaggtgggctcccggagggtaatccagtgtggcgctgccctgatgttagcccttggaatgataggcaagttttccgcattgtttgcctccctccctgatcctgtgcttggagccctcttctgtacacttttcgggatgatcacagctgtgggtttatccaacctgcagttcatagacttaaattcttcccggaacctcttcgttctggggttctccatcttttttggcttggtgttacccagctatcttcgacaaaatccgttggtgacagggattaccggtattgaccaggtgttaaatgtcttgcttaccacggccatgtttgttggcggatgcgttgccttcatcctcgacaatacgatccctgggacaccggaagaaaggggcataaggaagtggaagaaaggagtcggaaaaggcaacaagtctctggatggcatggaatcttataatctcccattcgggatgaatataatcaagaaatatcgctgttttagttacctccccatttcccctacgtttgtgggatatacctggaagggtctgagaaagtccgacaatagtagatcgtctgacgaggattcgcaagccaccggatag

SEQ ID NO: 152947 - DNA, 1953 bp, Artificial Sequence
  derived and/or modified sequence
atgatgggcattggaaagaatacaacctcgaaaagtatggaggccggatccagcaccgagggtaaatacgaggatgaagctaagcatcccgcctttttcactcttccagttgtgatcaacggcggcgctaccagcagcggagaacaggataacgaagatactgaacttatggcaatttacaccaccgagaacggaatcgccgagaagtcctccttagccgagactctggacagcaccgggagcctggacccacagagatcagacatgatctataccatagaagacgttcccccctggtacttgtgcatctttttaggcctgcaacactacttaacatgctttagcggcactatcgccgttcccttcttactggccgacgccatgtgtgtcggttatgatcagtgggctacaagccaactcatcggcacaattttcttctgcgtgggaattactacactgttgcagactactttcggttgccgcctaccgctgttccaggccagcgcttttgcattcctggcacccgcccgagcaattttgagcttggataagtggaagtgcaataccaccgacgtgtcagtggcgaatggcactgctgagctcttacataccgagcacatctggtaccctagaattcgtgagatccagggagcaataataatgtcttctcttatcgaagttgttatcgggttgctaggcctccccggcgctctcctgaaatatattgggcccctgaccatcacgcctaccgtggccctcattggactttcaggatttcaggcggctggggaacgcgctggcaagcactggggcatcgctatgcttactatcttcttggtattactgttcagccagtacgcaaggaacgtgaaatttcccctgcctatctataaatccaaaaaaggatggacagcctacaagcttcagttgttcaaaatgtttcctattatactggccatccttgtgtcctggctcttgtgctttatcttcacagtgacagacgtgtttccccccgacagcaccaagtacggtttttacgccaggacggatgctcgccaaggggtgctgttggtagcaccatggtttaaggtgccctacccattccagtggggattgcccacagtttcagccgccggcgttatcggcatgctgagtgccgttgtcgcttcaatcatcgaatctattggcgactactacgcctgcgccagacttagctgtgcacccccccctccaattcacgccattaatagggggattttcgtggaggggcttagttgtgtgcttgacgggattttcgggaccggcaacggtagcactagttccagccctaacattggagtcttaggaatcaccaaagtcggatccagacgtgtgatccaatgtggcgcagccttgatgctggcccttggaatgatcggcaagtttagtgcacttttcgccagtctgccagatccagtgctgggtgccctgttctgcaccctgtttggcatgattacagcagtgggcctgagtaatctacagtttatcgatctaaatagcagcaggaatctgttcgtgctcggcttttctatatttttcgggctggtgctaccaagctatctccgtcaaaatcctcttgtcactggaatcaccggcatagatcaagttcttaacgtgctgctgactactgccatgtttgtgggcggttgtgtggctttcatcttggacaacaccatccctgggaccccagaagagcggggaatccgaaaatggaaaaaaggcgtagggaaaggcaataagtccctggatggaatggagagttataaccttccctttggcatgaacataatcaagaagtacagatgcttctcttatctccctatttcgcctacattcgtcgggtatacgtggaagggcctgcggaagtccgacaacagccgttcaagcgacgaagatagccaggccacgggatag

SEQ ID NO: 152948 - DNA, 1953 bp, Artificial Sequence
  derived and/or modified sequence
atgatgggcatcggcaagaacaccaccagcaagtccatggaggccggcagcagcacagagggcaagtatgaagatgaggccaagcacccagccttcttcaccctgcctgtggtgatcaatggaggagccaccagcagcggggagcaggacaatgaagacacagagctgatggccatctacaccacagaaaatggaattgctgagaagagcagcctggccgagaccctggacagcacaggcagcctggacccccagaggagtgacatgatctacaccattgaagatgtgcccccctggtacctgtgcatcttcctgggcctgcagcactacctgacctgcttcagcggcaccatcgctgtgcccttcctgctggctgatgccatgtgtgtgggctatgaccagtgggccaccagccagctgattggcaccatcttcttctgtgtgggcatcaccaccctgctgcagaccaccttcggctgccgcctgcccctcttccaggccagcgcctttgccttcctggccccagcccgggccatcctgagcctggacaagtggaagtgcaacaccacagatgtgtctgtggccaacggcacagctgagctgctgcacacagagcacatctggtacccccgcatccgggagatccagggcgccatcatcatgagcagcctgattgaggtggtgattggcctgctgggcctgcccggggccctgctgaagtacatcggccccctgaccatcacccccaccgtggccctgattggcctgagcggcttccaggccgccggggagcgggccggcaagcactggggcatcgccatgctgaccatcttcctggtgctgctcttcagccagtatgccagaaatgtgaagttccccctgcccatctacaagagcaagaagggctggacagcctacaagctgcagctgttcaagatgttccccatcatcctggccatcctggtgtcctggctgctgtgcttcatcttcaccgtgacagatgtgtttcctccagacagcaccaagtatggcttctacgccaggacagatgcccggcagggcgtgctgctggtggccccctggttcaaggtgccctaccccttccagtggggcctgcccaccgtgtctgctgctggggtgattggcatgctgtctgctgtggtggccagcatcatcgagagcattggagactactatgcctgtgcccggctgagctgtgcccctcctccacccatccacgccatcaacagaggcatctttgtggagggcctgagctgtgtgctggatggcatcttcggcactggaaatggcagcaccagcagcagccccaacattggagtgctgggcatcaccaaggtgggcagccggcgggtcatccagtgtggggccgccctgatgctggccctgggcatgattggcaagttcagcgccctgtttgccagcctgcctgaccctgtgctgggcgccctcttctgcaccctgtttggcatgatcacagctgtgggcctgagcaacctgcagttcatcgacctgaacagcagcaggaacctgtttgtgctgggcttcagcatcttcttcggcctggtgctgcccagctacctgcggcagaaccccctggtgacaggcatcaccggcatcgaccaggtgctgaatgtgctgctgaccacagccatgtttgtgggcggctgtgtggccttcatcctggacaacaccatccctggcaccccagaggagcggggcatcaggaagtggaagaagggcgtgggcaagggcaacaagagcctggatggcatggagagctacaacctgcccttcggcatgaacatcatcaagaagtaccgctgcttctcctacctgcccatcagccccacctttgtgggctacacctggaagggcctgaggaagagtgacaacagccgcagcagtgatgaggacagccaggccactggatag

SEQ ID NO: 152949 - DNA, 1953 bp, Artificial Sequence
  derived and/or modified sequence
atgatgggcatcggcaagaacaccaccagcaagagcatggaggccggatcctcaaccgagggcaaatatgaggacgaggcgaagcaccccgcattcttcacacttcccgtcgtaatcaacggtggggctacgtcttcaggtgagcaggataacgaggacacagagctgatggccatatacactacagaaaatggtatcgccgagaaatcaagtctcgctgaaacactggatagcacagggtctctggatccacaaaggagtgacatgatttataccattgaggatgttcccccctggtatctttgcatctttctcggcttacagcactatctgacctgtttctccggaacgatcgctgtcccgttcttacttgccgacgccatgtgtgtcgggtacgaccagtgggcaacttcccaactcataggcactatctttttttgcgtcggcattacaaccctgctgcagacgacgttcgggtgcagacttccattattccaggctagtgcgttcgcatttctcgcaccggcccgagctatattgtctctcgataagtggaagtgtaatacaacggatgtcagtgtggctaatggcactgcggaattgctgcacactgaacacatctggtatcccaggatcagggaaatacaaggtgcaataattatgtccagcctgatagaagtggtgatcggcctgcttggccttcctggggctctgcttaagtacatcgggcctctaactatcactccaacggtcgccctgatcggtctttccggcttccaggctgctggtgaacgagccgggaaacattggggaatcgctatgttgactatctttctggtgctcctctttagccagtacgccaggaatgtgaagttcccacttcccatttacaagtcgaagaaaggatggacagcgtacaagctgcaactttttaagatgtttcctatcatcctcgccattctggtctcttggctgttgtgtttcatctttacagttaccgacgtcttccctccggactccactaagtatggcttttatgcaagaactgacgcgcgtcagggagtcttattggtggccccatggtttaaggtaccatacccttttcagtggggcctgccaaccgtgagcgccgccggggtcattggcatgctgtcagcagttgtggcctccattatcgagagtatcggtgattattatgcatgcgcccgcctcagttgtgcaccaccacctccaatccatgcaataaaccggggaatcttcgtcgaaggactgagctgcgtactggatggaattttcggcacaggaaatggctctaccagctctagccccaacataggcgtgcttgggattacaaaggtggggagtaggcgagtgatccaatgcggagccgcactgatgcttgccttggggatgattgggaaattttccgcactctttgcttccctaccagatcctgtgctgggggccctcttttgcactctgtttggcatgattaccgccgttggtttgtctaacctacagtttattgacctgaactcatcacggaatctgttcgtgcttggcttctcaatattttttgggctggtcttacctagttacctgcggcagaatccactggtgacagggataactgggattgatcaggtgctcaacgtcctactgacgacagccatgttcgttggggggtgcgtagcattcattctggataacaccattcccggcacccctgaagagcgaggaattcgcaaatggaagaaaggggttggtaagggaaataagagcctcgacgggatggagtcttataacctccccttcgggatgaatattattaaaaaatatcgctgtttcagctatctgccaatttcaccgacgtttgtaggctatacatggaaaggtctgagaaagtcagataacagtcggtcctcggatgaggactcccaggctactggttag

SEQ ID NO: 152950 - DNA, 1953 bp, Artificial Sequence
  derived and/or modified sequence
atgatgggcatcggcaagaacaccaccagcaagagcatggaggccggttcctcaaccgaaggcaaatacgaagatgaagccaagcatcccgcattctttaccctgccagtggtgatcaatgggggcgcgacctccagtggcgaacaggacaacgaggacaccgagcttatggcaatctacaccacagagaatgggattgccgagaaaagtagtctggccgagactcttgattcaaccggcagtctcgacccgcagcgctcagatatgatatatacgatcgaggacgtgccaccctggtacctgtgtatttttctcgggctccagcactatctgacttgtttctcgggaacaatcgccgtgccctttttattagccgacgctatgtgcgttggctatgaccagtgggccacaagtcagctaatcggtaccatttttttctgcgtgggtattactacccttctacaaaccacctttggctgccgactgcctctgttccaggcgtctgccttcgcatttctcgcccctgcccgggccatcttgtcactggacaaatggaagtgcaacacaactgatgtctccgttgcgaatggtacagctgagttgctgcacacagagcacatctggtatccccgcattagggaaatccagggtgctatcataatgagttcactgattgaagtggtgattggtcttttgggactccctggcgctctgctaaaatacatcgggccactcaccataactcctactgtcgccttgattgggctgtctgggtttcaggctgctggtgagagggccggaaagcattgggggatagctatgctcaccatcttccttgtcctgctgtttagccagtacgctcggaacgtcaagtttcccctgccgatttacaagagtaagaaaggctggacagcctacaaactgcagttgtttaagatgtttcccataatcctggccattctcgtctcctggttactgtgtttcatttttactgtcaccgacgtgttcccacccgacagcacgaaatacggtttttacgcacgtacagatgctagacagggggtgttgctcgtggcaccctggttcaaggtgccatatccgtttcagtggggcctgccgaccgtgagtgccgcaggcgtcataggcatgcttagcgctgtggttgcttccatcatagagtccatcggggactactatgcctgcgcacggctgagctgcgcccctccccctcctatccatgccatcaaccggggcattttcgtggaaggcctctcttgcgtgttagacggcatcttcggaacaggcaatggctccacaagttcctcccccaatattggtgtgctgggtatcaccaaggtgggctctcgtcgggtaattcagtgtggcgccgccctgatgcttgcactggggatgatcggcaaatttagcgccctgtttgcaagcctgccagaccctgtgctgggcgccttgttctgcacattgttcgggatgattacagctgtggggctctcaaacctgcagtttatcgacctgaactcctcccgcaatctgtttgtgttaggattctccatcttcttcgggctagttctaccaagttatctgcgtcagaatcctttggtgacaggtattacaggcatagaccaggtgctgaatgtcctgctgaccactgccatgtttgttggtggttgtgtggcttttattctagataatactatcccaggaactcccgaagagaggggaattcgcaaatggaagaaaggagtggggaaaggcaataaaagcctggatgggatggaaagctacaatttaccatttgggatgaatatcataaagaaataccggtgcttcagctacttgcctatctcgcctacgttcgtaggttatacctggaaaggtcttagaaaatctgataattcaaggagcagcgatgaggacagtcaagcgacagggtag

SEQ ID NO: 152951 - DNA, 1953 bp, Artificial Sequence
  derived and/or modified sequence
atgatggggattgggaaaaatacaacgtcaaagtcaatggaggcaggaagttcaactgagggtaaatatgaggatgaggccaagcaccctgccttcttcaccctgcccgtcgtgatcaacggtggtgcaacaagcagcggcgaacaggacaatgaggataccgaactgatggcaatatatactactgaaaacggcattgcggagaagtcatcccttgctgaaacactagattcaactggaagtttggatcctcagcggtccgatatgatttacacaattgaggacgtgccgccatggtatctgtgtatattccttggcctgcagcattacctcacgtgcttctcaggcactatagcggtccctttcctgttggctgatgccatgtgcgtgggctacgaccagtgggcaacaagccagctgatcggcactatcttcttctgtgtggggattactacgcttctgcaaactaccttcgggtgtcgtctaccactgttccaggcaagcgccttcgcattcttggccccagctcgggctattttgagcttggacaagtggaagtgtaatacaacggacgtcagtgttgcgaatgggactgctgaactcctgcacacagagcatatttggtacccacgaatccgcgaaattcagggcgctatcatcatgagcagtctgatcgaggtggtcattgggctcttaggattgcctggcgcactactgaagtatatcggaccattaacaatcacacctaccgttgccctcattggactctctgggttccaggccgctggggagcgcgctggcaagcactggggaatcgctatgttaaccatttttcttgtgctactgttttcgcaatatgccaggaacgtgaagtttcctctcccaatttacaaatcgaagaagggctggactgcatataaactgcaactgtttaagatgtttcccattatcttggctatcctcgtctcctggttgctgtgcttcattttcaccgtcaccgacgtgtttcccccagactcgaccaagtatggattctacgctcgcacagatgctcgccagggcgtgcttctggtggccccttggttcaaggtgccttacccgttccagtgggggttaccaacagtttccgcagccggagtgattggcatgcttagcgctgtcgtggcctctattattgagtccatcggcgattactatgcatgtgcaaggctgtcctgtgcaccccctccgcctattcacgcaataaatcgaggtattttcgtggaaggtctcagttgcgttttggacgggatttttggaaccggcaacggcagtaccagtagctctcctaacatcggcgtcctaggtatcaccaaggtaggctcaagacgagttatccagtgcggggctgcactgatgcttgccctggggatgattggaaagttctctgccctgttcgcgtctttgcccgacccagtgctgggagcattattctgtacactgttcggaatgatcacagccgtggggctctctaatttgcagtttatcgaccttaacagttctaggaacctcttcgtgctggggttctctattttctttggactcgtgctaccaagttatcttcgacagaaccccctcgtaaccggtataacgggcatcgaccaggttctcaatgtgctgctcaccacagctatgttcgtgggcggatgcgtggcatttattctagacaataccattcctggtaccccggaggaacggggtatcagaaagtggaagaagggggtggggaagggaaacaagagtctcgatggaatggagtcctacaatctgccttttgggatgaacattatcaaaaagtaccggtgtttttcttatctgccgatcagccctacctttgtagggtatacttggaaggggctcagaaagagtgacaacagccggagcagcgacgaagatagccaggctactgggtag

SEQ ID NO: 152952 - DNA, 1953 bp, Artificial Sequence
  derived and/or modified sequence
atgatgggaattggtaagaatacaactagcaaatcaatggaggcagggtcgtcgaccgagggaaaatatgaggatgaggccaagcaccctgccttcttcaccctgccagtcgtgattaatggcggtgcaacaagctccggtgagcaggacaacgaggacactgagctgatggcaatttataccactgagaacggaatcgctgagaaaagctccttagcggagacactggatagtacaggatctctggatccccaacggagcgatatgatatacaccatcgaggatgtgcctccatggtacctctgtattttcctgggcttacagcactacctgacctgtttttccgggaccattgccgtgcccttcttgctcgcagacgctatgtgcgtgggctatgatcagtgggccacatcacagttaattgggaccatctttttctgtgtaggtatcaccactttactccagactacattcggttgccgtctccccctgtttcaagcttctgccttcgccttcctggccccagcgagagccattctgtccctggacaagtggaagtgcaatacaacggatgtgtctgtcgctaatggaacggctgagttgctgcataccgagcacatctggtacccccgaatcagagagatccaaggggctatcatcatgtcctctctgattgaggtcgttatcgggctgttagggctgccgggagccctcctgaagtacatcggccctctgacgataacacctaccgtagctctcataggtctgagtgggttccaggcagcaggggagcgcgcaggtaagcactgggggattgcaatgttaacgattttcctggtcttgctcttctcacagtacgctagaaatgtcaagtttcccctgccaatctataaaagcaagaagggatggacagcttacaagttgcaactatttaaaatgtttccgattatactcgcaatcctggtttcgtggttgctgtgttttatcttcaccgtcaccgacgtgttcccccctgactccactaagtatgggttctatgccagaaccgacgcacggcagggtgtgttgctagtagcaccgtggttcaaggtcccgtatccatttcagtggggcttaccaactgtcagtgccgcaggcgtgatcggtatgctgagcgccgtcgtggcaagcattattgagtcgatcggtgattactacgcttgcgccaggctgagctgtgccccacctccccctatccatgcaattaaccggggaatctttgtagaaggtttaagttgcgttctggacgggatctttggaacaggcaacggatcaacatccagcagtcctaacatcggggtgcttggcattactaaggtggggtctagacgggtgattcaatgtggtgccgcactcatgctggccctaggaatgatcggcaagttcagcgccttatttgcaagtctgcctgatccagtcttgggggctctattctgtaccctgttcggaatgatcacagctgttgggctgagcaacttacagttcatagatctgaactcctcaaggaacctatttgtgctgggattcagtatatttttcgggctggttctgccgtcctaccttagacaaaaccctctagttacaggcatcacagggattgaccaggtgctcaatgtgctcctgactaccgccatgtttgttggcggatgcgtggcattcattttggacaatactattccagggacgccggaggagaggggaataaggaaatggaagaagggcgtaggaaagggaaacaagagccttgacgggatggaaagctacaacttgccctttggcatgaatatcatcaagaaataccgctgtttttcatacctgccaatctcacccacctttgtaggttacacttggaagggcctgcgaaaatcggacaattcccgttcctcagacgaagatagccaggctaccgggtag

SEQ ID NO: 152953 - DNA, 6944 bp, Artificial Sequence
  derived and/or modified sequence
ggcggctgtcgcggggaccggaggcggaggctgcagcgggcactgcggcgccgaggcgcggcggcaggacgggaaccacgcgagctgcagccagctaggtcttgactccactaacggggacttctcatacggctttgaacttggaccttggtgcataagcaaatgtaactcagcgaattgtaatggaaagcatatggacaggtctacgccacatcacttaggtgctaagagatgccgtttgcaggcctcatctctgcttgagaatcgggggctccaggcactagaagagccggctgatcctgggctcctagcttgaataagccttcacttccagctgctctccccaacggctgtgtaaactactcgtttctcttaatgatgggtattggtaagaataccacatccaaatcaatggaggctggaagttcaacagaaggcaaatacgaagacgaggcaaagcacccagctttcttcactcttccggtggtgataaatggaggcgccacctccagcggtgagcaggacaatgaggacactgagctcatggcgatctacactacggaaaacggcattgcagaaaagagctctctcgctgagaccctggatagcactggcagtctggacccccagcgatcagacatgatttataccatagaagatgttcctccctggtacctgtgtatatttctggggctacagcactacctgacatgcttcagcggcacgatcgcagtgcccttcctgttggccgatgccatgtgtgtggggtacgaccagtgggccaccagccagctcattgggaccattttcttctgtgtgggaatcactactttgctacagacaacgtttggatgcaggttacccctgtttcaggccagtgcttttgcatttttggcccctgctcgagccatcctgtctttagataaatggaaatgtaacaccacagatgtttcagttgccaatggaacagcagagctgttgcacacagaacacatctggtatccccggatccgagagatccagggggccatcatcatgtcctcactgatagaagtagtcatcggcctcctcggcctgcctggggctctactgaagtacatcggtcccttgaccattacacccacggtggccctaattggcctctctggtttccaggcagcgggggagagagccgggaagcactggggcattgccatgctgacaatattcctagtattactgttttctcaatacgccagaaatgttaaatttcctctcccgatttataaatccaagaaaggatggactgcgtacaagttacagctgttcaaaatgttccctatcatcctggccatcctggtatcctggctgctctgcttcatcttcacggtgacagatgtcttccctcccgacagcacaaagtatggcttctatgctcgcacagatgccaggcaaggcgtgcttctggtagccccgtggtttaaggttccatacccatttcagtggggactgcccaccgtgtctgcggccggtgtcatcggcatgctcagtgccgtggtcgccagcatcatcgagtctattggtgactactacgcctgtgcacggctgtcctgtgccccacccccccccatccacgcaataaacaggggaattttcgtggaaggcctctcctgtgttcttgatggcatatttggtactgggaatggctctacttcatccagtcccaacattggagttttgggaattacaaaggtcggcagccgccgcgtgatacagtgcggagcagccctcatgctcgctctgggcatgatcgggaagttcagcgccctctttgcgtcccttccggatcctgtgctgggagccctgttctgcacgctctttggaatgatcacagctgttggcctctctaacctgcagttcattgatttaaattcttcccggaacctctttgtgcttggattttcgatcttctttgggctcgtccttccaagttacctcagacagaaccctctggtcacagggataacaggaatcgatcaagtgttgaacgtccttctcacaactgctatgtttgtagggggctgtgtggcttttatcctggataacaccatcccaggcactccagaggaaagaggaatccggaaatggaagaagggtgtgggcaaagggaacaaatcactcgacggcatggagtcgtacaatttgccatttggcatgaacattataaaaaaatacagatgcttcagctacttacccatcagcccaacctttgtgggctacacatggaaaggcctcaggaagagcgacaacagccggagttcagatgaagactcccaggccacgggatagcctttgctgtgccctgtggcctggccgcagtgaggcatgtatctgtagttccttgctgagtaacaagaagtaaaatacatgtttgtatatctacatttacattctgcgccccagagctaagacagactgcgaatcacttttctgctgtgagggtgatggtgcctgatgcggtgtctcgcctatctccttatttaagcccttaactccttgccctttgagagtgtccattgctggccatggtcactaaatttgaagttccagtcctccctttggagtggacatttaaaatctgcagccattccttgcttcagttcccttccaccacccagggctggctttcctataagccacctccagggtccaggggctttctctctctctccgaagcccctggacctgtttccttgtcatttgaccctcgtctgtgcccgcggagacctcctctgaccaaggggcactagtatgccttgcgctatcatgactgactggcccagtatgattctgttgtcgctgatctcccggaggaggaggctgttgacctgaaaacagtggcgtggctcccctgtgcccagatctggccatgggtgaggcctgcacagatgttgaatgaacatctgtttggggcattggagggaaaaggaaaggaccctgaagccaatatctgattctcggctgcaccttctcttggccaccctggccctgaccgggccagcacgtgcacactggcctcttttcatttcactagtggccgagacaccctctctggcatttatcactgttggccggtgtgatgagtatagagtgccacccaaggcaccagtcacacaagctgatgggcgtcttggctctgccgtcatgtggatgttattgtcgcgcgcgtctataattacaaggttttattcctatttaatgttattgactatagcagattttggaaatcagtgttttccatgtgaccctctttccttgcatccctattccttgtcccccacccactcttccccccatcaagaaaagaaccagcatttgtaaagctgtggacaccatcagggaagcttgttgtaacggcttttgaaggccagtaaccattgttgtggttgtgttttgtattgcttgataccatgaaagtgtaaatactgtaatgcctaatctatttatcaaaactgactactggaccggagcccagaaaccatgggtcaagttacacgtgaatttgttttgtgaagaagggaagctggggcaggtaacacgcagagccgccacgtggaacggtctgtccgccggtctgtcccgcttgccgggcttctgttgcaagtcttggcttaaggagacttcctgtgggttgccatgtcgcacgtccgttagatcttgattttacaggtgagggtggttgccaaaggtgataagaaaagcagccaacaggctccctctcacttaagagagttctaattaataacactaaattcttcctgagaaatgactcctcttggtttggtttgaagtttttcagtgaaggaaaaggcctgagataggaagcagtgccctcgcttcatgaggtggcacatcttcggtggccgttggcctggtcgagctttggtcagctgcgtgggtgcctgtctcctgtctccagcggcagggcatggttcttggcagcctggtgtccacacggtgcattcctgtccccctcggccccaggctggctcagctctccagtgctgcggcgctgtctttgcagcattgccatgtcaccgtagcccccttcactcttggaagtttggggcttcaaggtttattctggcaagaacacctcggagccactgcattgttttgccaaaaacttactgcagattaagtaaagaacttagatgctaaattacatctaattttgtatgtttttttaaatgtgtctttgatgcatactttagaagcacactggctcgcggtttccatccctcttgccttgggacactcttgaggctggcagccctcctgcaatgagttgctctcagttccttctgtttggattttgctcaacatctccagtttctctgctctgaaaaatggggaaaactgctaaacatcccagagatttgcaatcttctagctctccaggtgagcagaaagaccaaatatccaaataaaagcctgaaagccattggtgatccaggggcaccttctcttcagcttgactgggcgtcttccgctgcataacactcaaggtgtctgctctagtcatccagaaacccactcccttctgaagcccctccttgggccgggttgtatcaggaggattcaaccccgctaacatgtggggtgccctctgtaggccttcacacagggaaggaagccctaccctttcaactcctgttggagtgagagtttcctgttctgattccactgtggccaacccaataattctgtccgaggaggggtaagggaataggaggtggggagcaaagagggcagcctgactagatgcccctgctgaatctggtactttctgcacagccttgagtgattggagtcccctaatgactaataaacttgaacatgtaacacacacacacacacacacacacaccattttaggaagtggttctcctactggaaaatatgctacagaatgaaagtttgtaattgaaagaaaaagaatgtattcatctgcttcttgggtttaagcacacacctgaaggggagatattgggggacacggtggccactcgcggtctgtgtcatgacacttcccattcacatcattggcctgcgttgctggggctttgaaccaccaccccgtactttgttttgcctgtagagtgttgtaaaatattttggatgtgaatgtccttgcaggccggttagtctccagtttccacagagaccacctacccaccaccttcccaggtcacctgcctggtccctgaaagaaagcatttgtgtgggcaatcccaacatgaaatgtagacagcgtgaatacggacaggaggtgatgccatattcacagtgggggatggagggcccccacccctgcttcacagaataatgggaagtgactctagtctttgtaagcaattttcattctcattaggaagttaaatgtagattcacagatacatttactttcagaatcctcaagaggatttcaaatgctaacttttagtttcttgggattgatcaaggcaagagaagtggctttaaccatgccagccagaatgaagcatcatgggtcctgatggtttcccgttttcatggtaacaaattcgcacagaggttttgctttatgctgtagaataccgactttcatgatgacaacttggtttatgcatgaatattgcagtatttccatatagcaaaataacatttctacccaggataatagtcacagttttccagggagggaatgatataattttcatgacaatgtcatgtgatgatagaatttctccattgatgaatctctagtatgtgtgtatactttatttacccatacgtatattttatgaccatgagctaagttgttatttctttcattcatatccctgctgaaatattggtactagcaacttaaagttggcaagtctcatcttcagtaatacggatgccatgggagtggccaggccagattgaaggtgaatatggagcagtagcagaagcctcattccagaacccatctggccagagaagcagcagcatcctgggggatggccgtgcatggggtgtacactcgctataggcataggcccggcatggctgtcgctggacgccagctgtgcacacccagccacacctgctgcacgccgcgttagtgtgcggctccgggcctgagcattcgcaaagctcgcttctccagggagcctcctcttggctttggaaaagagcccagggacttaacgtgctgcctgttgtactctgtcccctcatgactttttagacacagggactaggacatcgaccaccctctgcccctcctgcagtcagaacccgagtagtgcaagaacggccacccggttttgccagcgttcagcgtctgcccatggacccataaggcacattagcgttgggggtctcttttcagcagcctcacagacattcccgtcctttctggttggtgttgactgtgtttcagcatcactctaccctcccatgtccttagcattgctgtgcgtgtttccaggcacttaggacacccttccccacgttgccatcttactgacagttcaaatgactctccttttttgttcgttagtaacaatcttcatttgacaccttaatacatttctgactgttcttaaaacagtggggatgcctatattttccttgagtttttgtgactgactttggctatatatacctttctggggttttgtttgttttttatttttattttgattaccgagggtatttggggtggggttgttttttgagatgtgtaattcttttatggagtttttaaaaagaattttcatattgtttttctaacatggcttcattaaacgtttaagtattttaaaaatatgtaatatttggaccagatgttgtgaataatagtagagataaagctattttattctgtatttttaaaactgttccgtacaaataaaagctctcctggacacagt

SEQ ID NO: 152954 - DNA, 6962 bp, Artificial Sequence
  derived and/or modified sequence
cattcatcttctcctgcccttggacatcacagctccaggaactcagatcttcagactcagggtgaaggacaccaccagctttccaggttccccagcttgcagacggcatacgctaggtcttgactccactaacggggacttctcatacggctttgaacttggaccttggtgcataagcaaatgtaactcagcgaattgtaatggaaagcatatggacaggtctacgccacatcacttaggtgctaagagatgccgtttgcaggcctcatctctgcttgagaatcgggggctccaggcactagaagagccggctgatcctgggctcctagcttgaataagccttcacttccagctgctctccccaacggctgtgtaaactactcgtttctcttaatgatgggtattggtaagaataccacatccaaatcaatggaggctggaagttcaacagaaggcaaatacgaagacgaggcaaagcacccagctttcttcactcttccggtggtgataaatggaggcgccacctccagcggtgagcaggacaatgaggacactgagctcatggcgatctacactacggaaaacggcattgcagaaaagagctctctcgctgagaccctggatagcactggcagtctggacccccagcgatcagacatgatttataccatagaagatgttcctccctggtacctgtgtatatttctggggctacagcactacctgacatgcttcagcggcacgatcgcagtgcccttcctgttggccgatgccatgtgtgtggggtacgaccagtgggccaccagccagctcattgggaccattttcttctgtgtgggaatcactactttgctacagacaacgtttggatgcaggttacccctgtttcaggccagtgcttttgcatttttggcccctgctcgagccatcctgtctttagataaatggaaatgtaacaccacagatgtttcagttgccaatggaacagcagagctgttgcacacagaacacatctggtatccccggatccgagagatccagggggccatcatcatgtcctcactgatagaagtagtcatcggcctcctcggcctgcctggggctctactgaagtacatcggtcccttgaccattacacccacggtggccctaattggcctctctggtttccaggcagcgggggagagagccgggaagcactggggcattgccatgctgacaatattcctagtattactgttttctcaatacgccagaaatgttaaatttcctctcccgatttataaatccaagaaaggatggactgcgtacaagttacagctgttcaaaatgttccctatcatcctggccatcctggtatcctggctgctctgcttcatcttcacggtgacagatgtcttccctcccgacagcacaaagtatggcttctatgctcgcacagatgccaggcaaggcgtgcttctggtagccccgtggtttaaggttccatacccatttcagtggggactgcccaccgtgtctgcggccggtgtcatcggcatgctcagtgccgtggtcgccagcatcatcgagtctattggtgactactacgcctgtgcacggctgtcctgtgccccacccccccccatccacgcaataaacaggggaattttcgtggaaggcctctcctgtgttcttgatggcatatttggtactgggaatggctctacttcatccagtcccaacattggagttttgggaattacaaaggtcggcagccgccgcgtgatacagtgcggagcagccctcatgctcgctctgggcatgatcgggaagttcagcgccctctttgcgtcccttccggatcctgtgctgggagccctgttctgcacgctctttggaatgatcacagctgttggcctctctaacctgcagttcattgatttaaattcttcccggaacctctttgtgcttggattttcgatcttctttgggctcgtccttccaagttacctcagacagaaccctctggtcacagggataacaggaatcgatcaagtgttgaacgtccttctcacaactgctatgtttgtagggggctgtgtggcttttatcctggataacaccatcccaggcactccagaggaaagaggaatccggaaatggaagaagggtgtgggcaaagggaacaaatcactcgacggcatggagtcgtacaatttgccatttggcatgaacattataaaaaaatacagatgcttcagctacttacccatcagcccaacctttgtgggctacacatggaaaggcctcaggaagagcgacaacagccggagttcagatgaagactcccaggccacgggatagcctttgctgtgccctgtggcctggccgcagtgaggcatgtatctgtagttccttgctgagtaacaagaagtaaaatacatgtttgtatatctacatttacattctgcgccccagagctaagacagactgcgaatcacttttctgctgtgagggtgatggtgcctgatgcggtgtctcgcctatctccttatttaagcccttaactccttgccctttgagagtgtccattgctggccatggtcactaaatttgaagttccagtcctccctttggagtggacatttaaaatctgcagccattccttgcttcagttcccttccaccacccagggctggctttcctataagccacctccagggtccaggggctttctctctctctccgaagcccctggacctgtttccttgtcatttgaccctcgtctgtgcccgcggagacctcctctgaccaaggggcactagtatgccttgcgctatcatgactgactggcccagtatgattctgttgtcgctgatctcccggaggaggaggctgttgacctgaaaacagtggcgtggctcccctgtgcccagatctggccatgggtgaggcctgcacagatgttgaatgaacatctgtttggggcattggagggaaaaggaaaggaccctgaagccaatatctgattctcggctgcaccttctcttggccaccctggccctgaccgggccagcacgtgcacactggcctcttttcatttcactagtggccgagacaccctctctggcatttatcactgttggccggtgtgatgagtatagagtgccacccaaggcaccagtcacacaagctgatgggcgtcttggctctgccgtcatgtggatgttattgtcgcgcgcgtctataattacaaggttttattcctatttaatgttattgactatagcagattttggaaatcagtgttttccatgtgaccctctttccttgcatccctattccttgtcccccacccactcttccccccatcaagaaaagaaccagcatttgtaaagctgtggacaccatcagggaagcttgttgtaacggcttttgaaggccagtaaccattgttgtggttgtgttttgtattgcttgataccatgaaagtgtaaatactgtaatgcctaatctatttatcaaaactgactactggaccggagcccagaaaccatgggtcaagttacacgtgaatttgttttgtgaagaagggaagctggggcaggtaacacgcagagccgccacgtggaacggtctgtccgccggtctgtcccgcttgccgggcttctgttgcaagtcttggcttaaggagacttcctgtgggttgccatgtcgcacgtccgttagatcttgattttacaggtgagggtggttgccaaaggtgataagaaaagcagccaacaggctccctctcacttaagagagttctaattaataacactaaattcttcctgagaaatgactcctcttggtttggtttgaagtttttcagtgaaggaaaaggcctgagataggaagcagtgccctcgcttcatgaggtggcacatcttcggtggccgttggcctggtcgagctttggtcagctgcgtgggtgcctgtctcctgtctccagcggcagggcatggttcttggcagcctggtgtccacacggtgcattcctgtccccctcggccccaggctggctcagctctccagtgctgcggcgctgtctttgcagcattgccatgtcaccgtagcccccttcactcttggaagtttggggcttcaaggtttattctggcaagaacacctcggagccactgcattgttttgccaaaaacttactgcagattaagtaaagaacttagatgctaaattacatctaattttgtatgtttttttaaatgtgtctttgatgcatactttagaagcacactggctcgcggtttccatccctcttgccttgggacactcttgaggctggcagccctcctgcaatgagttgctctcagttccttctgtttggattttgctcaacatctccagtttctctgctctgaaaaatggggaaaactgctaaacatcccagagatttgcaatcttctagctctccaggtgagcagaaagaccaaatatccaaataaaagcctgaaagccattggtgatccaggggcaccttctcttcagcttgactgggcgtcttccgctgcataacactcaaggtgtctgctctagtcatccagaaacccactcccttctgaagcccctccttgggccgggttgtatcaggaggattcaaccccgctaacatgtggggtgccctctgtaggccttcacacagggaaggaagccctaccctttcaactcctgttggagtgagagtttcctgttctgattccactgtggccaacccaataattctgtccgaggaggggtaagggaataggaggtggggagcaaagagggcagcctgactagatgcccctgctgaatctggtactttctgcacagccttgagtgattggagtcccctaatgactaataaacttgaacatgtaacacacacacacacacacacacacaccattttaggaagtggttctcctactggaaaatatgctacagaatgaaagtttgtaattgaaagaaaaagaatgtattcatctgcttcttgggtttaagcacacacctgaaggggagatattgggggacacggtggccactcgcggtctgtgtcatgacacttcccattcacatcattggcctgcgttgctggggctttgaaccaccaccccgtactttgttttgcctgtagagtgttgtaaaatattttggatgtgaatgtccttgcaggccggttagtctccagtttccacagagaccacctacccaccaccttcccaggtcacctgcctggtccctgaaagaaagcatttgtgtgggcaatcccaacatgaaatgtagacagcgtgaatacggacaggaggtgatgccatattcacagtgggggatggagggcccccacccctgcttcacagaataatgggaagtgactctagtctttgtaagcaattttcattctcattaggaagttaaatgtagattcacagatacatttactttcagaatcctcaagaggatttcaaatgctaacttttagtttcttgggattgatcaaggcaagagaagtggctttaaccatgccagccagaatgaagcatcatgggtcctgatggtttcccgttttcatggtaacaaattcgcacagaggttttgctttatgctgtagaataccgactttcatgatgacaacttggtttatgcatgaatattgcagtatttccatatagcaaaataacatttctacccaggataatagtcacagttttccagggagggaatgatataattttcatgacaatgtcatgtgatgatagaatttctccattgatgaatctctagtatgtgtgtatactttatttacccatacgtatattttatgaccatgagctaagttgttatttctttcattcatatccctgctgaaatattggtactagcaacttaaagttggcaagtctcatcttcagtaatacggatgccatgggagtggccaggccagattgaaggtgaatatggagcagtagcagaagcctcattccagaacccatctggccagagaagcagcagcatcctgggggatggccgtgcatggggtgtacactcgctataggcataggcccggcatggctgtcgctggacgccagctgtgcacacccagccacacctgctgcacgccgcgttagtgtgcggctccgggcctgagcattcgcaaagctcgcttctccagggagcctcctcttggctttggaaaagagcccagggacttaacgtgctgcctgttgtactctgtcccctcatgactttttagacacagggactaggacatcgaccaccctctgcccctcctgcagtcagaacccgagtagtgcaagaacggccacccggttttgccagcgttcagcgtctgcccatggacccataaggcacattagcgttgggggtctcttttcagcagcctcacagacattcccgtcctttctggttggtgttgactgtgtttcagcatcactctaccctcccatgtccttagcattgctgtgcgtgtttccaggcacttaggacacccttccccacgttgccatcttactgacagttcaaatgactctccttttttgttcgttagtaacaatcttcatttgacaccttaatacatttctgactgttcttaaaacagtggggatgcctatattttccttgagtttttgtgactgactttggctatatatacctttctggggttttgtttgttttttatttttattttgattaccgagggtatttggggtggggttgttttttgagatgtgtaattcttttatggagtttttaaaaagaattttcatattgtttttctaacatggcttcattaaacgtttaagtattttaaaaatatgtaatatttggaccagatgttgtgaataatagtagagataaagctattttattctgtatttttaaaactgttccgtacaaataaaagctctcctggacacagt

SEQ ID NO: 152955 - DNA, 1953 bp, Artificial Sequence
  derived and/or modified sequence
atgatgggcatcggcaagaacaccaccagcaagagcatggaggccggcagcagcaccgagggcaagtacgaggacgaggccaagcaccccgccttcttcaccctgcccgtggtgatcaacggcggcgccaccagcagcggcgagcaggacaacgaggacaccgagctgatggccatctacaccaccgagaacggcatcgccgagaagagcagcctggccgagaccctggacagcaccggcagcctggacccccagagaagcgacatgatctacaccatcgaggacgtgcccccctggtacctgtgcatcttcctgggcctgcagcactacctgacctgcttcagcggcaccatcgccgtgcccttcctgctggccgacgccatgtgcgtgggctacgaccagtgggccaccagccagctgatcggcaccatcttcttctgcgtgggcatcaccaccctgctgcagaccaccttcggctgcagactgcccctgttccaggccagcgccttcgccttcctggcccccgccagagccatcctgagcctggacaagtggaagtgcaacaccaccgacgtgagcgtggccaacggcaccgccgagctgctgcacaccgagcacatctggtaccccagaatcagagagatccagggcgccatcatcatgagcagcctgatcgaggtggtgatcggcctgctgggcctgcccggcgccctgctgaagtacatcggccccctgaccatcacccccaccgtggccctgatcggcctgagcggcttccaggccgccggcgagagagccggcaagcactggggcatcgccatgctgaccatcttcctggtgctgctgttcagccagtacgccagaaacgtgaagttccccctgcccatctacaagagcaagaagggctggaccgcctacaagctgcagctgttcaagatgttccccatcatcctggccatcctggtgagctggctgctgtgcttcatcttcaccgtgaccgacgtgttcccccccgacagcaccaagtacggcttctacgccagaaccgacgccagacagggcgtgctgctggtggccccctggttcaaggtgccctaccccttccagtggggcctgcccaccgtgagcgccgccggcgtgatcggcatgctgagcgccgtggtggccagcatcatcgagagcatcggcgactactacgcctgcgccagactgagctgcgccccccccccccccatccacgccatcaacagaggcatcttcgtggagggcctgagctgcgtgctggacggcatcttcggcaccggcaacggcagcaccagcagcagccccaacatcggcgtgctgggcatcaccaaggtgggcagcagaagagtgatccagtgcggcgccgccctgatgctggccctgggcatgatcggcaagttcagcgccctgttcgccagcctgcccgaccccgtgctgggcgccctgttctgcaccctgttcggcatgatcaccgccgtgggcctgagcaacctgcagttcatcgacctgaacagcagcagaaacctgttcgtgctgggcttcagcatcttcttcggcctggtgctgcccagctacctgagacagaaccccctggtgaccggcatcaccggcatcgaccaggtgctgaacgtgctgctgaccaccgccatgttcgtgggcggctgcgtggccttcatcctggacaacaccatccccggcacccccgaggagagaggcatcagaaagtggaagaagggcgtgggcaagggcaacaagagcctggacggcatggagagctacaacctgcccttcggcatgaacatcatcaagaagtacagatgcttcagctacctgcccatcagccccaccttcgtgggctacacctggaagggcctgagaaagagcgacaacagcagaagcagcgacgaggacagccaggccaccggctag

SEQ ID NO: 152956 - protein, 216 aa, Artificial Sequence
  derived and/or modified sequence
MRSGCVVVHVWILAGLWLAVAGRPLAFSDAGPHVHYGWGDPIRLRHLYTSGPHGLSSCFLRIRADGVVDCARGQSAHSLLEIKAVALRTVAIKGVHSVRYLCMGADGKMQGLLQYSEEDCAFEEEIRPDGYNVYRSEKHRLPVSLSSAKQRQLYKNRGFLPLSHFLPMLPMVPEEPEDLRGHLESDMFSSPLETDSMDPFGLVTGLEAVRSPSFEK

SEQ ID NO: 152957 - DNA, 651 bp, Artificial Sequence
  derived and/or modified sequence
atgagaagcggctgcgtggtggtgcacgtgtggatcctggccggcctgtggctggccgtggccggcagacccctggccttcagcgacgccggcccccacgtgcactacggctggggcgaccccatcagactgagacacctgtacaccagcggcccccacggcctgagcagctgcttcctgagaatcagagccgacggcgtggtggactgcgccagaggccagagcgcccacagcctgctggagatcaaggccgtggccctgagaaccgtggccatcaagggcgtgcacagcgtgagatacctgtgcatgggcgccgacggcaagatgcagggcctgctgcagtacagcgaggaggactgcgccttcgaggaggagatcagacccgacggctacaacgtgtacagaagcgagaagcacagactgcccgtgagcctgagcagcgccaagcagagacagctgtacaagaacagaggcttcctgcccctgagccacttcctgcccatgctgcccatggtgcccgaggagcccgaggacctgagaggccacctggagagcgacatgttcagcagccccctggagaccgacagcatggaccccttcggcctggtgaccggcctggaggccgtgagaagccccagcttcgagaagtag

SEQ ID NO: 152958 - DNA, 651 bp, Artificial Sequence
  derived and/or modified sequence
atgagaagtgggtgcgtggttgttcatgtctggatcctggcagggctttggctggctgtggccggtcgcccgttggcgtttagcgacgcggggccacacgtgcactacggctggggcgatccaatccggctgagacatctgtatacatctggcccacacggcctctcctcctgctttctgaggattcgcgccgacggagtcgtagactgtgcgcgcggacagagcgcccactccctcctggaaattaaagcggtggctctgcggaccgtggcaatcaagggcgtgcatagtgtgagatatctgtgtatgggagctgatgggaagatgcagggtctactgcagtattccgaagaggactgtgccttcgaagaggagattcgccccgacgggtacaacgtatatcgatccgagaagcaccggctacctgtgagtctttcgagcgccaaacagcgacagctctacaaaaaccgcggttttctacccctgtcgcactttttgccaatgctccctatggtgccagaggaacccgaggatctcagaggccacctggagagcgatatgtttagcagtcctcttgagactgactcaatggaccctttcggtctggtaaccggcctcgaagctgtgcgttccccatcatttgaaaaatag

SEQ ID NO: 152959 - DNA, 651 bp, Artificial Sequence
  derived and/or modified sequence
atgaggagcggctgtgtggtggtgcacgtgtggatcctggccggcctgtggctggccgtggccggccggcccctggccttcagtgatgctggcccccacgtgcactacggctggggagaccccatccggctgcggcacctgtacaccagcggcccccacggcctgagcagctgcttcctgcgcatccgggcagatggagtggtggactgtgcccggggccagagcgcccacagcctgctggagatcaaggctgtggccctgaggacagtggccatcaagggcgtgcacagcgtgcgctacctgtgcatgggcgcagatggcaagatgcagggcctgctgcagtacagcgaggaggactgtgcctttgaggaggagatccggccagatggctacaacgtgtacagaagtgagaagcaccggctgcctgtgtccctgagcagcgccaagcagaggcagctgtacaagaacagaggcttcctgcccctgagccacttcctgcccatgctgcccatggtgcctgaggagcctgaggacctgcggggccacctggagagtgacatgttcagcagccccctggagacagacagcatggaccccttcggcctggtgacaggcctggaggccgtgcgcagccccagctttgagaagtag

SEQ ID NO: 152960 - DNA, 651 bp, Artificial Sequence
  derived and/or modified sequence
atgcggagcggctgcgtggtggtgcacgtgtggatcctggccggcctgtggttagccgtggccggccgccccctggcttttagcgacgcaggcccacatgtgcactacggatggggcgaccccatccggctgcggcatctgtacacctcaggcccgcatggtttgtcctcatgcttcctgcgcattcgcgcggacggggtcgtcgattgcgctcgagggcagtctgcccactctttactcgagattaaggctgtggctctccgcaccgttgcaattaagggcgtgcattctgtgcggtacctctgtatgggagcggatggcaagatgcaggggctgctccagtattcagaggaagactgtgcgttcgaagaagagatccgacctgacggttacaacgtttatcgctccgaaaagcatcggttacctgtttcgctttcctctgcgaaacagcgccaactctacaaaaatcggggattcctgcccctctcacacttcttgccaatgctgcccatggtccccgaagaacctgaggatcttcgggggcatcttgaaagtgacatgttctcatcacccttggagaccgattccatggatcccttcggcctcgttactggtctggaggctgttagaagcccaagttttgagaaatag

SEQ ID NO: 152961 - DNA, 651 bp, Artificial Sequence
  derived and/or modified sequence
atgcgcagcgggtgcgtcgtcgtacatgtatggatactggccggattatggctcgccgtggctgggagaccgctggccttttctgacgccggacctcatgtccactacggatggggggatcctattagactgcgtcacctctacacaagcgggcctcacggactcagtagttgcttcctcagaatccgcgctgacggcgttgtcgattgcgccagaggtcagagtgcacattctcttctggagatcaaagcagtggccctgcggaccgtagccatcaagggcgtgcacagcgtccgctacctgtgcatgggggctgatgggaagatgcagggtctgctgcagtactctgaggaagattgcgcttttgaggaagagatccggcctgatgggtacaatgtgtatcgatctgagaagcaccgactacccgtgtcattgtcttcggcaaaacagcgtcagctatacaagaacagagggtttttgcccctcagccacttcctgcctatgctgccaatggtccccgaggagcctgaggacctgcgtggccacctcgagtccgatatgttttcaagtcctctggaaacagactcaatggatccatttggtctggtcaccgggctggaggctgtgcgatctccgagttttgaaaaatag

SEQ ID NO: 152962 - DNA, 2447 bp, Artificial Sequence
  derived and/or modified sequence
tgaaagaacctgagactgtcggaactgccggggaaaattctacgggacggctttgacgtcagatgtgcggggctgcgaaagtcgggggagggagtgcgagtgggcttttaaggggaagggcactaaggccgaggtgaggcttttcccgacagagggtgaagggggcaaaactcggtgccccccaacctctggccccggggttcctgaccccgcccccgctagtgccccacgccgagtgcatccactgggagcctgaggcctgggggaagggccccagttgtcgattgctttacaaagtcaaactctcccagccaagaacctcggggccgctgcgcggtggggaggagttccccgaaacccggccgctaagcgaggcctcctcctcccgcagatccgaacggcctgggcggggtcaccccggctgggacaagaagccgccgcctgcctgcccgggcccggggagggggctggggctggggccggaggcggggtgtgagtgggtgtgtgcggggggcggaggcttgatgcaatcccgataagaaatgctcgggtgtcttgggcacctacccgtggggcccgtaaggcgctactatataaggctgccggcccggagccgccgcgccgtcagagcaggagcgctgcgtccaggatctagggccacgaccatcccaacccggcactcacagccccgcagcgcatcccggtcgccgcccagcctcccgcacccccatcgccggagctgcgccgagagccccagggaggtgccatgcggagcgggtgtgtggtggtccacgtatggatcctggccggcctctggctggccgtggccgggcgccccctcgccttctcggacgcggggccccacgtgcactacggctggggcgaccccatccgcctgcggcacctgtacacctccggcccccacgggctctccagctgcttcctgcgcatccgtgccgacggcgtcgtggactgcgcgcggggccagagcgcgcacagtttgctggagatcaaggcagtcgctctgcggaccgtggccatcaagggcgtgcacagcgtgcggtacctctgcatgggcgccgacggcaagatgcaggggctgcttcagtactcggaggaagactgtgctttcgaggaggagatccgcccagatggctacaatgtgtaccgatccgagaagcaccgcctcccggtctccctgagcagtgccaaacagcggcagctgtacaagaacagaggctttcttccactctctcatttcctgcccatgctgcccatggtcccagaggagcctgaggacctcaggggccacttggaatctgacatgttctcttcgcccctggagaccgacagcatggacccatttgggcttgtcaccggactggaggccgtgaggagtcccagctttgagaagtaactgagaccatgcccgggcctcttcactgctgccaggggctgtggtacctgcagcgtgggggacgtgcttctacaagaacagtcctgagtccacgttctgtttagctttaggaagaaacatctagaagttgtacatattcagagttttccattggcagtgccagtttctagccaatagacttgtctgatcataacattgtaagcctgtagcttgcccagctgctgcctgggcccccattctgctccctcgaggttgctggacaagctgctgcactgtctcagttctgcttgaatacctccatcgatggggaactcacttcctttggaaaaattcttatgtcaagctgaaattctctaattttttctcatcacttccccaggagcagccagaagacaggcagtagttttaatttcaggaacaggtgatccactctgtaaaacagcaggtaaatttcactcaaccccatgtgggaattgatctatatctctacttccagggaccatttgcccttcccaaatccctccaggccagaactgactggagcaggcatggcccaccaggcttcaggagtaggggaagcctggagccccactccagccctgggacaacttgagaattccccctgaggccagttctgtcatggatgctgtcctgagaataacttgctgtcccggtgtcacctgcttccatctcccagcccaccagccctctgcccacctcacatgcctccccatggattggggcctcccaggccccccaccttatgtcaacctgcacttcttgttcaaaaatcaggaaaagaaaagatttgaagaccccaagtcttgtcaataacttgctgtgtggaagcagcgggggaagacctagaaccctttccccagcacttggttttccaacatgatatttatgagtaatttattttgatatgtacatctcttattttcttacattatttatgcccccaaattatatttatgtatgtaagtgaggtttgttttgtatattaaaatggagtttgtttgtatcaaaa

SEQ ID NO: 152963 - DNA, 2157 bp, Artificial Sequence
  derived and/or modified sequence
gctcccagccaagaacctcggggccgctgcgcggtggggaggagttccccgaaacccggccgctaagcgaggcctcctcctcccgcagatccgaacggcctgggcggggtcaccccggctgggacaagaagccgccgcctgcctgcccgggcccggggagggggctggggctggggccggaggcggggtgtgagtgggtgtgtgcggggggcggaggcttgatgcaatcccgataagaaatgctcgggtgtcttgggcacctacccgtggggcccgtaaggcgctactatataaggctgccggcccggagccgccgcgccgtcagagcaggagcgctgcgtccaggatctagggccacgaccatcccaacccggcactcacagccccgcagcgcatcccggtcgccgcccagcctcccgcacccccatcgccggagctgcgccgagagccccagggaggtgccatgcggagcgggtgtgtggtggtccacgtatggatcctggccggcctctggctggccgtggccgggcgccccctcgccttctcggacgcggggccccacgtgcactacggctggggcgaccccatccgcctgcggcacctgtacacctccggcccccacgggctctccagctgcttcctgcgcatccgtgccgacggcgtcgtggactgcgcgcggggccagagcgcgcacagtttgctggagatcaaggcagtcgctctgcggaccgtggccatcaagggcgtgcacagcgtgcggtacctctgcatgggcgccgacggcaagatgcaggggctgcttcagtactcggaggaagactgtgctttcgaggaggagatccgcccagatggctacaatgtgtaccgatccgagaagcaccgcctcccggtctccctgagcagtgccaaacagcggcagctgtacaagaacagaggctttcttccactctctcatttcctgcccatgctgcccatggtcccagaggagcctgaggacctcaggggccacttggaatctgacatgttctcttcgcccctggagaccgacagcatggacccatttgggcttgtcaccggactggaggccgtgaggagtcccagctttgagaagtaactgagaccatgcccgggcctcttcactgctgccaggggctgtggtacctgcagcgtgggggacgtgcttctacaagaacagtcctgagtccacgttctgtttagctttaggaagaaacatctagaagttgtacatattcagagttttccattggcagtgccagtttctagccaatagacttgtctgatcataacattgtaagcctgtagcttgcccagctgctgcctgggcccccattctgctccctcgaggttgctggacaagctgctgcactgtctcagttctgcttgaatacctccatcgatggggaactcacttcctttggaaaaattcttatgtcaagctgaaattctctaattttttctcatcacttccccaggagcagccagaagacaggcagtagttttaatttcaggaacaggtgatccactctgtaaaacagcaggtaaatttcactcaaccccatgtgggaattgatctatatctctacttccagggaccatttgcccttcccaaatccctccaggccagaactgactggagcaggcatggcccaccaggcttcaggagtaggggaagcctggagccccactccagccctgggacaacttgagaattccccctgaggccagttctgtcatggatgctgtcctgagaataacttgctgtcccggtgtcacctgcttccatctcccagcccaccagccctctgcccacctcacatgcctccccatggattggggcctcccaggccccccaccttatgtcaacctgcacttcttgttcaaaaatcaggaaaagaaaagatttgaagaccccaagtcttgtcaataacttgctgtgtggaagcagcgggggaagacctagaaccctttccccagcacttggttttccaacatgatatttatgagtaatttattttgatatgtacatctcttattttcttacattatttatgcccccaaattatatttatgtatgtaagtgaggtttgttttgtatattaaaatggagtttgtttgtaaaaaaaaaaaaaaaaaaaa

SEQ ID NO: 152964 - protein, 174 aa, Artificial Sequence
  derived and/or modified sequence
MRHFLSKVYSFPMRKLILFLVFPVVRQTPTQHFKNQFPALHWEHELGLAFTKNRMNYTNKFLLIPESGDYFIYSQVTFRGMTSECSEIRQAGRPNKPDSITVVITKVTDSYPEPTQLLMGTKSVCEVGSNWFQPIYLGAMFSLQEGDKLMVNVSDISLVDYTKEDKTFFGAFLL

SEQ ID NO: 152965 - protein, 251 aa, Artificial Sequence
  derived and/or modified sequence
MAEDLGLSFGETASVEMLPEHGSCRPKARSSSARWALTCCLVLLPFLAGLTTYLLVSQLRAQGEACVQFQALKGQEFAPSHQQVYAPLRADGDKPRAHLTVVRQTPTQHFKNQFPALHWEHELGLAFTKNRMNYTNKFLLIPESGDYFIYSQVTFRGMTSECSEIRQAGRPNKPDSITVVITKVTDSYPEPTQLLMGTKSVCEVGSNWFQPIYLGAMFSLQEGDKLMVNVSDISLVDYTKEDKTFFGAFLL

SEQ ID NO: 152966 - DNA, 756 bp, Artificial Sequence
  derived and/or modified sequence
atggccgaggacctgggcctgagcttcggcgagaccgccagcgtggagatgctgcccgagcacggcagctgcagacccaaggccagaagcagcagcgccagatgggccctgacctgctgcctggtgctgctgcccttcctggccggcctgaccacctacctgctggtgagccagctgagagcccagggcgaggcctgcgtgcagttccaggccctgaagggccaggagttcgcccccagccaccagcaggtgtacgcccccctgagagccgacggcgacaagcccagagcccacctgaccgtggtgagacagacccccacccagcacttcaagaaccagttccccgccctgcactgggagcacgagctgggcctggccttcaccaagaacagaatgaactacaccaacaagttcctgctgatccccgagagcggcgactacttcatctacagccaggtgaccttcagaggcatgaccagcgagtgcagcgagatcagacaggccggcagacccaacaagcccgacagcatcaccgtggtgatcaccaaggtgaccgacagctaccccgagcccacccagctgctgatgggcaccaagagcgtgtgcgaggtgggcagcaactggttccagcccatctacctgggcgccatgttcagcctgcaggagggcgacaagctgatggtgaacgtgagcgacatcagcctggtggactacaccaaggaggacaagaccttcttcggcgccttcctgctgtag

SEQ ID NO: 152967 - DNA, 756 bp, Artificial Sequence
  derived and/or modified sequence
atggctgaagacctgggactctctttcggggagaccgcttctgttgagatgctgccggaacatggaagctgcaggcccaaggctaggtctagcagtgctcggtgggccctgacatgttgtttggtacttctacctttcctcgccgggctgaccacctacctactggtatcgcagctgagagcccaaggggaggcatgcgtgcagtttcaggcactgaaaggccaggaattcgcgccttcacaccagcaggtgtacgcaccgctacgggcagacggggacaagccgagggcccacctcaccgttgtacggcagactccaacacaacacttcaaaaatcagttccccgctctccactgggaacatgaactggggttagccttcacgaaaaaccgaatgaactataccaacaagttcttgttgattcccgaatccggagattactttatttattcacaggtgacattccgcggaatgacttctgaatgctcggagatccggcaagcgggacggcccaacaagcctgatagcatcactgtggtgatcacaaaggttaccgattcctatcccgagcctacgcaactgctaatgggaacaaagtcagtatgcgaggtggggagtaactggttccagcccatatatctgggtgccatgttctccttacaggaaggagataaacttatggtgaacgtgagtgacatctcattagttgattacactaaagaagacaagacctttttcggagctttcttgctttag

SEQ ID NO: 152968 - DNA, 756 bp, Artificial Sequence
  derived and/or modified sequence
atggccgaggacctgggcctgagctttggagaaacagcctctgtggagatgctgcctgagcacggcagctgccggcccaaggcccggagcagcagcgcccgctgggccctgacctgctgcctggtgctgctgcccttcctggccggcctgaccacctacctgctggtgtcccagctgcgggcccagggcgaggcctgtgtgcagttccaggccctgaagggccaggagtttgcccccagccaccagcaggtgtatgcccccctgcgggcagatggagacaagccccgggcccacctgactgtggtgcggcagacccccacccagcacttcaagaaccagtttcctgccctgcactgggagcacgagctgggcctggccttcaccaagaacaggatgaactacaccaacaagttcctgctgatccctgagagcggggactacttcatctacagccaggtgaccttccggggcatgaccagtgaatgttctgagatccggcaggccggccggcccaacaagccagacagcatcaccgtggtgatcaccaaggtgacagacagctacccagagcccacccagctgctgatgggcaccaagtctgtgtgtgaggtgggcagcaactggttccagcccatctacctgggcgccatgttcagcctgcaggagggggacaagctgatggtgaatgtgtctgacatcagcctggtggactacaccaaggaggacaagaccttcttcggggccttcctgctgtag

SEQ ID NO: 152969 - DNA, 756 bp, Artificial Sequence
  derived and/or modified sequence
atggccgaggacctgggcctgagcttcggcgagaccgccagcgtggaaatgctgcccgagcacggtagctgccgcccgaaggcaagatcctcatccgccagatgggccctgacgtgctgcctggtccttctgcctttcttggctggattgacgacatacctgctcgtgagtcagctccgagctcagggcgaagcttgcgttcagtttcaggcactaaaaggtcaggaattcgctccgtcccaccagcaggtttacgcccctctgagggccgatggggacaagcctcgagctcaccttacagtggtcagacaaaccccaacccaacatttcaagaatcaatttcccgccctccactgggaacacgagcttgggctcgctttcacgaagaaccggatgaactacaccaataagttcctgttgatcccggagtccggcgactactttatatactcccaagtaacctttcgtggaatgacgagcgagtgttccgagatacggcaagctggacgcccgaacaagcccgacagtattactgttgttataactaaagtgaccgattcttaccccgagcccacccagctcttaatgggcacaaagtcagtgtgcgaggtgggaagtaattggttccaaccgatttatctgggggctatgtttagtctgcaggagggggataaattaatggtgaatgtgtcagacatctcactggtggattacacaaaagaggacaagacatttttcggcgcattcttgctgtag

SEQ ID NO: 152970 - DNA, 756 bp, Artificial Sequence
  derived and/or modified sequence
atggccgaagatttgggtctgtccttcggcgaaacagctagtgtggagatgcttcccgaacacgggtcctgcagacctaaagcaaggtccagctcggccagatgggctttgacctgctgtttggtcctcctcccctttcttgccggtctgacgacatatctgttggtgagtcaactgagggcgcagggtgaggcttgcgtgcagtttcaagccttaaaagggcaggaatttgccccttcacatcagcaagtctacgcgccattgagggccgacggcgacaagccgagagctcaccttacggttgtgcgccagacacccacacagcatttcaaaaaccagtttcccgcattgcactgggagcatgagctcggcctggcctttacaaaaaacagaatgaattacaccaacaagtttcttcttatccccgaaagcggcgattacttcatttattcccaagtgacgttccggggaatgacctcggagtgcagcgagatccgacaggcaggcaggcctaacaaaccagatagcatcacagtggttataaccaaagtcaccgactcatacccggaaccgacacaactcctgatgggtacaaaaagtgtttgcgaggttgggtccaattggtttcagcccatttacctgggagctatgttctctttgcaggagggcgacaagttaatggtcaatgtttctgatatttcacttgttgactatacaaaggaggacaaaacgttcttcggggctttcctgctgtag

SEQ ID NO: 152971 - DNA, 2002 bp, Artificial Sequence
  derived and/or modified sequence
aaaagggaaggaggagactgagtgattaagtcacccactgtgagagctggtcttctatttaatgggggctctctctgcccaggagtcagaggtgcctccaggagcagcaggagcatggccgaggatctgggactgagctttggggaaacagccagtgtggaaatgctgccagagcacggcagctgcaggcccaaggccaggagcagcagcgcacgctgggctctcacctgctgcctggtgttgctccccttccttgcaggactcaccacatacctgcttgtcagccagctccgggcccagggagaggcctgtgtgcagttccaggctctaaaaggacaggagtttgcaccttcacatcagcaagtttatgcacctcttagagcagacggagataagccaagggcacacctgacagttgtgagacaaactcccacacagcactttaaaaatcagttcccagctctgcactgggaacatgaactaggcctggccttcaccaagaaccgaatgaactataccaacaaattcctgctgatcccagagtcgggagactacttcatttactcccaggtcacattccgtgggatgacctctgagtgcagtgaaatcagacaagcaggccgaccaaacaagccagactccatcactgtggtcatcaccaaggtaacagacagctaccctgagccaacccagctcctcatggggaccaagtctgtatgcgaagtaggtagcaactggttccagcccatctacctcggagccatgttctccttgcaagaaggggacaagctaatggtgaacgtcagtgacatctctttggtggattacacaaaagaagataaaaccttctttggagccttcttactataggaggagagcaaatatcattatatgaaagtcctctgccaccgagttcctaattttctttgttcaaatgtaattataaccaggggttttcttggggccgggagtagggggcattccacagggacaacggtttagctatgaaatttggggcccaaaatttcacacttcatgtgccttactgatgagagtactaactggaaaaaggctgaagagagcaaatatattattaagatgggttggaggattggcgagtttctaaatattaagacactgatcactaaatgaatggatgatctactcgggtcaggattgaaagagaaatatttcaacaccttcctgctatacaatggtcaccagtggtccagttattgttcaatttgatcataaatttgcttcaattcaggagctttgaaggaagtccaaggaaagctctagaaaacagtataaactttcagaggcaaaatccttcaccaatttttccacatactttcatgccttgcctaaaaaaaatgaaaagagagttggtatgtctcatgaatgttcacacagaaggagttggttttcatgtcatctacagcatatgagaaaagctacctttcttttgattatgtacacagatatctaaataaggaagtatgagtttcacatgtatatcaaaaatacaacagttgcttgtattcagtagagttttcttgcccacctattttgtgctgggttctaccttaacccagaagacactatgaaaaacaagacagactccactcaaaatttatatgaacaccactagatacttcctgatcaaacatcagtcaacatactctaaagaataactccaagtcttggccaggcgcagtggctcacacctgtaatcccaacactttgggaggccaaggtgggtggatcatctaaggccgggagttcaagaccagcctgaccaacgtggagaaaccccatctctactaaaaatacaaaattagccgggcgtggtagcgcatggctgtaatcctggctactcaggaggccgaggcagaagaattgcttgaactggggaggcagaggttgcggtgagcccagatcgcgccattgcactccagcctgggtaacaagagcaaaactctgtccaaaaaaaaaaaaa

SEQ ID NO: 152972 - protein, 2177 aa, Artificial Sequence
  derived and/or modified sequence
MAAFGILSYEHRPLKRPRLGPPDVYPQDPKQKEDELTALNVKQGFNNQPAVSGDEHGSAKNVSFNPAKISSNFSSIIAEKLRCNTLPDTGRRKPQVNQKDNFWLVTARSQSAINTWFTDLAGTKPLTQLAKKVPIFSKKEEVFGYLAKYTVPVMRAAWLIKMTCAYYAAISETKVKKRHVDPFMEWTQIITKYLWEQLQKMAEYYRPGPAGSGGCGSTIGPLPHDVEVAIRQWDYTEKLAMFMFQDGMLDRHEFLTWVLECFEKIRPGEDELLKLLLPLLLRYSGEFVQSAYLSRRLAYFCTRRLALQLDGVSSHSSHVISAQSTSTLPTTPAPQPPTSSTPSTPFSDLLMCPQHRPLVFGLSCILQTILLCCPSALVWHYSLTDSRIKTGSPLDHLPIAPSNLPMPEGNSAFTQQVRAKLREIEQQIKERGQAVEVRWSFDKCQEATAGFTIGRVLHTLEVLDSHSFERSDFSNSLDSLCNRIFGLGPSKDGHEISSDDDAVVSLLCEWAVSCKRSGRHRAMVVAKLLEKRQAEIEAERCGESEAADEKGSIASGSLSAPSAPIFQDVLLQFLDTQAPMLTDPRSESERVEFFNLVLLFCELIRHDVFSHNMYTCTLISRGDLAFGAPGPRPPSPFDDPADDPEHKEAEGSSSSKLEDPGLSESMDIDPSSSVLFEDMEKPDFSLFSPTMPCEGKGSPSPEKPDVEKEVKPPPKEKIEGTLGVLYDQPRHVQYATHFPIPQEESCSHECNQRLVVLFGVGKQRDDARHAIKKITKDILKVLNRKGTAETDQLAPIVPLNPGDLTFLGGEDGQKRRRNRPEAFPTAEDIFAKFQHLSHYDQHQVTAQVSRNVLEQITSFALGMSYHLPLVQHVQFIFDLMEYSLSISGLIDFAIQLLNELSVVEAELLLKSSDLVGSYTTSLCLCIVAVLRHYHACLILNQDQMAQVFEGLCGVVKHGMNRSDGSSAERCILAYLYDLYTSCSHLKNKFGELFSDFCSKVKNTIYCNVEPSESNMRWAPEFMIDTLENPAAHTFTYTGLGKSLSENPANRYSFVCNALMHVCVGHHDPDRVNDIAILCAELTGYCKSLSAEWLGVLKALCCSSNNGTCGFNDLLCNVDVSDLSFHDSLATFVAILIARQCLLLEDLIRCAAIPSLLNAACSEQDSEPGARLTCRILLHLFKTPQLNPCQSDGNKPTVGIRSSCDRHLLAASQNRIVDGAVFAVLKAVFVLGDAELKGSGFTVTGGTEELPEEEGGGGSGGRRQGGRNISVETASLDVYAKYVLRSICQQEWVGERCLKSLCEDSNDLQDPVLSSAQAQRLMQLICYPHRLLDNEDGENPQRQRIKRILQNLDQWTMRQSSLELQLMIKQTPNNEMNSLLENIAKATIEVFQQSAETGSSSGSTASNMPSSSKTKPVLSSLERSGVWLVAPLIAKLPTSVQGHVLKAAGEELEKGQHLGSSSRKERDRQKQKSMSLLSQQPFLSLVLTCLKGQDEQREGLLTSLYSQVHQIVNNWRDDQYLDDCKPKQLMHEALKLRLNLVGGMFDTVQRSTQQTTEWAMLLLEIIISGTVDMQSNNELFTTVLDMLSVLINGTLAADMSSISQGSMEENKRAYMNLAKKLQKELGERQSDSLEKVRQLLPLPKQTRDVITCEPQGSLIDTKGNKIAGFDSIFKKEGLQVSTKQKISPWDLFEGLKPSAPLSWGWFGTVRVDRRVARGEEQQRLLLYHTHLRPRPRAYYLEPLPLPPEDEEPPAPTLLEPEKKAPEPPKTDKPGAAPPSTEERKKKSTKGKKRSQPATKTEDYGMGPGRSGPYGVTVPPDLLHHPNPGSITHLNYRQGSIGLYTQNQPLPAGGPRVDPYRPVRLPMQKLPTRPTYPGVLPTTMTGVMGLEPSSYKTSVYRQQQPAVPQGQRLRQQLQQSQGMLGQSSVHQMTPSSSYGLQTSQGYTPYVSHVGLQQHTGPAGTMVPPSYSSQPYQSTHPSTNPTLVDPTRHLQQRPSGYVHQQAPTYGHGLTSTQRFSHQTLQQTPMISTMTPMSAQGVQAGVRSTAILPEQQQQQQQQQQQQQQQQQQQQQQQQQQYHIRQQQQQQILRQQQQQQQQQQQQQQQQQQQQQQQQQQHQQQQQQQAAPPQPQPQSQPQFQRQGLQQTQQQQQTAALVRQLQQQLSNTQPQPSTNIFGRY

SEQ ID NO: 152973 - DNA, 6985 bp, Artificial Sequence
  derived and/or modified sequence
attgtccgatggttcccggcgtacctcggcttccctcggtagtttccggcaatggtcgagagtttctaacgtgcccccttgttgtctctcggccgccgtcctctcaaccaccgccccccttttcggctccctctcccccttcccgttcccccagtcagcctggccctgctggtgcctccggcgctacgggctgggcaagatggcggccttcgggatcttgagctacgaacaccggcccctgaagcggccgcggctggggcctcccgatgtttaccctcaggaccccaaacagaaggaggatgaactgacggccttgaatgtaaaacaaggtttcaataaccagcctgctgtctctggggatgagcatggcagtgccaagaacgtcagcttcaatcctgccaagatcagttccaacttcagcagcattattgcagagaaattacgttgtaatacccttcctgacactggtcgcaggaagccccaagtgaaccagaaggataacttctggctggtgactgcacgatcccagagtgccattaacacttggttcactgacttggctggcaccaagccactcacgcaactagccaaaaaggtccccattttcagtaagaaggaagaggtgtttgggtacttagccaaatacacagtgcctgtgatgcgggctgcctggctcattaagatgacctgtgcctactatgcagcaatctctgagaccaaggttaagaagagacatgttgaccctttcatggaatggactcagatcatcaccaagtacttatgggagcagttacagaagatggctgaatactaccggccagggcctgcaggaagtgggggctgtggttccacgatagggcccttgccccatgatgtagaggtggcaatccggcagtgggattacaccgagaagctggccatgttcatgtttcaggatggaatgctggacagacatgagttcctgacctgggtgcttgagtgttttgagaagatccgccctggagaggatgaattgcttaaactgctgctgcctctgcttctccgatactctggggaatttgttcagtctgcatacctgtcccgccggcttgcctacttctgtacacggagactggccctgcagctggatggtgtgagcagtcactcatctcatgttatatctgctcagtcaacaagcacgctacccaccacccctgctcctcagcccccaactagcagcacaccctcgactccctttagtgacctgcttatgtgccctcagcaccggcccctggtttttggcctcagctgtatcctacagaccatcctcctgtgctgtcctagtgccttggtttggcactactcactgactgatagcagaattaagaccggctcaccacttgaccacttgcctattgccccgtccaacctgcccatgccagagggtaacagtgccttcactcagcaggtccgtgcaaagttgcgggagatcgagcagcagatcaaggagcggggacaggcagttgaagttcgctggtctttcgataaatgccaggaagctactgcaggcttcaccattggacgggtacttcatactttggaagtgctggacagccatagttttgaacgctctgacttcagcaactctcttgactccctttgtaaccgaatctttggattgggacctagcaaggatgggcatgagatctcctcagatgatgatgctgtggtgtcattgctatgtgaatgggctgtcagctgcaagcgttctggtcggcatcgtgctatggtggtagccaagctcctggagaagagacaggcggagattgaggctgagcgttgtggagaatcagaagccgcagatgagaagggttccatcgcctctggctccctttctgctcccagtgctcccattttccaggatgtcctcctgcagtttctggatacacaggctcccatgctgacggaccctcgaagtgagagtgagcgggtggaattctttaacttagtactgctgttctgtgaactgattcgacatgatgttttctcccacaacatgtatacttgcactctcatctcccgaggggaccttgcctttggagcccctggtccccggcctccctctccctttgatgatcctgccgatgacccagagcacaaggaggctgaaggcagcagcagcagcaagctggaagatccagggctctcagaatctatggacattgaccctagttccagtgttctctttgaggacatggagaagcctgatttctcattgttctcccctactatgccctgtgaggggaagggcagtccatcccctgagaagccagatgtcgagaaggaggtgaagcccccacccaaggagaagattgaagggacccttggggttctttacgaccagccacgacacgtgcagtacgccacccattttcccatcccccaggaggagtcatgcagccatgagtgcaaccagcggttggtcgtactgtttggggtgggaaagcagcgagatgatgcccgccatgccatcaagaaaatcaccaaggatatcttgaaggttctgaaccgcaaagggacagcagaaactgaccagcttgctcctattgtgcctctgaatcctggagacctgacattcttaggtggggaggatgggcagaagcggcgacgcaaccggcctgaagccttccccactgctgaagatatctttgctaagttccagcacctttcacattatgaccaacaccaggtcacggctcaggtctcccggaatgttctggagcagatcacgagctttgcccttggcatgtcataccacttgcctctggtgcagcatgtgcagttcatcttcgacctcatggaatattcactcagcatcagtggcctcatcgactttgccattcagctgctgaatgaactgagtgtagttgaggctgagctgcttctcaaatcctcggatctggtgggcagctacactactagcctgtgcctgtgcatcgtggctgtcctgcggcactatcatgcctgcctcatcctcaaccaggaccagatggcacaggtctttgaggggctgtgtggcgtcgtgaagcatgggatgaaccggtccgatggctcctctgcagagcgctgtatccttgcttatctctatgatctgtacacctcctgtagccatttaaagaacaaatttggggagctcttcagcgacttttgctcaaaggtgaagaacaccatctactgcaacgtggagccatcggaatcaaatatgcgctgggcacctgagttcatgatcgacactctagagaaccctgcagctcacaccttcacctacacggggctaggcaagagtcttagtgagaaccctgctaaccgctacagctttgtctgcaatgcccttatgcacgtctgtgtggggcaccatgatcccgatagggtgaatgacatcgcaatcctgtgtgcagagctgaccggctattgcaagtcactgagtgcagaatggctaggagtgcttaaggccttgtgctgctcctctaacaatggcacttgtggtttcaacgatctcctctgcaatgttgatgtcagtgacctatcttttcatgactcgctggctacttttgttgccatcctcatcgctcggcagtgtttgctcctggaagatctgattcgctgtgctgccatcccttcactccttaatgctgcttgtagtgaacaggactctgagccaggggcccggcttacctgccgcatcctccttcaccttttcaagacaccgcagctcaatccttgccagtctgatggaaacaagcctacagtaggaatccgctcctcctgcgaccgccacctgctggctgcctcccagaaccgcatcgtggatggagccgtgtttgctgttctcaaggctgtgtttgtacttggggatgcggaactgaaaggttcaggcttcactgtgacaggaggaacagaagaacttccagaggaggagggaggaggtggcagtggtggtcggaggcagggtggccgcaacatctctgtggagacagccagtctggatgtctatgccaagtacgtgctgcgcagcatctgccaacaggaatgggtaggagaacgttgccttaagtctctgtgtgaggacagcaatgacctgcaagacccagtgttgagtagtgcccaggcgcagcgcctcatgcagctcatttgctatccacatcgactgctggacaatgaggatggggaaaacccccagcggcagcgcataaagcgcattctccagaacttggaccagtggaccatgcgccagtcttccttggagctgcagctcatgatcaagcagacccctaacaatgagatgaactccctcttggagaacatcgccaaggccacaatcgaggttttccaacagtcagcagagacagggtcatcttctggaagtactgcaagcaacatgcccagcagcagcaagaccaagcctgtgctcagctctctagagcgctctggtgtatggctggtggcccccctcattgctaaactgcccacctcagtccagggacatgtgttaaaggctgctggggaagaattggagaagggtcagcacctgggttcctcttcacgcaaagaacgtgatcgacaaaagcagaagagcatgtccctattgagccagcagcccttcttatcgctggtgctaacatgtctgaaagggcaggatgaacaacgcgagggactccttacctccctctacagccaggtgcaccagattgtgaataattggcgagatgaccagtacttagatgattgcaaaccaaagcagcttatgcatgaggcactcaaactgcggctcaacctggtggggggcatgtttgacacggtgcagcgcagcacccagcagaccacggagtgggccatgctcctcctggagatcatcatcagcggcactgtcgacatgcagtccaacaatgagctcttcactactgtgttggacatgctgagcgtgctcatcaatgggacattggctgcagacatgtctagcatctcgcaaggtagcatggaggaaaacaagcgtgcatacatgaacctggcgaagaagttgcagaaggagttgggggagcgccagtcagacagtctggaaaaggttcgccagctgctgccactgcccaagcagacccgagatgtcatcacgtgtgagccacagggctcccttatcgataccaagggcaacaagattgctggcttcgattccatcttcaagaaggagggtctacaggtttccaccaaacagaagatctcgccctgggatctttttgaggggttgaagccgtcagcaccactctcttggggctggtttggaacagtccgagtggaccggcgagtggctcgaggagaggagcagcagcggttgctgctctaccacacacacctgaggccccggccccgcgcctattacctggagccactgccactgcccccagaagatgaggagccgcctgctcctaccctgctagagcctgagaaaaaggctccagagccccccaaaactgacaaaccgggggctgctccacccagtactgaggaacgcaagaagaagtccaccaagggcaagaaacgcagccagccagctaccaagacagaggactatggaatgggcccgggtcggagcggcccttatggtgtgacagtgcctccggacctcctgcaccacccaaaccctggttctataacacaccttaactacaggcaaggctccataggcctgtacacccagaaccagccactacctgcaggtggccctcgtgtggacccataccgtcctgtgcgcttaccaatgcagaagctgcccacccgaccaacttaccctggagtgctgcccacaaccatgactggcgtcatgggtttagaaccctcctcttataagacctctgtgtaccggcagcagcaacctgcggtgccccaaggacagcgccttcgccaacagctccagcagagtcagggcatgttgggacagtcatctgtccatcagatgactcccagctcttcctacggtttgcagacttcccagggctatactccttatgtttctcatgtgggattgcagcaacacacaggccctgcaggtaccatggtgccccccagctactccagccagccttaccagagcacccacccttctaccaatcctactcttgtagatcctacccgccacctgcaacagcggcccagtggctatgtgcaccagcaggcccccacctatggacatggactgacctccactcaaaggttttcacaccagacactgcagcagacacccatgataagtaccatgactccaatgagtgcccagggcgtccaggcaggcgtccgttcaacagccatcctacctgagcagcagcagcagcagcaacagcagcaacagcaacagcagcagcagcagcaacagcaacagcagcagcagcagcagcagtaccacatccggcagcagcagcagcagcagatcctgcggcagcagcagcaacagcaacagcagcagcagcagcagcagcaacagcaacagcagcagcagcaacagcaacaacagcaacaccagcagcaacagcagcaacaggcggctcctccccaaccccagccccagtcccagccccagttccagcgccaggggcttcagcagacccagcagcagcaacagacagcagctttggtccggcaacttcaacaacagctctctaatacccagccacagcccagtaccaacatatttggacgctactgagccacctggaggaactgcttgtgcactggatgtggccccaccctttcctcttaattcccaatcccattcctgggctagcaccagtagtggttggggccctcccctcaggctccatttttaataagtttttagtatttttgttaatgtgaggcattgagctgttgggttttgtatattatttatatagagaccccagagctgttgcacccaatacacagagcttctttgcaaagggaaaaaaaaaaaaaaaaa

SEQ ID NO: 152974 - DNA, 6534 bp, Artificial Sequence
  derived and/or modified sequence
atggccgcattcggcatactctcctatgaacaccggcccctcaaaaggcctagactcggcccacctgatgtgtatcctcaggatcccaaacaaaaagaagacgagttgaccgccctgaacgtgaagcaggggttcaacaaccagccggcggtctctggggatgaacatggatccgctaagaatgtgagctttaatccggcaaagatctcttctaatttcagctcaattatcgccgaaaaactgagatgtaacaccctgccagatacaggccgaagaaagccccaggttaaccagaaggacaatttctggcttgtaactgctcgctctcagagcgcaatcaacacgtggtttaccgacttggctggaacaaagcccctgacccagctggccaagaaagtccctatcttcagcaaaaaggaggaagtgttcgggtatctggccaagtatacagtgcccgtgatgcgggccgcttggcttattaagatgacctgcgcctactatgctgccatctctgagaccaaggtgaagaagagacacgtagacccttttatggagtggacccaaatcatcactaagtatctgtgggagcagctgcagaagatggctgaatattatcgaccgggtcctgctggcagcggaggctgtggctcaacgatcggacctctgccccacgacgtggaagtcgccattagacagtgggattatacagaaaagctcgccatgttcatgtttcaggatggaatgttagaccgacatgagttcttgacttgggtgctggaatgctttgagaagattaggcccggcgaagatgagctgctaaagttgcttctcccactccttctgcgctactccggagagtttgtgcagtctgcatacctgtctcgcagacttgcttacttctgcacacgaaggttagccctccagttagacggtgtctccagtcattcctcccatgttatctccgcacaaagcacgtcaactttacctacaaccccagctccgcagccaccaaccagctccactccttcaacgcctttctccgatttgctcatgtgcccgcagcacaggcccctggtgtttggtttgtcatgtatcctccagacaatccttctctgctgtcccagtgccctggtgtggcactacagcctgaccgactcccgcatcaagaccggatcccctctcgatcacttgccaattgcaccctccaatttgccgatgccagaggggaacagcgctttcacacagcaggtgagagccaagctgcgcgagatagagcaacagattaaggaacgtggacaggccgtggaggtgcgatggagttttgacaaatgccaggaagcaaccgctgggttcactatagggcgtgtccttcacactttggaggtgctggactctcactctttcgaacgaagtgacttcagtaacagcttggattcactgtgcaataggatttttggactgggcccttctaaagatggccatgagatctccagcgacgacgatgcggtcgtgtcgctgctgtgtgaatgggctgttagttgtaagcgaagcggaaggcaccgcgcaatggtggtggcaaaactccttgaaaagaggcaggcagaaatcgaagccgaaagatgtggagaatctgaggccgcggacgagaagggaagcattgccagcggaagcctctctgccccctctgccccaatattccaggatgtcctgttgcagttcctcgacacccaggcaccaatgctgaccgaccctcgctcagagagcgagcgtgtggagttttttaatttagtgctgctgttctgcgagctgattcgccatgatgtgttttctcataacatgtacacatgtacattaatctcacggggcgatcttgcattcggggcacccggtcccaggcctccctctccatttgacgatcccgcggatgatccagaacataaggaagctgagggtagctcctcgtctaagctagaggaccccggcttgagcgagtccatggatatagatccttcctccagcgtgctgttcgaggatatggaaaaacctgacttttcccttttctcccccacaatgccttgtgagggcaaaggctcaccatctccggaaaaaccggacgtggaaaaggaagtgaaaccccctccgaaagagaaaatcgaaggaactctcggggtactgtacgaccaacctcgccatgttcagtacgcaacccattttcccatccctcaagaagagagttgcagtcacgagtgtaatcaaaggttagttgtccttttcggagtgggaaaacagagagatgacgccagacatgctattaagaaaattaccaaggatatcctgaaagtgctgaatcggaaggggactgctgagaccgaccagcttgcgcctattgttcccctgaatcctggtgacttgacttttttaggaggtgaggacggccagaaaagaaggcggaatcggccagaagcttttccgaccgctgaggacatttttgcgaagtttcagcacttaagccattacgatcagcaccaggtgaccgcgcaggtatctaggaacgtactggagcagatcacctccttcgcgctgggaatgtcataccatcttcccctagtccagcatgtgcaattcatctttgatctgatggaatattcacttagtataagtggactaatcgacttcgccatccagttgttgaacgagctgtcagtagtggaggccgagttgctgcttaaatctagtgatttagtcgggagctacaccacttccctgtgcctgtgcatcgtcgctgtgctaagacactaccacgcgtgtctgatcctgaaccaagatcaaatggctcaggtcttcgaaggcctgtgtggcgtagtgaaacatgggatgaaccgctcagatggctcctccgctgagcgctgtattctggcctatctgtatgatttgtatacctcttgtagccacctgaagaacaaattcggcgagttatttagcgatttttgtagtaaagtaaagaacaccatttactgcaacgtcgagcccagtgagtctaacatgcgatgggctcctgagttcatgattgacactctggagaatcccgcagcgcacactttcacctacactgggctgggcaagtccttatccgagaaccctgcgaacagatactctttcgtttgtaatgcactgatgcatgtgtgtgttggccatcatgatccggacagggtcaatgatattgctattttatgtgcagaattaacgggatattgcaaaagcctctcagcagagtggctcggcgtgttgaaagctctgtgttgctctagcaataacgggacttgcggattcaatgatcttctctgcaacgtcgacgtgagcgaccttagtttccatgattctctagccacattcgtggcaatcttaatcgctcgccagtgtctcttacttgaggatctgatcagatgtgcagcaatcccttcattactcaatgccgcgtgtagtgaacaggactccgagcccggcgcgagactcacttgcagaatcctattacatctgttcaagactccacagcttaacccttgtcagagcgatggcaacaagcctacagtggggatccggagtagctgcgatcgccatctgctggccgcttctcaaaacaggatcgtggatggtgccgtgttcgccgtcctaaaagcagtcttcgtgttgggcgatgcggagctgaagggatctggtttcacggtgactggagggaccgaggagctcccagaggaagagggtggcgggggcagcggaggacgtcgccaggggggacgcaatatatcggtagaaaccgctagcctggatgtctatgctaaatatgtgctgcgctctatttgccagcaggagtgggtcggcgaaaggtgtctgaagagcctgtgtgaggatagtaacgatctccaggatccagtcctgagctctgcccaggcccagagactgatgcagctgatatgttacccacatcggctgctcgacaacgaggatggagaaaatccccaaagacaaaggattaaaaggattctacagaacctggatcagtggactatgcgccagtcttctctcgagttacagttaatgatcaagcagacccccaacaacgaaatgaactcacttcttgaaaacattgctaaagccaccatcgaggtgttccaacaatctgcagagacagggtcaagcagtggatcaactgcctcaaacatgccctcatcatcaaagacaaaacctgtactcagtagtttggaaagatctggggtgtggctcgtggctcctttgattgccaaactgcccacatccgtacagggccacgtgctgaaggccgccggcgaggagctcgagaaggggcaacatttgggctcatcttcgaggaaggagcgggacagacagaaacagaaaagtatgtccttactcagccaacagcctttccttagcctggtattaacttgcctaaaaggccaggatgaacagcgcgagggactgctgactagcctttactcccaggtccaccagatcgtaaacaattggcgggacgatcagtatctggatgattgcaagcctaaacagctgatgcacgaagccttgaagctgaggctgaacttagtcgggggtatgttcgacacagtccagagaagtacacagcagacgaccgagtgggccatgctgctgctcgagatcattataagcgggacagtggatatgcagtctaacaatgaactgtttactaccgtcctggacatgctcagtgtgctgatcaatggtacactcgccgccgacatgtcatctatctctcaggggtcgatggaagaaaataaaagggcatatatgaacctggccaaaaaattacagaaggagctgggggaaaggcagtcggactccctcgaaaaggtgcggcagctattaccgctgcctaagcaaacgagagatgtgattacctgcgagccacagggttctctgattgacacaaagggcaacaagatcgcggggtttgacagcatttttaaaaaggaagggcttcaggtgtccacgaagcagaagatttcaccctgggatctgtttgaaggcttaaagccgagcgctccactgtcttggggttggttcggcactgttcgggtggaccgcagagtggctaggggcgaagaacagcaaaggctgttgctataccatactcacctgcgacctcggcccagagcgtactatttagaaccattacctctgcccccggaggacgaggagccaccagctcctaccctgctagaacctgagaagaaggctccggagcctccaaagactgataagccaggcgcagccccaccgtctacagaagaacgcaaaaagaaaagtaccaaaggaaaaaaaaggagccaaccagccacaaaaaccgaggactatgggatgggccccgggagatccgggccctacggcgttactgtccctcctgacttgctccaccacccaaatcccggctctattacacatctgaactaccgacaagggagcattggcctgtacacccagaaccagcctctgcccgccggtgggccccgagtggatccctatagacccgtcaggctgcccatgcagaaactgcctactcggcccacataccccggagtgttgccaaccacgatgaccggggttatgggcctggagccgagttcctataaaacttctgtgtatcgccaacaacagcccgctgtgccccaggggcagagactcaggcaacagctccaacagtcccagggcatgcttgggcaaagctctgtgcatcagatgacaccctcatcatcctatgggctccagacatcccaaggttacacgccttacgtcagccacgtgggacttcagcagcacacagggcctgctggtaccatggttcctccctcatactcatcacagccgtatcagagtacacatcctagcactaatccaactctggtggaccctacccgccatctccagcaacggcctagtggctacgtccaccaacaggcacctacttatggacatggactgacgtccacacaaagattctctcaccagaccctgcagcagactcctatgatcagtaccatgactcccatgtcagcacagggcgttcaagcgggggtgagatccaccgccatcctgcccgagcagcagcagcaacagcagcaacaacagcagcagcagcagcaacagcaacagcaacaacagcagcagcaacagcagcagtaccatatacgtcagcagcaacagcaacaaattttgagacagcagcagcagcaacagcagcagcagcagcaacagcagcagcagcagcagcagcagcagcagcagcagcagcaacaacatcagcagcagcaacagcaacaagccgcccccccccagccacagccacagtcacaaccgcagtttcagcgtcagggtctgcaacagactcagcaacagcagcagacagccgcactggtgcgtcagttacagcaacaactatccaatacccaaccccaaccatcaaccaacatattcggtagatattag

SEQ ID NO: 152975 - DNA, 6531 bp, Artificial Sequence
  derived and/or modified sequence
atggccgcgtttggaattttgagttatgaacacagacctctgaaaaggccaaggttgggccctccagatgtgtacccccaagatcccaagcagaaagaggatgaacttaccgcactgaatgtgaagcagggattcaataaccagcccgcagtaagcggggatgagcacggcagcgcaaaaaacgtttctttcaacccagccaaaatctcctctaacttttcctctatcatcgctgaaaagctccgctgtaacactttaccagataccgggcgtagaaagccacaggtaaaccaaaaggacaatttctggcttgttaccgctcgctcacagagtgccataaacacctggtttacagatctggcgggcaccaagccgttaacccagctggctaaaaaggttcccatcttttcaaaaaaggaagaagtctttggctaccttgcaaagtacacagttcctgtgatgcgtgccgcatggctaataaaaatgacctgtgcctactatgccgccattagcgagacaaaggtgaaaaaaagacatgttgaccccttcatggaatggacccagattatcacaaaatacctttgggagcagctgcagaaaatggcggagtattacagaccaggcccagcgggcagcggggggtgtgggagcacaattggcccattgccccatgacgtggaagttgccatacgacaatgggactataccgagaagctcgccatgtttatgttccaggatggtatgctcgaccggcacgaattcttgacttgggttctcgaatgcttcgaaaagattcgtcctggagaggacgagttgttaaagttgctcctccctcttctccttcgatattccggggaatttgtgcagtcagcttacctttcgcgaagattggcctacttttgcaccagaaggttggcactgcagctggacggggtcagctcacacagtagccacgtcataagcgcccagtcaacgtcaactctgcccaccacccccgccccgcaaccccctacctctagcacaccatctacccccttctctgacctgctgatgtgtccccagcatcggcctcttgtcttcggtctgtcttgcattcttcagaccattctcttgtgttgtccttcagctttagtctggcattacagcctcactgactcacggatcaagacaggctccccactggaccatctgcctattgcgccctccaacttgccaatgcccgagggcaacagtgcgtttactcagcaggtgagagcaaaattgcgggagatcgaacagcagattaaggagaggggccaggctgttgaggtgagatggagtttcgataagtgccaggaagcaacagccggtttcactattggacgcgtgttgcacacactcgaggtgctagacagccattcgtttgaaagatccgattttagcaatagcctggacagcctgtgcaatcggatattcggcttgggcccaagtaaggatggccatgaaattagcagtgatgatgatgcagttgtgtcactcttatgcgaatgggcagttagttgcaaaagatctgggcgccatcgagccatggtagtggccaagcttctcgaaaaaagacaggccgaaattgaggctgaaaggtgcggcgagagtgaggcagcagatgaaaaggggagcatcgccagcgggagcttatcagctccttccgccccaatttttcaggacgttctgctccagtttcttgatacccaggcccctatgctgaccgatcctaggtccgagtctgagcgcgtagaatttttcaacctcgtgttactgttttgcgaactgatacggcacgatgtattctcccacaatatgtatacatgcactctgatctcacggggcgacttggccttcggcgcacctggaccaaggcccccctccccttttgatgacccggcagacgaccccgaacacaaagaggcagaaggaagttccagcagcaagctggaggatccaggcttgagtgagtctatggacatagacccatcctcgtctgtgcttttcgaggacatggaaaaacctgacttttcattgttctctcccactatgccatgtgaaggcaagggtagtccttctcccgagaagcctgatgtggaaaaagaggttaaaccccctccaaaggagaagattgaaggtacccttggagtcctttacgatcagccacgccacgtgcagtatgctactcatttccctattccacaggaggaaagttgcagccatgagtgtaaccaacggcttgtcgtcctttttggcgtcggcaaacagcgagatgacgcacggcacgctatcaagaaaataacaaaggacattctgaaggttctaaataggaagggtactgccgagacagatcaactggccccaatagttccattgaatcccggagacctgacatttttgggaggcgaagacggccagaaacggcgtcgtaatagacctgaagcgtttcccaccgccgaggacatcttcgccaaattccagcacctgtcacattatgaccagcatcaagtgactgcccaggtctcccggaatgtgctagagcagatcacctcattcgctctgggcatgtcctaccatctaccgcttgtacagcacgtacagtttatatttgatctcatggaatactccctgagcatttcaggattgatcgattttgcaattcagctgttgaacgagctatcagtggtcgaggctgagctgttgcttaaatcttctgatctcgtggggtcctataccacgtcactgtgtctgtgcatcgtcgccgtactgcgtcactaccatgcctgcctgatcctgaaccaggatcagatggctcaggtgtttgaagggctgtgcggcgtcgtgaaacatgggatgaaccgctctgacggctcctcagctgagcgttgcatcctggcctacttatacgatctgtacacctcttgcagccatttaaaaaataagttcggggaactcttctctgatttttgttccaaggtgaaaaacaccatctattgcaatgttgagccttcggagtccaatatgagatgggcccctgaattcatgatagataccctggagaatccagccgcgcacacttttacctacaccggcctaggcaaaagcctcagtgagaatccagcaaaccggtatagcttcgtgtgcaacgccctcatgcacgtgtgcgtgggtcatcatgaccccgatcgggtgaatgacattgcaatactttgtgctgaactgactggctactgcaaatcgttgtctgccgaatggctgggggtcttgaaggccctttgctgttcatctaataatgggacatgcgggtttaatgatcttctgtgtaatgtagacgtgtccgacctgtcttttcacgattccctggctaccttcgtggcgatattgattgccagacaatgcctgctgttggaagacttaatccgctgcgccgccatcccttccctgctcaacgcagcctgttctgagcaggattcagagcctggtgcccggctgacctgtcggatcttgctgcacctgtttaaaactccacagcttaacccatgccaaagtgacggcaacaagccgacagtgggaatccgttcatcctgtgatagacacttactggccgcaagccagaatcgaatagtggacggggctgtctttgctgtactaaaggctgtttttgtcctgggcgacgccgaactgaagggcagcggattcacagtcacaggcggcactgaagagttaccagaggaggagggaggcgggggttccggtggacgacgccaaggcgggcggaacattagcgttgaaacagcctccctagatgtttacgcaaaatacgtgctgaggagtatttgtcaacaagagtgggttggggaaagatgcttgaagagtttatgcgaagacagtaatgacctccaagacccagtcctctcaagcgctcaggcccaacgcctgatgcagcttatttgctacccacatcgtctcttggataatgaggacggtgagaacccgcagcggcaaaggatcaaacgtattctccagaaccttgaccagtggacaatgcgacagtcatccctggagttgcagctcatgattaagcagaccccaaacaacgagatgaattcattgctggaaaacattgcgaaggccactattgaagttttccagcagagcgctgagaccgggtctagctccggctccactgctagcaacatgccatcttctagcaagacgaaacccgtgctcagctcactggaacgctccggagtatggcttgtggcccctttgattgccaaacttccaactagcgttcagggccatgtgctgaaggcggcgggcgaggaactcgagaaaggccaacacctcggcagcagctcccgtaaggaaagggacaggcaaaaacaaaagtctatgtctttgttgtctcaacagcccttcctgagtctggttctgacatgcctgaagggtcaggatgaacaaagagagggactgttaacatctttatactcccaggtccaccagatcgtgaataattggagggacgaccagtatttggatgactgtaagcccaagcagttaatgcacgaggcccttaagcttcgccttaatctggttggtggcatgttcgacacagtccagagaagcacccagcaaacaacagaatgggctatgctcctcttggagatcattattagcgggaccgtcgacatgcaaagcaacaatgagctgtttaccaccgtgctagacatgctgagtgtgctaattaacggaactctggccgcggacatgtcttctatttcccagggaagtatggaggagaataagcgcgcctatatgaacctggctaaaaagctgcagaaagaactgggcgagcgccaatccgatagcctggaaaaagtgcggcagcttcttccgcttcccaaacaaacaagagacgtgatcacatgtgagccccaggggagtcttatcgacaccaaggggaacaaaatcgcgggtttcgactccattttcaaaaaggaaggcctgcaggtgagcacaaagcagaaaatatctccctgggacttgtttgagggcctgaaaccgagcgctccgctgagttgggggtggtttggtaccgtccgggtggaccggcgagtagctaggggtgaggaacagcagcgacttctcctctaccacacacatttgagaccccggccccgagcctattacctcgaacctctgccactgcctcccgaagacgaggagcctcctgccccaaccctcctggaaccagagaaaaaagctccagaaccgcccaaaacagataagccaggcgccgcccctcctagtactgaagaacggaagaagaaaagcaccaaaggcaagaaaaggtcacaacccgcaaccaaaacagaggactacggtatgggccctggcagatccggcccctacggagtgacagtcccccccgatctgctgcatcatcccaatcccggatccattacccacctgaactataggcagggcagtatcggcctgtatacccagaaccaaccactccctgcaggaggacctcgggtggacccttatcgaccagtgcggctgcccatgcagaaactgccaacccgaccaacttatcccggggtgctgccaaccactatgaccggggtgatgggactagagccatcttcctataaaactagcgtgtatagacagcagcagcccgctgtgcctcagggccagcgccttcgacagcagctgcaatcacaaggaatgctcggccagagttctgtgcaccagatgacccccagtagttcctacggcctgcagacttcccaagggtataccccttatgtgagccatgtcggtctgcaacaacacactgggccggccggaaccatggtccccccgtcgtactcttctcagccataccagagcacacacccttctaccaatcctactttggtggatccaaccagacacctccagcagcggccctcaggctacgtgcatcaacaggcccctacttacgggcatggcctgacctcaacccaacgcttcagccatcagaccctccagcaaacaccgatgatctcaacgatgacacctatgtccgcacaaggggtgcaggccggtgttcgaagcaccgccatcctgcctgagcagcaacagcagcagcagcagcagcagcaacagcagcagcaacagcagcagcagcaacagcagcaacagcaacagcagtaccatattcgccaacagcagcagcaacagatcttaagacagcagcaacagcagcagcagcagcagcagcagcagcaacagcagcagcagcagcagcagcagcagcagcagcaacaacaccagcagcagcagcagcaacaagctgcaccccctcagccccagcctcagtcacaaccccagttccagcgacaaggactgcaacagacacaacagcagcagcagacggccgctctggtaagacaactgcaacagcagctgagtaatactcagccacagccttctacaaacatattcggaaggtattag

SEQ ID NO: 152976 - DNA, 6534 bp, Artificial Sequence
  derived and/or modified sequence
atggccgccttcggcatcctgtcctatgagcaccggcccctgaagaggccccggctgggccccccagatgtgtacccccaggaccccaagcagaaggaggatgagctgacagccctgaatgtgaagcagggcttcaacaaccagcctgctgtgtctggagatgagcacggcagcgccaagaatgtgtccttcaacccagccaagatcagcagcaacttcagcagcatcatcgccgagaagctgcgctgcaacaccctgcctgacacaggaagaaggaagccccaggtgaaccagaaggacaacttctggctggtgacagcccggagccagagcgccatcaacacctggttcacagacctggccggcaccaagcccctgacccagctggccaagaaggtgcccatcttcagcaagaaggaggaggtgtttggctacctggccaagtacacagtgcctgtgatgagagctgcctggctgatcaagatgacctgtgcctactatgctgccatcagcgagaccaaggtgaagaagagacatgtggaccccttcatggagtggacccagatcatcaccaagtacctgtgggagcagctgcagaagatggccgagtactacagacctggccctgctggcagcggcggctgcggcagcaccatcggccccctgccccatgatgtggaggtggccatccggcagtgggactacacagagaagctggccatgttcatgttccaggacggcatgctggacagacatgagttcctgacctgggtgctggagtgctttgagaagatccggcctggagaagatgagctgctgaagctgctgctgcccctgctgctgcgctacagcggggagtttgtgcagagcgcctacctgagccggcggctggcctacttctgcacccggcggctggccctgcagctggatggagtgagcagccacagcagccacgtgatcagcgcccagagcaccagcaccctgcccaccaccccagccccccagccccccaccagcagcacccccagcacccccttcagtgacctgctgatgtgcccccagcaccggcccctggtgtttggcctgagctgcatcctgcagaccatcctgctgtgctgccccagcgccctggtgtggcactacagcctgacagacagccgcatcaagacaggcagccccctggaccacctgcccatcgcccccagcaacctgcccatgcctgagggcaacagcgccttcacccagcaggtgcgggccaagctgcgggagattgagcagcagatcaaggagcggggccaggccgtggaggtgcgctggagctttgacaagtgccaggaggccacagctggcttcaccatcggccgggtgctgcacaccctggaggtgctggacagccacagctttgagaggagtgacttcagcaacagcctggacagcctgtgcaaccgcatcttcggcctgggccccagcaaggatggccacgagatcagcagtgatgatgatgctgtggtgtccctgctgtgtgagtgggccgtgtcctgcaagaggagcggccgccaccgggccatggtggtggccaagctgctggagaagaggcaggccgagattgaggccgagcgctgtggggagagcgaggccgcagatgagaagggcagcatcgccagcggcagcctgagcgcccccagcgcccccatcttccaggatgtgctgctgcagttcctggacacccaggcccccatgctgacagaccccaggtctgagagcgagcgggtggagttcttcaacctggtgctgctcttctgtgagctgatcagacatgatgtgttcagccacaacatgtacacctgcaccctcatcagcagaggagacctggccttcggggcccctggccccaggcctcccagcccctttgatgatcctgcagatgatcctgagcacaaggaggccgagggcagcagcagcagcaagctggaggaccccggcctgtctgagagcatggacatcgaccccagcagctctgtgctgtttgaggacatggagaagccagacttcagcctcttcagccccaccatgccctgtgagggcaagggcagccccagccctgagaagccagatgtggagaaggaggtgaagcccccacccaaggagaagattgagggcaccctgggcgtgctgtatgaccagcccaggcatgtgcagtatgccacccacttccccatcccccaggaggagagctgcagccatgagtgcaaccagaggctggtggtgctgtttggagtgggcaagcagagagatgatgcccggcatgccatcaagaagatcaccaaggacatcctgaaggtgctgaacagaaaaggaacagctgagacagaccagctggcccccatcgtgcccctgaaccctggggacctgaccttcctgggcggggaggatggccagaagagaagaagaaacagacctgaggccttccccacagctgaggacatctttgccaagttccagcacctgagccactatgaccagcaccaggtgacagcccaggtgtccagaaatgtgctggagcagatcaccagctttgccctgggcatgagctaccacctgcccctggtgcagcacgtgcagttcatctttgacctgatggagtacagcctgagcatcagcggcctgattgactttgccatccagctgctgaatgagctgtctgtggtggaggccgagctgctgctgaagagcagtgacctggtgggcagctacaccaccagcctgtgcctgtgcatcgtggccgtgctgcggcactaccacgcctgcctgatcctgaaccaggaccagatggcccaggtgtttgagggcctgtgtggggtggtgaagcacggcatgaacagaagtgatggcagcagcgctgagcgctgcatcctggcctacctgtatgacctgtacaccagctgcagccacctgaagaacaagtttggagagctgttcagtgacttctgcagcaaggtgaagaacaccatctactgcaatgtggagcccagcgagagcaacatgcgctgggcccctgagttcatgattgacaccctggagaacccagctgcccacaccttcacctacacaggcctgggcaagagcctgtctgaaaatcctgccaaccgctacagctttgtgtgcaatgccctgatgcacgtgtgtgtgggccaccacgaccctgacagagtgaatgacatcgccatcctgtgtgccgagctgaccggctactgcaagagcctgtctgctgagtggctgggcgtgctgaaggccctgtgctgcagcagcaacaacggcacctgtggcttcaatgacctgctgtgcaatgtggatgtgtctgacctgtccttccatgacagcctggccacctttgtggccatcctgattgcccggcagtgcctgctgctggaggacctgatccgctgtgccgccatccccagcctgctgaatgctgcctgcagcgagcaggacagcgagcccggggcccggctgacctgccgcatcctgctgcacctgttcaagaccccccagctgaacccctgccagagtgatggcaacaagcccaccgtgggcatccgcagcagctgtgacagacacctgctggccgccagccagaacagaattgtggatggagctgtgtttgctgtgctgaaggctgtgtttgtgctgggagatgctgagctgaagggcagcggcttcaccgtgactggaggaacagaggagctgcctgaggaggagggcggcggcggcagcggcggccggcggcagggcggcaggaacatctctgtggagacagccagcctggatgtgtatgccaagtatgtgctgcggagcatctgccagcaggagtgggtgggggagcgctgcctgaagagcctgtgtgaggacagcaatgacctgcaggaccctgtgctgagcagcgcccaggcccagaggctgatgcagctgatctgctacccccaccggctgctggacaatgaagatggagagaacccccagaggcagaggatcaagaggatcctgcagaacctggaccagtggaccatgaggcagagcagcctggagctgcagctgatgatcaagcagacccccaacaatgagatgaacagcctgctggagaacatcgccaaggccaccatcgaggtgttccagcagagcgctgagaccggcagcagcagcggcagcacagccagcaacatgcccagcagcagcaagaccaagcctgtgctgagcagcctggagaggtctggagtgtggctggtggcccccctcatcgccaagctgcccacctctgtgcagggccacgtgctgaaggctgctggggaggagctggagaagggccagcacctgggcagcagcagcaggaaggagcgggaccggcagaagcagaagtccatgagcctgctgagccagcagcccttcctgagcctggtgctgacctgcctgaagggccaggatgagcagcgggagggcctgctgaccagcctgtacagccaggtgcaccagatcgtgaacaactggagagatgaccagtacctggatgactgcaagcccaagcagctgatgcatgaggccctgaagctgcggctgaacctggtgggcggcatgtttgacacagtgcagaggagcacccagcagaccacagagtgggccatgctgctgctggagatcatcatctctggaacagtggacatgcagagcaacaatgagctgttcaccaccgtgctggacatgctgtctgtgctgatcaatggcaccctggccgctgacatgagcagcatcagccagggctccatggaggagaacaagagggcctacatgaacctggccaagaagctgcagaaggagctgggggagcggcagagcgacagcctggagaaggtgcggcagctgctgcccctgcccaagcagaccagagatgtgatcacctgtgagccccagggcagcctgattgacaccaagggcaacaagattgctggctttgacagcatcttcaagaaggagggcctgcaggtgtccaccaagcagaagatcagcccctgggacctgtttgagggcctgaagcccagcgcccccctgtcctggggctggtttggaacagtgcgggtggaccggcgggtggcccggggggaggagcagcagaggctgctgctgtaccacacccacctgcggccccggccccgggcctactacctggagcccctgcccctgcccccagaagatgaggagcccccagcccccaccctgctggagcctgagaagaaggcccctgagccccccaagacagacaagccaggggccgccccacccagcacagaggagaggaagaagaagagcaccaagggcaagaagaggagccagcctgccaccaagacagaggactatggcatgggccctggccgcagcggcccctacggcgtgacagtgcccccagacctgctgcaccaccccaaccctggcagcatcacccacctgaactaccggcagggcagcatcggcctgtacacccagaaccagcccctgcctgctgggggcccccgggtggacccctacagacctgtgcggctgcccatgcagaagctgcccacccggcccacctacccaggagtgctgcccaccaccatgactggagtgatgggcctggagcccagcagctacaagacctctgtgtaccggcagcagcagcctgctgtgccccagggccagaggctgcggcagcagctgcagcagagccagggcatgctgggccagagctctgtgcaccagatgacccccagcagcagctatggcctgcagaccagccagggctacaccccctacgtgagccacgtgggcctgcagcagcacactggacctgctggcaccatggtgcccccatcctacagcagccagccctaccagagcacccaccccagcaccaaccccaccctggtggaccccaccaggcacctgcagcagaggcccagcggctacgtgcaccagcaggcccccacctacggccacggcctgaccagcacccagcgcttcagccaccagaccctgcagcagacccccatgatcagcaccatgacccccatgtctgcccagggcgtgcaggccggcgtgcgcagcacagccatcctgcctgagcagcagcagcagcagcagcagcagcagcagcagcagcagcagcagcagcagcagcagcagcagcagcagcagcagcagtaccacatccggcagcagcagcagcagcagatcctgcggcagcagcagcagcagcagcagcagcagcagcagcagcagcagcagcagcagcagcagcagcagcagcagcagcagcagcaccagcagcagcagcagcagcaggccgccccaccccagccccagccccagagccagccccagttccagaggcagggcctgcagcagacccagcagcagcagcagacagctgccctggtgcggcagctgcagcagcagctgagcaacacccagccccagcccagcaccaacatcttcggccgctactag

SEQ ID NO: 152977 - DNA, 6531 bp, Artificial Sequence
  derived and/or modified sequence
atggccgccttcggcatcctgtcctatgagcaccggcccctgaagaggccccggctgggccccccagatgtgtacccccaggaccccaagcagaaggaggatgagctgacagccctgaatgtgaagcagggcttcaacaaccagcctgctgtgtctggagatgagcacggcagcgccaagaatgtgtccttcaacccagccaagatcagcagcaacttcagcagcatcatcgccgagaagctgcgctgcaacaccctgcctgacacaggaagaaggaagccccaggtgaaccagaaggacaacttctggctggtgacagcccggagccagagcgccatcaacacctggttcacagacctggccggcaccaagcccctgacccagctggccaagaaggtgcccatcttcagcaagaaggaggaggtgtttggctacctggccaagtacacagtgcctgtgatgagagctgcctggctgatcaagatgacctgtgcctactatgctgccatcagcgagaccaaggtgaagaagagacatgtggaccccttcatggagtggacccagatcatcaccaagtacctgtgggagcagctgcagaagatggccgagtactacagacctggccctgctggcagcggcggctgcggcagcaccatcggccccctgccccatgatgtggaggtggccatccggcagtgggactacacagagaagctggccatgttcatgttccaggacggcatgctggacagacatgagttcctgacctgggtgctggagtgctttgagaagatccggcctggagaagatgagctgctgaagctgctgctgcccctgctgctgcgctacagcggggagtttgtgcagagcgcctacctgagccggcggctggcctacttctgcacccggcggctggccctgcagctggatggagtgagcagccacagcagccacgtgatcagcgcccagagcaccagcaccctgcccaccaccccagccccccagccccccaccagcagcacccccagcacccccttcagtgacctgctgatgtgcccccagcaccggcccctggtgtttggcctgagctgcatcctgcagaccatcctgctgtgctgccccagcgccctggtgtggcactacagcctgacagacagccgcatcaagacaggcagccccctggaccacctgcccatcgcccccagcaacctgcccatgcctgagggcaacagcgccttcacccagcaggtgcgggccaagctgcgggagattgagcagcagatcaaggagcggggccaggccgtggaggtgcgctggagctttgacaagtgccaggaggccacagctggcttcaccatcggccgggtgctgcacaccctggaggtgctggacagccacagctttgagaggagtgacttcagcaacagcctggacagcctgtgcaaccgcatcttcggcctgggccccagcaaggatggccacgagatcagcagtgatgatgatgctgtggtgtccctgctgtgtgagtgggccgtgtcctgcaagaggagcggccgccaccgggccatggtggtggccaagctgctggagaagaggcaggccgagattgaggccgagcgctgtggggagagcgaggccgcagatgagaagggcagcatcgccagcggcagcctgagcgcccccagcgcccccatcttccaggatgtgctgctgcagttcctggacacccaggcccccatgctgacagaccccaggtctgagagcgagcgggtggagttcttcaacctggtgctgctcttctgtgagctgatcagacatgatgtgttcagccacaacatgtacacctgcaccctcatcagcagaggagacctggccttcggggcccctggccccaggcctcccagcccctttgatgatcctgcagatgatcctgagcacaaggaggccgagggcagcagcagcagcaagctggaggaccccggcctgtctgagagcatggacatcgaccccagcagctctgtgctgtttgaggacatggagaagccagacttcagcctcttcagccccaccatgccctgtgagggcaagggcagccccagccctgagaagccagatgtggagaaggaggtgaagcccccacccaaggagaagattgagggcaccctgggcgtgctgtatgaccagcccaggcatgtgcagtatgccacccacttccccatcccccaggaggagagctgcagccatgagtgcaaccagaggctggtggtgctgtttggagtgggcaagcagagagatgatgcccggcatgccatcaagaagatcaccaaggacatcctgaaggtgctgaacagaaaaggaacagctgagacagaccagctggcccccatcgtgcccctgaaccctggggacctgaccttcctgggcggggaggatggccagaagagaagaagaaacagacctgaggccttccccacagctgaggacatctttgccaagttccagcacctgagccactatgaccagcaccaggtgacagcccaggtgtccagaaatgtgctggagcagatcaccagctttgccctgggcatgagctaccacctgcccctggtgcagcacgtgcagttcatctttgacctgatggagtacagcctgagcatcagcggcctgattgactttgccatccagctgctgaatgagctgtctgtggtggaggccgagctgctgctgaagagcagtgacctggtgggcagctacaccaccagcctgtgcctgtgcatcgtggccgtgctgcggcactaccacgcctgcctgatcctgaaccaggaccagatggcccaggtgtttgagggcctgtgtggggtggtgaagcacggcatgaacagaagtgatggcagcagcgctgagcgctgcatcctggcctacctgtatgacctgtacaccagctgcagccacctgaagaacaagtttggagagctgttcagtgacttctgcagcaaggtgaagaacaccatctactgcaatgtggagcccagcgagagcaacatgcgctgggcccctgagttcatgattgacaccctggagaacccagctgcccacaccttcacctacacaggcctgggcaagagcctgtctgaaaatcctgccaaccgctacagctttgtgtgcaatgccctgatgcacgtgtgtgtgggccaccacgaccctgacagagtgaatgacatcgccatcctgtgtgccgagctgaccggctactgcaagagcctgtctgctgagtggctgggcgtgctgaaggccctgtgctgcagcagcaacaacggcacctgtggcttcaatgacctgctgtgcaatgtggatgtgtctgacctgtccttccatgacagcctggccacctttgtggccatcctgattgcccggcagtgcctgctgctggaggacctgatccgctgtgccgccatccccagcctgctgaatgctgcctgcagcgagcaggacagcgagcccggggcccggctgacctgccgcatcctgctgcacctgttcaagaccccccagctgaacccctgccagagtgatggcaacaagcccaccgtgggcatccgcagcagctgtgacagacacctgctggccgccagccagaacagaattgtggatggagctgtgtttgctgtgctgaaggctgtgtttgtgctgggagatgctgagctgaagggcagcggcttcaccgtgactggaggaacagaggagctgcctgaggaggagggcggcggcggcagcggcggccggcggcagggcggcaggaacatctctgtggagacagccagcctggatgtgtatgccaagtatgtgctgcggagcatctgccagcaggagtgggtgggggagcgctgcctgaagagcctgtgtgaggacagcaatgacctgcaggaccctgtgctgagcagcgcccaggcccagaggctgatgcagctgatctgctacccccaccggctgctggacaatgaagatggagagaacccccagaggcagaggatcaagaggatcctgcagaacctggaccagtggaccatgaggcagagcagcctggagctgcagctgatgatcaagcagacccccaacaatgagatgaacagcctgctggagaacatcgccaaggccaccatcgaggtgttccagcagagcgctgagaccggcagcagcagcggcagcacagccagcaacatgcccagcagcagcaagaccaagcctgtgctgagcagcctggagaggtctggagtgtggctggtggcccccctcatcgccaagctgcccacctctgtgcagggccacgtgctgaaggctgctggggaggagctggagaagggccagcacctgggcagcagcagcaggaaggagcgggaccggcagaagcagaagtccatgagcctgctgagccagcagcccttcctgagcctggtgctgacctgcctgaagggccaggatgagcagcgggagggcctgctgaccagcctgtacagccaggtgcaccagatcgtgaacaactggagagatgaccagtacctggatgactgcaagcccaagcagctgatgcatgaggccctgaagctgcggctgaacctggtgggcggcatgtttgacacagtgcagaggagcacccagcagaccacagagtgggccatgctgctgctggagatcatcatctctggaacagtggacatgcagagcaacaatgagctgttcaccaccgtgctggacatgctgtctgtgctgatcaatggcaccctggccgctgacatgagcagcatcagccagggctccatggaggagaacaagagggcctacatgaacctggccaagaagctgcagaaggagctgggggagcggcagagcgacagcctggagaaggtgcggcagctgctgcccctgcccaagcagaccagagatgtgatcacctgtgagccccagggcagcctgattgacaccaagggcaacaagattgctggctttgacagcatcttcaagaaggagggcctgcaggtgtccaccaagcagaagatcagcccctgggacctgtttgagggcctgaagcccagcgcccccctgtcctggggctggtttggaacagtgcgggtggaccggcgggtggcccggggggaggagcagcagaggctgctgctgtaccacacccacctgcggccccggccccgggcctactacctggagcccctgcccctgcccccagaagatgaggagcccccagcccccaccctgctggagcctgagaagaaggcccctgagccccccaagacagacaagccaggggccgccccacccagcacagaggagaggaagaagaagagcaccaagggcaagaagaggagccagcctgccaccaagacagaggactatggcatgggccctggccgcagcggcccctacggcgtgacagtgcccccagacctgctgcaccaccccaaccctggcagcatcacccacctgaactaccggcagggcagcatcggcctgtacacccagaaccagcccctgcctgctgggggcccccgggtggacccctacagacctgtgcggctgcccatgcagaagctgcccacccggcccacctacccaggagtgctgcccaccaccatgactggagtgatgggcctggagcccagcagctacaagacctctgtgtaccggcagcagcagcctgctgtgccccagggccagaggctgcggcagcagctgcagagccagggcatgctgggccagagctctgtgcaccagatgacccccagcagcagctatggcctgcagaccagccagggctacaccccctacgtgagccacgtgggcctgcagcagcacacaggccctgctggcaccatggtgccccccagctacagcagccagccctaccagagcacccaccccagcaccaaccccaccctggtggaccccaccaggcacctgcagcagaggccttctggctacgtgcaccagcaggcccccacctacggccacggcctgaccagcacccagcgcttcagccaccagaccctgcagcagacccccatgatcagcaccatgacccccatgtctgcccagggcgtgcaggccggcgtgcgcagcacagccatcctgcctgagcagcagcagcagcagcagcagcagcagcagcagcagcagcagcagcagcagcagcagcagcagcagcagcagcagcagtaccacatccggcagcagcagcagcagcagatcctgcggcagcagcagcagcagcagcagcagcagcagcagcagcagcagcagcagcagcagcagcagcagcagcagcagcagcagcaccagcagcagcagcagcagcaggccgccccaccccagccccagccccagagccagccccagttccagaggcagggcctgcagcagacccagcagcagcagcagacagctgccctggtgcggcagctgcagcagcagctgagcaacacccagccccagcccagcaccaacatcttcggccgctactag

SEQ ID NO: 152978 - DNA, 6795 bp, Artificial Sequence
  derived and/or modified sequence
gctggtgcctccggcgctacgggctgggcaagatggcggccttcgggatcttgagctacgaacaccggcccctgaagcggccgcggctggggcctcccgatgtttaccctcaggaccccaaacagaaggaggatgaactgacggccttgaatgtaaaacaaggtttcaataaccagcctgctgtctctggggatgagcatggcagtgccaagaacgtcagcttcaatcctgccaagatcagttccaacttcagcagcattattgcagagaaattacgttgtaatacccttcctgacactggtcgcaggaagccccaagtgaaccagaaggataacttctggctggtgactgcacgatcccagagtgccattaacacttggttcactgacttggctggcaccaagccactcacgcaactagccaaaaaggtccccattttcagtaagaaggaagaggtgtttgggtacttagccaaatacacagtgcctgtgatgcgggctgcctggctcattaagatgacctgtgcctactatgcagcaatctctgagaccaaggttaagaagagacatgttgaccctttcatggaatggactcagatcatcaccaagtacttatgggagcagttacagaagatggctgaatactaccggccagggcctgcaggaagtgggggctgtggttccacgatagggcccttgccccatgatgtagaggtggcaatccggcagtgggattacaccgagaagctggccatgttcatgtttcaggatggaatgctggacagacatgagttcctgacctgggtgcttgagtgttttgagaagatccgccctggagaggatgaattgcttaaactgctgctgcctctgcttctccgatactctggggaatttgttcagtctgcatacctgtcccgccggcttgcctacttctgtacacggagactggccctgcagctggatggtgtgagcagtcactcatctcatgttatatctgctcagtcaacaagcacgctacccaccacccctgctcctcagcccccaactagcagcacaccctcgactccctttagtgacctgcttatgtgccctcagcaccggcccctggtttttggcctcagctgtatcctacagaccatcctcctgtgctgtcctagtgccttggtttggcactactcactgactgatagcagaattaagaccggctcaccacttgaccacttgcctattgccccgtccaacctgcccatgccagagggtaacagtgccttcactcagcaggtccgtgcaaagttgcgggagatcgagcagcagatcaaggagcggggacaggcagttgaagttcgctggtctttcgataaatgccaggaagctactgcaggcttcaccattggacgggtacttcatactttggaagtgctggacagccatagttttgaacgctctgacttcagcaactctcttgactccctttgtaaccgaatctttggattgggacctagcaaggatgggcatgagatctcctcagatgatgatgctgtggtgtcattgctatgtgaatgggctgtcagctgcaagcgttctggtcggcatcgtgctatggtggtagccaagctcctggagaagagacaggcggagattgaggctgagcgttgtggagaatcagaagccgcagatgagaagggttccatcgcctctggctccctttctgctcccagtgctcccattttccaggatgtcctcctgcagtttctggatacacaggctcccatgctgacggaccctcgaagtgagagtgagcgggtggaattctttaacttagtactgctgttctgtgaactgattcgacatgatgttttctcccacaacatgtatacttgcactctcatctcccgaggggaccttgcctttggagcccctggtccccggcctccctctccctttgatgatcctgccgatgacccagagcacaaggaggctgaaggcagcagcagcagcaagctggaagatccagggctctcagaatctatggacattgaccctagttccagtgttctctttgaggacatggagaagcctgatttctcattgttctcccctactatgccctgtgaggggaagggcagtccatcccctgagaagccagatgtcgagaaggaggtgaagcccccacccaaggagaagattgaagggacccttggggttctttacgaccagccacgacacgtgcagtacgccacccattttcccatcccccaggaggagtcatgcagccatgagtgcaaccagcggttggtcgtactgtttggggtgggaaagcagcgagatgatgcccgccatgccatcaagaaaatcaccaaggatatcttgaaggttctgaaccgcaaagggacagcagaaactgaccagcttgctcctattgtgcctctgaatcctggagacctgacattcttaggtggggaggatgggcagaagcggcgacgcaaccggcctgaagccttccccactgctgaagatatctttgctaagttccagcacctttcacattatgaccaacaccaggtcacggctcaggtctcccggaatgttctggagcagatcacgagctttgcccttggcatgtcataccacttgcctctggtgcagcatgtgcagttcatcttcgacctcatggaatattcactcagcatcagtggcctcatcgactttgccattcagctgctgaatgaactgagtgtagttgaggctgagctgcttctcaaatcctcggatctggtgggcagctacactactagcctgtgcctgtgcatcgtggctgtcctgcggcactatcatgcctgcctcatcctcaaccaggaccagatggcacaggtctttgaggggctgtgtggcgtcgtgaagcatgggatgaaccggtccgatggctcctctgcagagcgctgtatccttgcttatctctatgatctgtacacctcctgtagccatttaaagaacaaatttggggagctcttcagcgacttttgctcaaaggtgaagaacaccatctactgcaacgtggagccatcggaatcaaatatgcgctgggcacctgagttcatgatcgacactctagagaaccctgcagctcacaccttcacctacacggggctaggcaagagtcttagtgagaaccctgctaaccgctacagctttgtctgcaatgcccttatgcacgtctgtgtggggcaccatgatcccgatagggtgaatgacatcgcaatcctgtgtgcagagctgaccggctattgcaagtcactgagtgcagaatggctaggagtgcttaaggccttgtgctgctcctctaacaatggcacttgtggtttcaacgatctcctctgcaatgttgatgtcagtgacctatcttttcatgactcgctggctacttttgttgccatcctcatcgctcggcagtgtttgctcctggaagatctgattcgctgtgctgccatcccttcactccttaatgctgcttgtagtgaacaggactctgagccaggggcccggcttacctgccgcatcctccttcaccttttcaagacaccgcagctcaatccttgccagtctgatggaaacaagcctacagtaggaatccgctcctcctgcgaccgccacctgctggctgcctcccagaaccgcatcgtggatggagccgtgtttgctgttctcaaggctgtgtttgtacttggggatgcggaactgaaaggttcaggcttcactgtgacaggaggaacagaagaacttccagaggaggagggaggaggtggcagtggtggtcggaggcagggtggccgcaacatctctgtggagacagccagtctggatgtctatgccaagtacgtgctgcgcagcatctgccaacaggaatgggtaggagaacgttgccttaagtctctgtgtgaggacagcaatgacctgcaagacccagtgttgagtagtgcccaggcgcagcgcctcatgcagctcatttgctatccacatcgactgctggacaatgaggatggggaaaacccccagcggcagcgcataaagcgcattctccagaacttggaccagtggaccatgcgccagtcttccttggagctgcagctcatgatcaagcagacccctaacaatgagatgaactccctcttggagaacatcgccaaggccacaatcgaggttttccaacagtcagcagagacagggtcatcttctggaagtactgcaagcaacatgcccagcagcagcaagaccaagcctgtgctcagctctctagagcgctctggtgtatggctggtggcccccctcattgctaaactgcccacctcagtccagggacatgtgttaaaggctgctggggaagaattggagaagggtcagcacctgggttcctcttcacgcaaagaacgtgatcgacaaaagcagaagagcatgtccctattgagccagcagcccttcttatcgctggtgctaacatgtctgaaagggcaggatgaacaacgcgagggactccttacctccctctacagccaggtgcaccagattgtgaataattggcgagatgaccagtacttagatgattgcaaaccaaagcagcttatgcatgaggcactcaaactgcggctcaacctggtggggggcatgtttgacacggtgcagcgcagcacccagcagaccacggagtgggccatgctcctcctggagatcatcatcagcggcactgtcgacatgcagtccaacaatgagctcttcactactgtgttggacatgctgagcgtgctcatcaatgggacattggctgcagacatgtctagcatctcgcaaggtagcatggaggaaaacaagcgtgcatacatgaacctggcgaagaagttgcagaaggagttgggggagcgccagtcagacagtctggaaaaggttcgccagctgctgccactgcccaagcagacccgagatgtcatcacgtgtgagccacagggctcccttatcgataccaagggcaacaagattgctggcttcgattccatcttcaagaaggagggtctacaggtttccaccaaacagaagatctcgccctgggatctttttgaggggttgaagccgtcagcaccactctcttggggctggtttggaacagtccgagtggaccggcgagtggctcgaggagaggagcagcagcggttgctgctctaccacacacacctgaggccccggccccgcgcctattacctggagccactgccactgcccccagaagatgaggagccgcctgctcctaccctgctagagcctgagaaaaaggctccagagccccccaaaactgacaaaccgggggctgctccacccagtactgaggaacgcaagaagaagtccaccaagggcaagaaacgcagccagccagctaccaagacagaggactatggaatgggcccgggtcggagcggcccttatggtgtgacagtgcctccggacctcctgcaccacccaaaccctggttctataacacaccttaactacaggcaaggctccataggcctgtacacccagaaccagccactacctgcaggtggccctcgtgtggacccataccgtcctgtgcgcttaccaatgcagaagctgcccacccgaccaacttaccctggagtgctgcccacaaccatgactggcgtcatgggtttagaaccctcctcttataagacctctgtgtaccggcagcagcaacctgcggtgccccaaggacagcgccttcgccaacagctccagcagagtcagggcatgttgggacagtcatctgtccatcagatgactcccagctcttcctacggtttgcagacttcccagggctatactccttatgtttctcatgtgggattgcagcaacacacaggccctgcaggtaccatggtgccccccagctactccagccagccttaccagagcacccacccttctaccaatcctactcttgtagatcctacccgccacctgcaacagcggcccagtggctatgtgcaccagcaggcccccacctatggacatggactgacctccactcaaaggttttcacaccagacactgcagcagacacccatgataagtaccatgactccaatgagtgcccagggcgtccaggcaggcgtccgttcaacagccatcctacctgagcagcagcagcagcagcaacagcagcaacagcaacagcagcagcagcagcaacagcaacagcagcagcagcagcagcagtaccacatccggcagcagcagcagcagcagatcctgcggcagcagcagcaacagcaacagcagcagcagcagcagcagcaacagcaacagcagcagcagcaacagcaacaacagcaacaccagcagcaacagcagcaacaggcggctcctccccaaccccagccccagtcccagccccagttccagcgccaggggcttcagcagacccagcagcagcaacagacagcagctttggtccggcaacttcaacaacagctctctaatacccagccacagcccagtaccaacatatttggacgctactgagccacctggaggaactgcttgtgcactggatgtggccccaccctttcctcttaattcccaatcccattcctgggctagcaccagtagtggttggggccctcccctcaggctccatttttaataagtttttagtatttttgttaatgtgaggcattgagctgttgggttttgtatattatttatatagagaccccagagctgttgcacccaatacacagagcttctttgc

SEQ ID NO: 152979 - DNA, 6823 bp, Artificial Sequence
  derived and/or modified sequence
ttcccgttcccccagtcagcctggccctgctggtgcctccggcgctacgggctgggcaagatggcggccttcgggatcttgagctacgaacaccggcccctgaagcggccgcggctggggcctcccgatgtttaccctcaggaccccaaacagaaggaggatgaactgacggccttgaatgtaaaacaaggtttcaataaccagcctgctgtctctggggatgagcatggcagtgccaagaacgtcagcttcaatcctgccaagatcagttccaacttcagcagcattattgcagagaaattacgttgtaatacccttcctgacactggtcgcaggaagccccaagtgaaccagaaggataacttctggctggtgactgcacgatcccagagtgccattaacacttggttcactgacttggctggcaccaagccactcacgcaactagccaaaaaggtccccattttcagtaagaaggaagaggtgtttgggtacttagccaaatacacagtgcctgtgatgcgggctgcctggctcattaagatgacctgtgcctactatgcagcaatctctgagaccaaggttaagaagagacatgttgaccctttcatggaatggactcagatcatcaccaagtacttatgggagcagttacagaagatggctgaatactaccggccagggcctgcaggaagtgggggctgtggttccacgatagggcccttgccccatgatgtagaggtggcaatccggcagtgggattacaccgagaagctggccatgttcatgtttcaggatggaatgctggacagacatgagttcctgacctgggtgcttgagtgttttgagaagatccgccctggagaggatgaattgcttaaactgctgctgcctctgcttctccgatactctggggaatttgttcagtctgcatacctgtcccgccggcttgcctacttctgtacacggagactggccctgcagctggatggtgtgagcagtcactcatctcatgttatatctgctcagtcaacaagcacgctacccaccacccctgctcctcagcccccaactagcagcacaccctcgactccctttagtgacctgcttatgtgccctcagcaccggcccctggtttttggcctcagctgtatcctacagaccatcctcctgtgctgtcctagtgccttggtttggcactactcactgactgatagcagaattaagaccggctcaccacttgaccacttgcctattgccccgtccaacctgcccatgccagagggtaacagtgccttcactcagcaggtccgtgcaaagttgcgggagatcgagcagcagatcaaggagcggggacaggcagttgaagttcgctggtctttcgataaatgccaggaagctactgcaggcttcaccattggacgggtacttcatactttggaagtgctggacagccatagttttgaacgctctgacttcagcaactctcttgactccctttgtaaccgaatctttggattgggacctagcaaggatgggcatgagatctcctcagatgatgatgctgtggtgtcattgctatgtgaatgggctgtcagctgcaagcgttctggtcggcatcgtgctatggtggtagccaagctcctggagaagagacaggcggagattgaggctgagcgttgtggagaatcagaagccgcagatgagaagggttccatcgcctctggctccctttctgctcccagtgctcccattttccaggatgtcctcctgcagtttctggatacacaggctcccatgctgacggaccctcgaagtgagagtgagcgggtggaattctttaacttagtactgctgttctgtgaactgattcgacatgatgttttctcccacaacatgtatacttgcactctcatctcccgaggggaccttgcctttggagcccctggtccccggcctccctctccctttgatgatcctgccgatgacccagagcacaaggaggctgaaggcagcagcagcagcaagctggaagatccagggctctcagaatctatggacattgaccctagttccagtgttctctttgaggacatggagaagcctgatttctcattgttctcccctactatgccctgtgaggggaagggcagtccatcccctgagaagccagatgtcgagaaggaggtgaagcccccacccaaggagaagattgaagggacccttggggttctttacgaccagccacgacacgtgcagtacgccacccattttcccatcccccaggaggagtcatgcagccatgagtgcaaccagcggttggtcgtactgtttggggtgggaaagcagcgagatgatgcccgccatgccatcaagaaaatcaccaaggatatcttgaaggttctgaaccgcaaagggacagcagaaactgaccagcttgctcctattgtgcctctgaatcctggagacctgacattcttaggtggggaggatgggcagaagcggcgacgcaaccggcctgaagccttccccactgctgaagatatctttgctaagttccagcacctttcacattatgaccaacaccaggtcacggctcaggtctcccggaatgttctggagcagatcacgagctttgcccttggcatgtcataccacttgcctctggtgcagcatgtgcagttcatcttcgacctcatggaatattcactcagcatcagtggcctcatcgactttgccattcagctgctgaatgaactgagtgtagttgaggctgagctgcttctcaaatcctcggatctggtgggcagctacactactagcctgtgcctgtgcatcgtggctgtcctgcggcactatcatgcctgcctcatcctcaaccaggaccagatggcacaggtctttgaggggctgtgtggcgtcgtgaagcatgggatgaaccggtccgatggctcctctgcagagcgctgtatccttgcttatctctatgatctgtacacctcctgtagccatttaaagaacaaatttggggagctcttcagcgacttttgctcaaaggtgaagaacaccatctactgcaacgtggagccatcggaatcaaatatgcgctgggcacctgagttcatgatcgacactctagagaaccctgcagctcacaccttcacctacacggggctaggcaagagtcttagtgagaaccctgctaaccgctacagctttgtctgcaatgcccttatgcacgtctgtgtggggcaccatgatcccgatagggtgaatgacatcgcaatcctgtgtgcagagctgaccggctattgcaagtcactgagtgcagaatggctaggagtgcttaaggccttgtgctgctcctctaacaatggcacttgtggtttcaacgatctcctctgcaatgttgatgtcagtgacctatcttttcatgactcgctggctacttttgttgccatcctcatcgctcggcagtgtttgctcctggaagatctgattcgctgtgctgccatcccttcactccttaatgctgcttgtagtgaacaggactctgagccaggggcccggcttacctgccgcatcctccttcaccttttcaagacaccgcagctcaatccttgccagtctgatggaaacaagcctacagtaggaatccgctcctcctgcgaccgccacctgctggctgcctcccagaaccgcatcgtggatggagccgtgtttgctgttctcaaggctgtgtttgtacttggggatgcggaactgaaaggttcaggcttcactgtgacaggaggaacagaagaacttccagaggaggagggaggaggtggcagtggtggtcggaggcagggtggccgcaacatctctgtggagacagccagtctggatgtctatgccaagtacgtgctgcgcagcatctgccaacaggaatgggtaggagaacgttgccttaagtctctgtgtgaggacagcaatgacctgcaagacccagtgttgagtagtgcccaggcgcagcgcctcatgcagctcatttgctatccacatcgactgctggacaatgaggatggggaaaacccccagcggcagcgcataaagcgcattctccagaacttggaccagtggaccatgcgccagtcttccttggagctgcagctcatgatcaagcagacccctaacaatgagatgaactccctcttggagaacatcgccaaggccacaatcgaggttttccaacagtcagcagagacagggtcatcttctggaagtactgcaagcaacatgcccagcagcagcaagaccaagcctgtgctcagctctctagagcgctctggtgtatggctggtggcccccctcattgctaaactgcccacctcagtccagggacatgtgttaaaggctgctggggaagaattggagaagggtcagcacctgggttcctcttcacgcaaagaacgtgatcgacaaaagcagaagagcatgtccctattgagccagcagcccttcttatcgctggtgctaacatgtctgaaagggcaggatgaacaacgcgagggactccttacctccctctacagccaggtgcaccagattgtgaataattggcgagatgaccagtacttagatgattgcaaaccaaagcagcttatgcatgaggcactcaaactgcggctcaacctggtggggggcatgtttgacacggtgcagcgcagcacccagcagaccacggagtgggccatgctcctcctggagatcatcatcagcggcactgtcgacatgcagtccaacaatgagctcttcactactgtgttggacatgctgagcgtgctcatcaatgggacattggctgcagacatgtctagcatctcgcaaggtagcatggaggaaaacaagcgtgcatacatgaacctggcgaagaagttgcagaaggagttgggggagcgccagtcagacagtctggaaaaggttcgccagctgctgccactgcccaagcagacccgagatgtcatcacgtgtgagccacagggctcccttatcgataccaagggcaacaagattgctggcttcgattccatcttcaagaaggagggtctacaggtttccaccaaacagaagatctcgccctgggatctttttgaggggttgaagccgtcagcaccactctcttggggctggtttggaacagtccgagtggaccggcgagtggctcgaggagaggagcagcagcggttgctgctctaccacacacacctgaggccccggccccgcgcctattacctggagccactgccactgcccccagaagatgaggagccgcctgctcctaccctgctagagcctgagaaaaaggctccagagccccccaaaactgacaaaccgggggctgctccacccagtactgaggaacgcaagaagaagtccaccaagggcaagaaacgcagccagccagctaccaagacagaggactatggaatgggcccgggtcggagcggcccttatggtgtgacagtgcctccggacctcctgcaccacccaaaccctggttctataacacaccttaactacaggcaaggctccataggcctgtacacccagaaccagccactacctgcaggtggccctcgtgtggacccataccgtcctgtgcgcttaccaatgcagaagctgcccacccgaccaacttaccctggagtgctgcccacaaccatgactggcgtcatgggtttagaaccctcctcttataagacctctgtgtaccggcagcagcaacctgcggtgccccaaggacagcgccttcgccaacagctccagagtcagggcatgttgggacagtcatctgtccatcagatgactcccagctcttcctacggtttgcagacttcccagggctatactccttatgtttctcatgtgggattgcagcaacacacaggccctgcaggtaccatggtgccccccagctactccagccagccttaccagagcacccacccttctaccaatcctactcttgtagatcctacccgccacctgcaacagcggcccagtggctatgtgcaccagcaggcccccacctatggacatggactgacctccactcaaaggttttcacaccagacactgcagcagacacccatgataagtaccatgactccaatgagtgcccagggcgtccaggcaggcgtccgttcaacagccatcctacctgagcagcagcagcagcagcaacagcagcaacagcaacagcagcagcagcagcaacagcaacagcagcagcagcagcagcagtaccacatccggcagcagcagcagcagcagatcctgcggcagcagcagcaacagcaacagcagcagcagcagcagcagcaacagcaacagcagcagcagcaacagcaacaacagcaacaccagcagcaacagcagcaacaggcggctcctccccaaccccagccccagtcccagccccagttccagcgccaggggcttcagcagacccagcagcagcaacagacagcagctttggtccggcaacttcaacaacagctctctaatacccagccacagcccagtaccaacatatttggacgctactgagccacctggaggaactgcttgtgcactggatgtggccccaccctttcctcttaattcccaatcccattcctgggctagcaccagtagtggttggggccctcccctcaggctccatttttaataagtttttagtatttttgttaatgtgaggcattgagctgttgggttttgtatattatttatatagagaccccagagctgttgcacccaatacacagagcttctttgcaaa

SEQ ID NO: 152980 - DNA, 6534 bp, Artificial Sequence
  derived and/or modified sequence
atggccgccttcggcatcctgagctacgagcaccggcccctgaagagaccacgtctggggcctccagacgtctatcctcaagaccccaaacagaaggaggatgagctgaccgcactgaacgtcaaacagggattcaataatcagcccgctgtctcgggcgacgagcacggaagcgcaaagaatgtgagctttaatccggccaaaatatcctctaatttctcctctattatcgcagagaagctccggtgtaacacgctacctgatacaggtagaagaaaacctcaggtgaatcagaaagataatttctggctggtgaccgcccggagtcagagcgccattaacacttggtttactgatctggcaggcacaaagccactaactcagctcgctaaaaaagttcctatattttctaagaaggaagaggtgtttgggtatcttgccaagtacactgtcccggtgatgcgcgcagcatggctcataaagatgacgtgcgcctactatgccgccatctcggaaacaaaagtgaagaagaggcacgtcgatcccttcatggaatggactcagataatcactaaatatttgtgggaacagctgcagaaaatggctgagtactataggcctggccctgctgggtctggggggtgtggctccacaattgggcctctgcctcacgatgtcgaagtcgctatacgccaatgggattacactgaaaagctcgccatgtttatgtttcaggatggtatgctggaccgacacgaattcctgacctgggtccttgaatgtttcgaaaaaataagacctggcgaggacgagctgcttaagttgcttctccctctcctcctccgctattccggcgagtttgtgcagagcgcctacctgtcacggcggttagcatatttctgcacgcgccggctggccctccagctcgacggcgtatcgagccatagctctcatgtgatctcagctcagagcacctctacactgccaaccacccctgcaccccagcctcctacctctagtactccgtccacaccattctcagatctactgatgtgccctcagcaccggccacttgtgttcggactgtcttgcatcttgcagactatattactctgttgtcctagcgcgttggtctggcattactccctaacagactctaggataaagaccggctctcctctggatcacctgcctatcgcgccatcaaatctgcccatgcctgaaggtaactcagctttcacacaacaggtacgagccaaactaagagaaatcgagcagcaaatcaaggaacgggggcaggctgttgaggttcgatggagctttgataagtgccaggaggccaccgctgggttcacgattggtcgagttttacacacactggaggtgctagatagccactcatttgagaggtcagacttctccaactccctggacagtctctgtaaccgaattttcggcttaggaccgagtaaagacgggcatgagatctcctctgatgatgatgccgttgttagcttgctgtgtgagtgggccgtttcgtgcaagaggagcgggcggcacagggctatggtggtcgccaagttacttgagaaacggcaagctgaaatagaggccgaaagatgcggcgaatccgaggccgccgacgagaaaggctcaattgcaagcggaagcttgtccgctccttccgctccaatctttcaagatgtgctgctgcagtttctggatacacaggcaccaatgctgactgatccaaggtccgagtcagagagagtcgaattttttaacctcgtcctgttattctgcgagttgatacgccatgacgtgttctctcacaatatgtacacgtgtacactcattagcaggggtgatctggcatttggcgcccctggacctaggcccccatccccattcgacgatcccgcagacgatcctgagcacaaggaagctgaggggtctagctccagtaagctggaggacccaggtttatcagaaagcatggacatcgatccaagttcctccgtcttgtttgaagacatggaaaagccggacttctccctcttctcccctaccatgccctgtgagggtaaggggtctccttcacctgaaaagccggatgtggaaaaggaagtcaagccacccccaaaagagaagatagaaggaacactgggagtcctgtatgatcagcccaggcacgttcagtacgcaactcattttcctatcccccaagaagagagctgctcacatgagtgtaatcagcgcctggtggtcctcttcggggtaggcaaacagcgggacgatgctaggcacgctatcaaaaagataactaaggacatattgaaagtgctgaacagaaagggaaccgctgagactgatcagcttgcaccgattgttcccctcaacccgggtgacttgacctttctcggaggcgaggatggtcagaaaaggcggaggaatcggcctgaagccttcccaactgccgaggacattttcgccaagtttcaacacctttcccattacgatcagcatcaggtaacagcccaagtgtccagaaatgttctggagcaaattacaagttttgctttgggtatgagctatcatctgccattagttcagcatgtgcaatttatttttgatttgatggaatatagcctgtctatttctggactgatcgacttcgccattcagctccttaatgagctttcagtggtggaggctgagctactgctgaagtcatccgacctggtgggcagctacacgactagtctgtgcttgtgcatcgttgccgttttgcggcattaccatgcttgcttgatcctgaatcaggatcaaatggcgcaggtattcgagggattgtgcggcgtcgtgaagcatgggatgaaccggtcagatgggtccagtgccgagaggtgtattctggcctacctgtacgacctatacacaagttgttctcacctcaaaaataagtttggagaattattttccgacttctgcagtaaggtaaagaacaccatctactgtaatgtcgaaccatcagagtctaatatgagatgggcgcccgagtttatgattgacactctggagaacccagcagcacatacattcacatacacggggctggggaaatcactctcagagaaccccgccaatcgctactcattcgtgtgcaacgcactgatgcacgtttgcgtggggcatcacgatcctgatagagtcaacgacatagctatactttgtgcagagttaacaggatattgcaaatctttgtcagccgagtggttgggcgtgctcaaagccttgtgctgcagctccaacaacgggacctgtgggttcaacgacctcctgtgcaatgtggacgtttcagacctgtcttttcacgactccctggccacttttgtggccattcttattgccagacaatgcctgctgctcgaggatttgattcgctgcgccgctatcccctccctcctcaatgcagcttgttctgagcaagactccgaacccggggctcgccttacatgcaggatcctgttacatctgttcaagaccccacagcttaatccgtgccaaagtgatggcaataaacctaccgttggcatccggtcttcctgtgaccggcaccttctggccgcgagccagaataggatcgtggacggcgcagtgtttgcagtgttgaaggcggtgtttgtgctaggcgacgctgaactgaagggctctggtttcactgtaacgggtggaacagaagagttgcctgaagaggagggagggggaggcagtgggggccgtagacagggaggcagaaatatatccgtcgagacggcctctcttgatgtgtatgccaaatacgtgctcaggtcaatttgtcagcaagagtgggtgggcgagaggtgtctgaaatcactctgtgaagactccaatgatctccaggacccggttctcagctcggcgcaggctcagaggttaatgcaactgatctgttatccccacagactacttgataacgaagatggcgaaaaccctcaacggcagcggatcaaacgcatactgcagaacttagatcagtggaccatgcgacaaagttcactggaactgcagctcatgattaaacagacccccaacaacgagatgaattcacttctcgagaatatagccaaggccaccatcgaggtcttccagcaaagtgccgagacaggctctagtagcggctcgactgcttccaacatgcctagtagttcaaagactaaaccggtcttgtcctccctggaacgctccggagtgtggctcgttgctccccttatcgccaagcttccaacgtccgtgcaggggcacgtacttaaagccgctggggaggaactcgagaaaggccagcatttgggttcatcctctcgtaaagaaagagaccgtcagaagcagaaatcgatgtctttgcttagccagcaaccgtttttatctttggtactgacttgtctgaaagggcaagacgaacagagagaagggctgctcacgagcctttattcacaggtgcaccaaatcgtgaataattggcgagatgatcagtacctggacgactgtaagccaaagcagctgatgcacgaagcactcaaattaagactgaacctggtgggcggcatgttcgacactgtccagagaagcacccagcagacgacggagtgggccatgctgttgcttgaaatcattattagcggcaccgtggacatgcagagcaacaacgagctgttcactactgtgctcgatatgctgtctgtgctcattaatggcacccttgccgccgacatgtcatcaatttcacagggttcaatggaagaaaacaaaagggcatacatgaatttggcaaaaaagcttcaaaaggagctgggtgaaaggcaatcggattcactggagaaggtgcggcagctgcttccactgcccaaacaaactagggatgtcattacttgtgaaccccagggaagtttaatcgacacgaagggcaataagatcgctggcttcgacagcatttttaaaaaggaaggccttcaagtttctaccaagcagaagatctctccatgggatctgttcgaagggctgaagccctctgcccccctgtcatggggatggttcggcactgtcagggtggaccgacgagttgccagaggtgaagagcagcaacgcctgctgttgtatcacacacaccttaggcctcgccccagagcatactacctagaacctctgccactcccccctgaagacgaggagccgccagctcctacattactggaaccagaaaaaaaagcaccggaaccacccaagacagataagccgggagccgctcccccctcaaccgaagaaagaaaaaaaaagagcacaaagggtaaaaagaggagtcaaccagcgaccaagacagaagactatgggatgggccctggtcggtccggaccctacggggtcactgtgccacctgatttgctgcaccaccccaatccaggatcgatcacgcacctgaactaccggcaaggcagcataggactatacacccagaaccagcccctgcccgccggaggacccagggtggacccataccgcccagtacggcttcctatgcagaaattgccaacccgtcctacctaccctggggtccttccgaccactatgaccggtgtgatgggactggagcccagtagctacaagacctctgtatacaggcaacaacagcctgctgtgccccaggggcagaggctgcgacagcagttgcagcaatcccagggcatgctgggacagtcttccgtacatcagatgacacccagctcctcgtatggactacagactagccagggctacacaccatatgtatcccacgttggactccagcagcacacgggcccagccgggaccatggtcccgccatcttattcctctcagccctatcaatccacacatccaagtaccaatccgaccctggtcgaccctacacgacaccttcagcagcggccatccgggtatgttcaccagcaagcccccacgtacggacacggactcactagcacacagagattttctcaccagaccctgcagcagacccctatgatctcaacaatgacaccaatgtctgcacagggcgtgcaggcaggggtacgttccactgccatcctgccggagcaacagcagcaacaacagcagcagcagcaacagcagcagcaacagcagcagcagcaacagcaacaacagcaacagcagtatcacattcgacaacagcagcagcagcaaatactacgccaacaacaacaacaacagcagcagcagcagcagcagcaacagcagcagcagcagcaacagcaacaacagcagcagcagcatcagcagcagcagcagcagcaggctgccccaccccagccccagccccagtctcaaccccaattccagaggcaaggtctgcaacagactcaacagcaacagcagaccgctgctctggttagacagctgcagcaacagttgagcaatacgcagccacagccctctaccaacattttcgggcgctattag

SEQ ID NO: 152981 - DNA, 6531 bp, Artificial Sequence
  derived and/or modified sequence
atggccgccttcggcatcctgagctacgagcaccggcccctgaagaggcccaggctgggtcctcccgacgtctatccccaggaccctaagcaaaaggaagacgagctgactgcactgaacgttaagcagggcttcaataatcagcccgctgtgtccggggacgagcatggctccgccaagaacgtgtcattcaaccccgcaaagattagcagcaacttcagtagcatcatagcagagaagctgcggtgcaacacattgccggacacaggtcgccggaagccccaggtaaaccagaaggataacttctggcttgtcacagcccgcagtcagtcggcgattaatacgtggttcactgacctcgcaggcacgaagccgctgacccagttagccaagaaggtgccaattttttccaaaaaggaggaggtgtttggttatcttgcgaagtacacagtaccagtgatgcgcgctgcttggctgatcaaaatgacttgtgcctattatgccgccatcagtgaaacaaaagtcaagaagaggcatgttgacccgtttatggaatggactcagatcatcactaaatatctctgggagcagctacagaaaatggcagagtattaccgcccgggaccagcaggctccgggggctgtggatcgaccatcggcccacttccacatgacgtagaggtcgctataagacagtgggactacacagagaaactcgcgatgttcatgttccaggatggaatgttggaccgccacgagtttctgacctgggtcctcgaatgttttgagaagatcagacccggagaggacgaactactgaagctcttattaccactcctcctccgctatagcggagagttcgtgcagagtgcctatcttagccggagactcgcgtatttttgtacccgtaggctcgccctacagcttgacggcgtctcatcccacagttcacacgttatcagtgcgcagtccacgtctaccctgccaaccactccggccccacaaccccccaccagtagcacacccagcactccgttctctgatttactgatgtgcccacagcatcggcccctggtgttcgggttgtcctgtattttgcaaacaatcctgctgtgctgtccttccgcactggtgtggcattatagccttacagacagtcggattaagacaggtagccctctagatcacctccctattgcaccttctaacttgcctatgcctgaagggaactccgctttcacccagcaggtcagggcaaagctgcgcgaaatcgaacagcagattaaggaaagagggcaggcagtcgaagtacgctggtcatttgataaatgccaggaagctaccgctgggtttacgatcggcagagttctgcacacgctggaagtgctggactcccacagctttgagagaagcgatttctcgaatagcttggattccctctgtaaccgtattttcggactgggcccatcaaaagacggacacgagatcagtagtgatgatgatgctgtcgtgtcgttgctttgtgagtgggctgtgtcctgcaaaagatctggaagacaccgtgccatggttgttgcaaaactgttagaaaagaggcaggcagagatcgaggctgagaggtgcggggaaagcgaggcagccgacgaaaagggtagcattgcttctgggagcctgagcgccccatcggcccccatctttcaggacgttctcctccaattcctggacacccaggcccctatgctcaccgatcccaggtctgagagtgaacgggtcgagttctttaacctcgtcttgctgttctgcgagctgatcaggcacgacgtcttcagtcacaacatgtacacatgtacacttattagtcgcggtgacctagccttcggagcgccaggcccccgaccaccgagtccctttgacgaccctgctgacgatccagagcataaggaagcagaaggcagctcctcttcgaaacttgaagacccaggacttagtgagtcaatggatattgatccctcgtccagcgttctgttcgaagatatggagaaacctgatttctccctgttttccccaaccatgccatgtgaggggaaaggtagtccatcgcctgagaaacccgatgttgaaaaagaagtcaagcctccccccaaggagaagattgaaggaactctaggcgtgttgtacgatcagcctagacatgtccagtatgctacccattttcccataccgcaggaagaatcctgctcccacgagtgcaaccaaaggctggtggtgctcttcggagtcgggaagcagagggacgacgctcggcacgctattaaaaagatcaccaaagatattctcaaagtcttaaacagaaagggcacggccgagacagatcagttagcaccaatcgtgccccttaatcctggtgatctgacttttttgggcggcgaggatggccaaaaacgccgccgtaaccggcctgaggcattccctactgcggaggatatcttcgccaaattccagcatctgagtcactacgatcagcaccaagtgactgcccaggtatcccgcaacgtgctggagcagataaccagcttcgctcttggaatgtcctatcacctccctctggtgcaacacgtgcaatttattttcgatttaatggagtacagcctgtctatcagcggactgattgacttcgccatccagttgttaaacgaattgtctgtcgtggaagccgagctgctactgaaaagctctgatctcgtggggagctacaccacctctctgtgtctgtgtatagtggccgtccttagacactatcatgcttgcctcatcctgaatcaggaccaaatggcgcaggtgtttgagggtctatgcggggtggtgaagcacgggatgaatcgatccgacggctcctcggcagagcgatgcattctggcatacctatatgacttgtatacctcctgctcccatcttaagaacaaattcggggagcttttctccgatttttgctccaaggtcaagaatacaatctactgtaatgtagagccttctgaatccaacatgcgatgggctccagagttcatgattgatacactggagaatccagcagcccataccttcacctataccgggttagggaaaagcctgtctgagaaccccgctaatcggtacagctttgtgtgtaatgccctcatgcatgtctgcgtgggacatcacgaccctgatagggtcaatgacattgccatcctgtgcgctgagctgactggctattgtaagagtctgagtgcggagtggctgggagtcctgaaagctctctgctgcagtagcaataacggtacatgtggatttaacgacctgctgtgtaatgtggacgtgtccgacctcagtttccacgattcactcgccaccttcgttgcaatcttaatagcccgacagtgtcttctgctggaagacctgatcaggtgcgccgccatcccgtctctgttgaatgctgcttgcagcgagcaggactcagaaccgggcgctcgccttacttgcagaatcctgctgcacctgtttaagacccctcagctgaacccttgtcagagcgatggcaacaagcctacggttggcattaggtccagctgcgaccgtcatctgctggctgcaagtcagaacaggattgtggacggggcagtgttcgccgtgcttaaggcagtgtttgtgttaggagacgccgagcttaaagggtctggttttacagttactggcgggaccgaagagctacccgaagaggaaggcgggggcggttcgggagggcgtaggcaaggcggaaggaacatcagcgtcgagactgcttccctggatgtatacgccaagtacgtgctgagaagcatctgccagcaggagtgggtcggcgagaggtgcctgaagagtttgtgcgaggattccaacgaccttcaggatcctgtgctgtcctctgcacaagcccagcgattaatgcagctcatctgctacccccatagactcttggataacgaggatggggagaaccctcagcgtcaacgcattaaacgcattcttcagaatctggaccaatggacgatgcgtcaaagctctctagagttgcaactgatgattaaacagaccccaaataacgaaatgaactccctcctggaaaacattgccaaagcaacaattgaagtttttcagcagtcagccgaaacagggtccagtagcgggtcgactgccagcaatatgccgtcatcttcgaagactaagccggtgctctcatcccttgaaaggtcaggcgtatggttggtcgctcctttgattgctaaattgcctacctccgtgcagggccacgtgcttaaagcagcaggagaggaactcgaaaagggtcagcacctggggtctagcagtcgaaaggaaagagatcgtcagaagcagaaatctatgagcctgctgagccagcagcccttcctgagccttgtcttgacgtgcctgaaaggccaggacgagcagagagaaggactgctgacaagcttatacagtcaggtccaccagattgtgaacaactggagagacgaccagtatctcgacgactgcaaacccaaacagctgatgcatgaggcgcttaaacttcggttaaacctggtggggggcatgttcgacacagtgcagcgctccacccaacaaaccactgaatgggcaatgttgctgttggaaattataatctcaggaactgtggatatgcagagcaataacgaactctttacaacagtcctagacatgttatctgtgcttatcaacggaactctggctgccgacatgagctctatcagccaggggtccatggaggaaaataagagagcctatatgaatctggccaaaaagctgcaaaaagaactcggcgaaaggcaatctgacagccttgagaaagtcagacagctactccccctgcctaaacaaactcgggatgtgatcacctgcgaacctcagggcagcctcattgacactaaaggtaacaagatcgccgggtttgactcaatcttcaaaaaagaggggctgcaggtaagtaccaaacagaagatctctccctgggaccttttcgagggcctgaagccatcggcccctctctcctggggctggttcgggacggtccgcgtagacagaagagttgcgaggggtgaggagcagcaacggctgttgttataccatacccacctccggccacgtccacgtgcttactatttggaacccctgcctctgcctcccgaagacgaggagcccccagccccaactctgctcgaaccagagaagaaggcccccgaaccacccaagaccgataagcctggagccgctccaccctctaccgaagaacgaaagaagaaatccacaaaggggaagaaaagatcacagcccgcaaccaagacggaggactatggtatgggccccggaagaagcggcccttatggagtcacggttccccctgatttgttgcaccacccaaatcccggatctatcacgcacctaaactaccgccagggttccatcggactttatactcagaatcagcctctcccagctggaggaccgagagtcgacccatatcgccctgtccgcctgcctatgcagaaactacctactcgtccaacttacccaggagtcttgcctaccaccatgaccggtgtcatgggccttgagccctcttcgtataaaacgtcagtttatcggcagcagcagccagctgtgccacagggtcagagactgcgtcagcagctgcagagccagggcatgctcggccaaagcagtgtgcatcagatgactccctcatcttcctacggcctccagacctcccaggggtacaccccctacgtgagtcacgttgggctacagcagcatacagggcccgccggcacaatggttccaccatcctattcatcgcagccttaccagtctacacatccctccaccaaccccacactggtagatcccacaagacacctgcaacaacgccccagcggttacgtacaccagcaggcccctacctacggccacggcctgacctctacgcaaaggtttagtcatcagaccctgcagcagaccccgatgatatcaacaatgacaccaatgtccgcacaaggtgtgcaggcaggtgtccgcagcaccgccattctccccgaacagcagcagcagcagcaacagcagcagcagcagcagcaacagcagcaacagcaacagcagcagcagcaacagcagcagtatcatatccgtcaacagcagcagcagcagatattacgccaacagcagcagcagcagcagcagcaacagcagcaacagcagcaacagcagcagcagcagcagcagcagcagcaacagcatcagcagcagcaacagcaacaggcggccccccctcagccacaaccacagtcccagccccagttccagcgccaaggtttgcagcagacccagcagcagcagcaaacagcagcactcgtgcggcaactgcagcaacagctcagcaacacccagccccagcctagcacaaatatatttgggcggtattag

SEQ ID NO: 152982 - DNA, 6533 bp, Artificial Sequence
  derived and/or modified sequence
atggccgcattcgggattctcagttacgaacacaggcctcttaaaagacctagactgggtcctcctgacgtctatcctcaggacccgaagcaaaaggaagacgaactgacagccctgaacgttaaacaaggctttaataatcaacctgccgtatctggagatgaacacggctccgccaagaacgtgtcttttaatcccgcaaaaatctcgtccaatttctcatctatcattgctgagaaactccgatgcaatacattacctgataccgggcgtcgcaaaccacaggtgaaccagaaggataatttctggctagtgaccgcacgaagccagagcgcaattaacacgtggtttaccgatttagccggtacaaagcccctgacccagctggccaagaaggtgccgatcttctcaaaaaaggaggaggttttcggatatctggcgaaatatacggtcccggtaatgagagcggcttggttgattaagatgacttgtgcctattatgccgcaatctccgagaccaaagtgaaaaagaggcacgttgatccattcatggagtggacccaaattattacaaaatacttgtgggagcaactacaaaagatggccgaatattaccgtcccggaccagcaggctccgggggttgcggatctaccattggcccactgccacatgacgtcgaggtggccataaggcagtgggactatacagaaaaactcgctatgttcatgtttcaagacggtatgttggaccgacatgaattcctgacttgggtcttggaatgcttcgagaaaataagaccaggtgaagatgaacttctcaagcttctcctgcctctgctgctgcgatacagcggtgagtttgtgcagagtgcatatctgtctcgcaggctcgcctacttctgcacacggaggttggctctgcagctggatggtgtgagtagccatagcagccacgtgattagtgcccagagcacctccacacttcctaccaccccagctccacaacctcccacaagcagcacgccatcaacccccttctccgacctgttgatgtgtcctcaacacaggcctctggtcttcgggctatcttgcatcctgcagacaatcttgctgtgttgtccttctgcccttgtgtggcactacagtttgaccgattcccgtattaagacaggatctccgctggaccatctgccgatcgcacccagcaaccttcccatgcctgagggcaactccgcatttacccagcaagtccgtgccaaactgcgggaaatcgaacagcagattaaggagcggggtcaagccgtcgaggttaggtggtcttttgacaaatgccaggaggccacagccggtttcaccatcgggagggtactgcacacactagaggtgcttgactcacactcatttgagcgctccgacttttcaaattctctagactccctgtgcaacaggatctttggtctgggacctagcaaggacggacacgagattagctccgatgatgacgccgtggtgtcgctgctctgcgaatgggccgtgtcatgtaagcgttccggccgacatagggccatggttgtcgctaagctcctggaaaaacgacaagccgagattgaggcagagcgctgcggggaatccgaggctgcagatgagaaggggagcatcgcaagcggttctcttagcgccccatcagcacctatttttcaagatgtcctcctgcaattcctggatacccaggctcccatgctcaccgatcctcggtccgagagtgagcgcgttgagttcttcaacctggtgctgttattttgtgagctcatcagacacgacgtcttctcgcacaatatgtatacttgcactctcatcagtcggggagaccttgcattcggtgcccctggacctcgcccaccaagtccatttgacgatccagcggacgatccagagcataaagaggcagaaggcagctcctcctccaaactcgaggatcctggcctgtctgagagcatggatattgatccttccagttccgtactctttgaggacatggaaaagcccgacttctcattattcagccctaccatgccttgcgaaggaaaggggtctccttccccagagaagcctgatgtagagaaagaggtgaaaccaccacctaaagagaaaatcgaagggactttgggcgttttgtacgaccaaccgagacacgttcaatatgccacacactttcccattcctcaggaagagagttgttcacacgaatgtaaccaaaggttggttgtgttgtttggagtgggtaaacagagggatgacgcacgacacgcgattaagaagattactaaagacatactcaaggtcctcaatcgtaaagggacagctgagactgaccagctggcaccgatcgttcccctgaacccaggcgacctcacctttctgggcggagaagatgggcagaaaagaaggaggaatcggcctgaggcgtttccaaccgccgaagacatttttgcaaaatttcagcatctgagtcattacgatcaacaccaggtcactgcacaagtctcccgaaatgtactggagcagattacaagttttgcattaggaatgtcctaccacctgcccctggtgcaacacgttcagttcattttcgatctgatggagtactcgctgagcattagtggccttattgatttcgccatccagctcttgaatgagttgagtgtggtggaagccgaattgctgttaaaaagttcagatttggtcgggtcttacactacctctctgtgcctttgcatcgtggccgtgctgcggcactaccatgcatgcctgatactgaatcaagaccagatggcccaggtgtttgagggactgtgtggggtagtcaaacatggcatgaaccgatccgatggcagcagcgctgagaggtgtatccttgcctacctgtacgatctctacacaagttgtagtcacctgaagaataagttcggagaactgttcagtgacttctgttctaaagtcaaaaatacaatatattgtaatgtggagccttccgaatcaaatatgcggtgggcaccagaatttatgatcgataccctggagaaccctgccgctcacacctttacttatactggactcgggaaatcactctctgagaaccctgctaaccggtattcatttgtgtgtaatgccctaatgcacgtttgcgtgggtcaccacgacccagaccgggtgaacgacattgctattctgtgtgccgagctcaccggatattgcaaatccctctccgctgaatggctcggggtgttgaaagccctttgttgttcctcgaataatggaacctgtggattcaatgatctcctctgcaatgtggatgtgtcagatctgagctttcatgattctttagccacattcgtcgcgattcttatcgccaggcagtgtttgctgctggaggacctcattaggtgcgccgctattccaagcctgcttaacgctgcctgcagcgagcaagacagcgagccgggtgcccgtctcacctgcaggatacttctacacctgtttaaaactccacagctgaatccctgtcagtccgacggaaataagcccacagtcggcattagaagttcttgtgataggcacctgctagctgccagtcaaaatcgcatcgtggacggagctgtcttcgcagttctgaaggcggttttcgtgctgggcgacgcggagctaaaagggagtggtttcaccgtaaccgggggtacagaggagctcccagaggaagaaggcggagggggatcaggaggcaggcgacaggggggtcgcaatattagtgtggagacagccagtttggatgtctacgctaagtacgtgcttaggtcaatctgtcagcaggagtgggttggggagcggtgcctgaaaagtctgtgcgaagactcaaacgaccttcaggacccagtcctgagttctgctcaagcgcaaagactgatgcagctcatttgctacccccaccggctgctggacaatgaagacggggagaatccacaaagacaaagaatcaaacgcatactccagaacctggatcagtggactatgcggcagtcttcacttgagcttcagctgatgattaagcagactcctaacaacgagatgaattcgctccttgagaatatcgccaaggcaacaatcgaggttttccagcagagtgccgaaactggtagctcttccggttccactgcttccaatatgccttcctcatcgaagactaagccggtgctgagtagccttgagaggtcaggcgtttggctcgtcgcaccgctgatagcaaaattaccaacctcagttcaaggacacgtattaaaagctgctggagaagagcttgaaaaggggcagcacctgggtagctcctccaggaaggagcgggaccgtcaaaagcagaagtcaatgtccctcttatcccagcagccctttcttagccttgtactcacttgtttaaaaggtcaggatgaacagcgcgaaggactgctcacatcattgtactcccaggttcatcagattgtcaataattggcgcgatgatcagtatcttgatgactgtaaacctaaacaactgatgcacgaggcacttaaattgaggttaaacctcgtgggcggtatgtttgataccgtacagagatccacacagcagaccaccgaatgggctatgctcctattggaaattataatcagcggcaccgtcgatatgcagtctaataacgaactgttcacaaccgtgctggatatgctgagcgtactgattaatggaacgctggccgctgacatgtcatccatatcccaaggcagtatggaagaaaataaacgtgcgtacatgaacttggccaaaaaattgcagaaggagctcggggagagacagtctgacagcttagagaaggtcagacagttactccctctgcccaaacaaacgcgagatgttattacctgcgagccacagggatcactgatcgacaccaagggaaataagattgcaggatttgactctatttttaaaaaggaaggtctgcaggtctcaacaaaacaaaagattagtccatgggacctgttcgagggcttaaaaccctccgctccgctttcatggggatggttcggaaccgtgagagtggaccgccgagtggcacgcggtgaggagcagcaacgattactcctgtatcacacccacctccgccctcggcctcgtgcctactatctcgaacctctgcctctgcccccagaggacgaagagcccccagccccaactctgttagaacccgagaaaaaggcccctgagcccccaaagacagataaacctggggctgctcccccttccaccgaggagcgaaagaagaagagtaccaagggtaagaaaaggagtcaaccagccaccaagactgaagactacggcatggggcctgggcgaagcgggccatacggcgtgacggttccccctgatctgctgcatcatcccaaccccggttccattactcatcttaattatcgccagggtagcattggactgtatactcagaatcagcctctgccagcgggtggcccaagggtcgacccctatagacccgtgagactgccaatgcaaaaacttccgaccaggcctacgtaccccggtgtattgccaacaactatgacgggggtgatgggtctcgagccgtcatcctataaaacttccgtctaccggcagcagcaaccggctgtcccgcagggtcagagactacggcagcagctacagcagtcacaaggaatgcttgggcagtcaagcgtgcaccagatgaccccttcatcctcatacgggctgcagacgagccagggatacaccccttatgtcagtcacgtcggcctccagcaacacactgggcctgcgggaaccatggtcccccctagctattcctctcagccctaccagagcactcatccaagtacaaacccaacccttgtcgaccctactcggcacctacagcaaaggcccagtgggtatgtgcaccagcaagccccaacctatggtcatggcctcacaagcacccagagatttagtcaccagaccctccaacaaacacctatgatttctaccatgaccccaatgtccgcccagggcgtgcaggctggcgttcgcagtacagcaatactccctgaacagcagcaacaacagcaacagcagcagcagcagcagcagcagcagcagcagcaacagcagcagcagcagcagcagcagtaccatatccgccagcagcagcagcagcagatcctgcgccagcagcagcagcagcagcagcagcagcagcaacaacagcaacagcaacagcagcagcaacagcagcagcagcagcaacatcagcagcagcagcagcagcaggcggcacctcctcaaccacagccgcaatctcagccacagttccagaggcagggcctgcagcagacccagcagcagcagcagacggcagctttagttaggcagctgcagcagcagctgagcaatactcagccgcagcccagcactaatatttttggcaggtacta

SEQ ID NO: 152983 - DNA, 6530 bp, Artificial Sequence
  derived and/or modified sequence
atggcggcttttgggattctttcctatgagcatcgcccactcaaaaggccacgcctgggaccacccgacgtgtatccccaagatcccaaacagaaggaggatgagctgaccgcccttaacgtgaaacagggattcaacaatcagcctgccgtcagcggtgatgagcatggtagcgccaaaaacgtatcatttaatcccgcaaagatctcctccaatttttcaagcattatcgcagagaagcttcgctgtaatacactgccggacaccggacggaggaagccacaggtcaatcagaaagacaatttctggttggtcactgccagatcccagtcggctataaatacctggtttacggacttggcaggaactaaacccctgacccagctggcgaagaaagtcccaattttcagcaaaaaagaagaggtgttcggatacctggccaagtacacagtgcccgttatgagagccgcatggttgattaagatgacttgcgcttactatgctgcaatctccgagaccaaagtgaagaagcgccatgtggacccgtttatggagtggacccagattataactaagtatctttgggagcagctccagaaaatggcggaatactataggcccggtcccgcagggagcgggggttgtggaagcacaatcgggcctctcccccatgatgtggaggtcgccataagacaatgggattacactgagaaactggcgatgtttatgttccaagacggtatgctggaccgccacgaattcctgacatgggtcctcgaatgtttcgagaaaatcaggcctggcgaggatgagctactcaagctcctgttgccccttttactaagatatagtggcgaattcgttcagagcgcttacctctctaggcgcctcgcatacttttgtactcgcagactggccctccagctcgatggagtaagcagccattcctcacatgtgatctccgcccagtccacctccactttgcccacaacccctgcccctcagccaccaacctcctctacccctagcacccccttcagtgacctgctgatgtgccctcagcatcggcctctggtctttgggctttcgtgtatcctccaaacgattctcctgtgctgcccaagcgcactagtgtggcactattctctcacagacagcagaataaaaacaggtagccctctggatcacttgccaatcgccccttcgaacctgccaatgcctgagggaaatagcgcattcacccaacaagtccgggctaaactgagagagattgaacagcagatcaaggaacgcggtcaggccgttgaggttagatggagcttcgacaagtgtcaagaagccactgcaggcttcactattgggcgtgtcctccacactctcgaggtcttggactctcatagcttcgaacgaagtgacttctccaattccctagattcgctgtgtaatcggattttcggactggggccatcgaaagacgggcatgaaattagttcagacgacgatgccgtggtgtccctgctgtgtgaatgggccgtgagctgtaagcggtccggaaggcatagggcaatggtggtggccaagctcctggagaagagacaggctgaaatcgaggccgagcggtgcggagagtctgaagccgctgatgaaaaaggaagtatcgctagcggttctctgagcgcaccttcagctcctattttccaggacgtgctcttacagttcctggacacccaggcacctatgttgacagacccccgatctgaatccgagcgcgtggaattttttaatcttgtgctgctgttctgtgagcttatccggcacgacgttttttcccataatatgtatacctgcaccctcatttctagaggggaccttgctttcggtgctccaggccctagacctccttccccattcgatgatcccgcagacgatccggaacacaaggaagcagaggggtcatcttcgtctaagctcgaggatcccggactgagtgagagtatggacattgacccctctagtagcgtgctgttcgaggacatggagaaaccagactttagcctgttctcacccacaatgccttgcgagggcaaaggttcaccttctcctgagaagcctgatgtagaaaaagaagtgaaacctcctcctaaagaaaaaatcgaaggtaccctcggtgtgctgtacgatcagcctcgccacgtgcagtacgctactcacttccccatccctcaggaagaaagctgtagtcacgagtgtaaccaaagactggtggttctttttggagtcggcaagcagagagacgacgcaagacacgcaattaaaaagattacaaaagacatcctgaaggtactaaatagaaaaggcactgctgagacagatcagctggctcccattgtgcctctgaacccgggtgacttaacattcctagggggagaggacggtcagaagcgacgtcgcaatagacctgaagcctttcccacggccgaagacatctttgccaaatttcagcacctctcacactacgaccagcaccaggtcactgctcaggtcagccggaatgtacttgagcagatcacgagtttcgccctgggaatgagttaccatctcccattagtccagcatgtgcagtttatctttgacctgatggagtattccctcagcatcagcggtttgatcgattttgccattcagctgcttaacgagttaagcgttgtggaagccgaacttctgctcaaatcatctgatctcgtaggtagttatacgacaagtctgtgtctctgcatcgtggccgtgctgaggcactaccatgcctgcctcatactcaaccaggaccagatggcacaagtattcgaggggctgtgcggcgtggttaagcatggaatgaaccgtagcgatggtagcagcgcagagcgctgcattctcgcctatctttatgatctatatacctcttgtagccacttaaaaaacaagtttggcgagctgttctctgacttctgttccaaagtcaagaacactatctattgtaatgttgaaccttccgagtctaatatgcggtgggctcccgaattcatgattgacacccttgaaaacccggcagctcatactttcacgtacactggtctcgggaagtctctcagcgagaaccccgctaatagatattcattcgtgtgtaacgcattaatgcacgtctgtgtcgggcaccacgatcccgaccgcgtaaacgacatcgctattctgtgtgcggagttgactggctattgcaagagtctgagcgccgagtggcttggcgtcctaaaggccctttgttgctctagcaacaatggtacgtgcggctttaatgatttgctctgtaatgtggacgtgtcagacttgagcttccatgacagcctggccacctttgtcgcaattttaatcgcacggcagtgcctgcttctggaggatctaattaggtgtgccgctataccttcacttctgaacgcagcatgctccgagcaagattccgagcctggagcccgactaacctgccgaatcctgctccatctattcaagactccacaattaaacccttgccagagtgatggaaacaagcctacagtcggaatacggtcttcttgtgaccgccatctgctggctgctagtcaaaaccggattgtggacggagctgtgttcgctgtcctaaaggctgttttcgtcctgggcgatgccgagttgaaaggcagcgggttcactgtaactggtggcacggaagagttgcccgaggaggaaggcggaggcggtagcggcggaaggcggcaggggggtcggaatatcagcgtcgaaactgctagcctcgatgtgtatgccaaatacgtgttaagatccatctgtcagcaggagtgggtcggcgaacgctgcttaaagagcctttgtgaggattccaatgatcttcaagatccggtcctgagtagcgcacaagctcagcgattaatgcagctgatatgctatccccatcggctcctggacaatgaggacggagagaaccctcagcggcagagaattaagaggatcctccagaacttggaccaatggactatgagacagagttcactcgaactgcagttgatgattaagcagactccgaataacgagatgaactccctgctggagaatattgccaaggccaccattgaagtctttcagcagtcagccgaaacaggctcgtctagtgggtcaaccgcctccaatatgcccagtagctctaagacaaaaccagtgctgagctctcttgaaaggagtggggtatggctcgtcgcacccctgatagcaaagctgccgacgagcgtgcaagggcatgtactgaaggcagcaggagaggaactggaaaaaggacagcacctcgggtcgtcctcacgtaaggaaagggaccgacagaagcaaaagagcatgagcctgctcagccagcagcccttcctatccctggtgctaacctgcctcaagggccaggatgaacagagagaaggtctcctaacttcactatactctcaggtgcaccagatagtgaataactggcgcgatgaccagtatctggacgattgtaaacctaagcagcttatgcacgaagccctgaagcttcgtcttaacctggtgggaggcatgtttgacactgtccagagaagcacacagcagacaactgaatgggcaatgctgttattggaaattataatctcaggaactgtagatatgcagtctaacaatgaactgttcaccaccgtcctggacatgctttctgtgcttattaatggaactctggcagctgacatgagttcaatctctcaggggtcaatggaagagaataagcgtgcttatatgaatctggctaagaaacttcagaaggaactgggtgagcgacagtcagattccctcgagaaggttcgccagctcctcccattaccaaagcaaactagagatgtgatcacctgtgaaccacaggggtccttgatcgatacaaagggtaacaagatcgccggttttgactcgatcttcaagaaggaaggcctccaggtatcaactaagcagaagatcagtccttgggacctcttcgaaggcttaaaacccagcgcccctctgtcttggggctggtttgggaccgtgagggttgatcggagggtagccagaggcgaagagcaacagcgacttcttctgtaccatacgcacctgagacccaggccgagagcatactacctggagccccttccactgccacccgaggacgaagagcctcctgctccgactctgctggaaccggaaaagaaagccccagagccgccaaagacggataaacctggcgctgcacctcccagcactgaagaacgaaagaagaaaagcaccaaagggaaaaagaggtcccagccagccacaaaaactgaggactacggcatggggcctggccgatctgggccatacggtgtcacagtaccaccagacctcctgcaccacccaaacccaggatctatcacccatcttaactaccgccagggcagtatcgggttatacacacagaatcagcctctaccagccggtgggcctagggtagatccgtacagacctgttcgtttgcccatgcagaaactgccgactcgcccaacctaccctggcgttctgcccacgaccatgaccggtgtgatgggacttgagccatcttcatacaagacaagcgtgtatcgtcagcagcagccagccgtcccgcagggtcagcgcctgcggcagcaattgcagagccaagggatgctgggacaaagcagcgtacatcagatgaccccctccagctcttacgggcttcaaacatctcagggctacaccccctatgtctcccacgtgggcctccagcaacacaccggacccgctggaacaatggtaccaccgtcatactcgtcccagccctatcagtccacccacccctcgaccaatcctacactggtggacccaacgcggcacctgcagcaaagaccttcaggttatgtgcaccagcaagctcctacgtacggccacggcctgacttctacacagcgattcagtcaccaaacactccagcaaactcccatgatctccacaatgacccctatgtccgcgcagggagtgcaagctggagtgagatccacggcgatcctccccgagcagcagcaacagcaacagcagcagcagcaacagcagcagcagcagcagcagcagcagcagcaacagcaacagcaacagtaccatatccggcagcagcagcagcagcaaattctgcgccagcaacaacagcaacaacagcagcagcagcagcaacaacagcagcagcagcagcagcagcagcagcagcagcagcaacaccagcagcagcaacagcaacaggccgcaccccctcagccgcagccccaatctcaaccacagttccaacggcaaggtctgcagcagacccaacaacagcagcagacagctgccttagtacggcagctgcagcagcagctcagcaacacccagccgcaaccctccaccaacatcttcggaaggtacta

SEQ ID NO: 152984 - DNA, 6534 bp, Artificial Sequence
  derived and/or modified sequence
atggccgccttcggcatcctgagctacgagcacagacccctgaagagacccagactgggcccccccgacgtgtacccccaggaccccaagcagaaggaggacgagctgaccgccctgaacgtgaagcagggcttcaacaaccagcccgccgtgagcggcgacgagcacggcagcgccaagaacgtgagcttcaaccccgccaagatcagcagcaacttcagcagcatcatcgccgagaagctgagatgcaacaccctgcccgacaccggcagaagaaagccccaggtgaaccagaaggacaacttctggctggtgaccgccagaagccagagcgccatcaacacctggttcaccgacctggccggcaccaagcccctgacccagctggccaagaaggtgcccatcttcagcaagaaggaggaggtgttcggctacctggccaagtacaccgtgcccgtgatgagagccgcctggctgatcaagatgacctgcgcctactacgccgccatcagcgagaccaaggtgaagaagagacacgtggaccccttcatggagtggacccagatcatcaccaagtacctgtgggagcagctgcagaagatggccgagtactacagacccggccccgccggcagcggcggctgcggcagcaccatcggccccctgccccacgacgtggaggtggccatcagacagtgggactacaccgagaagctggccatgttcatgttccaggacggcatgctggacagacacgagttcctgacctgggtgctggagtgcttcgagaagatcagacccggcgaggacgagctgctgaagctgctgctgcccctgctgctgagatacagcggcgagttcgtgcagagcgcctacctgagcagaagactggcctacttctgcaccagaagactggccctgcagctggacggcgtgagcagccacagcagccacgtgatcagcgcccagagcaccagcaccctgcccaccacccccgccccccagccccccaccagcagcacccccagcacccccttcagcgacctgctgatgtgcccccagcacagacccctggtgttcggcctgagctgcatcctgcagaccatcctgctgtgctgccccagcgccctggtgtggcactacagcctgaccgacagcagaatcaagaccggcagccccctggaccacctgcccatcgcccccagcaacctgcccatgcccgagggcaacagcgccttcacccagcaggtgagagccaagctgagagagatcgagcagcagatcaaggagagaggccaggccgtggaggtgagatggagcttcgacaagtgccaggaggccaccgccggcttcaccatcggcagagtgctgcacaccctggaggtgctggacagccacagcttcgagagaagcgacttcagcaacagcctggacagcctgtgcaacagaatcttcggcctgggccccagcaaggacggccacgagatcagcagcgacgacgacgccgtggtgagcctgctgtgcgagtgggccgtgagctgcaagagaagcggcagacacagagccatggtggtggccaagctgctggagaagagacaggccgagatcgaggccgagagatgcggcgagagcgaggccgccgacgagaagggcagcatcgccagcggcagcctgagcgcccccagcgcccccatcttccaggacgtgctgctgcagttcctggacacccaggcccccatgctgaccgaccccagaagcgagagcgagagagtggagttcttcaacctggtgctgctgttctgcgagctgatcagacacgacgtgttcagccacaacatgtacacctgcaccctgatcagcagaggcgacctggccttcggcgcccccggccccagaccccccagccccttcgacgaccccgccgacgaccccgagcacaaggaggccgagggcagcagcagcagcaagctggaggaccccggcctgagcgagagcatggacatcgaccccagcagcagcgtgctgttcgaggacatggagaagcccgacttcagcctgttcagccccaccatgccctgcgagggcaagggcagccccagccccgagaagcccgacgtggagaaggaggtgaagcccccccccaaggagaagatcgagggcaccctgggcgtgctgtacgaccagcccagacacgtgcagtacgccacccacttccccatcccccaggaggagagctgcagccacgagtgcaaccagagactggtggtgctgttcggcgtgggcaagcagagagacgacgccagacacgccatcaagaagatcaccaaggacatcctgaaggtgctgaacagaaagggcaccgccgagaccgaccagctggcccccatcgtgcccctgaaccccggcgacctgaccttcctgggcggcgaggacggccagaagagaagaagaaacagacccgaggccttccccaccgccgaggacatcttcgccaagttccagcacctgagccactacgaccagcaccaggtgaccgcccaggtgagcagaaacgtgctggagcagatcaccagcttcgccctgggcatgagctaccacctgcccctggtgcagcacgtgcagttcatcttcgacctgatggagtacagcctgagcatcagcggcctgatcgacttcgccatccagctgctgaacgagctgagcgtggtggaggccgagctgctgctgaagagcagcgacctggtgggcagctacaccaccagcctgtgcctgtgcatcgtggccgtgctgagacactaccacgcctgcctgatcctgaaccaggaccagatggcccaggtgttcgagggcctgtgcggcgtggtgaagcacggcatgaacagaagcgacggcagcagcgccgagagatgcatcctggcctacctgtacgacctgtacaccagctgcagccacctgaagaacaagttcggcgagctgttcagcgacttctgcagcaaggtgaagaacaccatctactgcaacgtggagcccagcgagagcaacatgagatgggcccccgagttcatgatcgacaccctggagaaccccgccgcccacaccttcacctacaccggcctgggcaagagcctgagcgagaaccccgccaacagatacagcttcgtgtgcaacgccctgatgcacgtgtgcgtgggccaccacgaccccgacagagtgaacgacatcgccatcctgtgcgccgagctgaccggctactgcaagagcctgagcgccgagtggctgggcgtgctgaaggccctgtgctgcagcagcaacaacggcacctgcggcttcaacgacctgctgtgcaacgtggacgtgagcgacctgagcttccacgacagcctggccaccttcgtggccatcctgatcgccagacagtgcctgctgctggaggacctgatcagatgcgccgccatccccagcctgctgaacgccgcctgcagcgagcaggacagcgagcccggcgccagactgacctgcagaatcctgctgcacctgttcaagaccccccagctgaacccctgccagagcgacggcaacaagcccaccgtgggcatcagaagcagctgcgacagacacctgctggccgccagccagaacagaatcgtggacggcgccgtgttcgccgtgctgaaggccgtgttcgtgctgggcgacgccgagctgaagggcagcggcttcaccgtgaccggcggcaccgaggagctgcccgaggaggagggcggcggcggcagcggcggcagaagacagggcggcagaaacatcagcgtggagaccgccagcctggacgtgtacgccaagtacgtgctgagaagcatctgccagcaggagtgggtgggcgagagatgcctgaagagcctgtgcgaggacagcaacgacctgcaggaccccgtgctgagcagcgcccaggcccagagactgatgcagctgatctgctacccccacagactgctggacaacgaggacggcgagaacccccagagacagagaatcaagagaatcctgcagaacctggaccagtggaccatgagacagagcagcctggagctgcagctgatgatcaagcagacccccaacaacgagatgaacagcctgctggagaacatcgccaaggccaccatcgaggtgttccagcagagcgccgagaccggcagcagcagcggcagcaccgccagcaacatgcccagcagcagcaagaccaagcccgtgctgagcagcctggagagaagcggcgtgtggctggtggcccccctgatcgccaagctgcccaccagcgtgcagggccacgtgctgaaggccgccggcgaggagctggagaagggccagcacctgggcagcagcagcagaaaggagagagacagacagaagcagaagagcatgagcctgctgagccagcagcccttcctgagcctggtgctgacctgcctgaagggccaggacgagcagagagagggcctgctgaccagcctgtacagccaggtgcaccagatcgtgaacaactggagagacgaccagtacctggacgactgcaagcccaagcagctgatgcacgaggccctgaagctgagactgaacctggtgggcggcatgttcgacaccgtgcagagaagcacccagcagaccaccgagtgggccatgctgctgctggagatcatcatcagcggcaccgtggacatgcagagcaacaacgagctgttcaccaccgtgctggacatgctgagcgtgctgatcaacggcaccctggccgccgacatgagcagcatcagccagggcagcatggaggagaacaagagagcctacatgaacctggccaagaagctgcagaaggagctgggcgagagacagagcgacagcctggagaaggtgagacagctgctgcccctgcccaagcagaccagagacgtgatcacctgcgagccccagggcagcctgatcgacaccaagggcaacaagatcgccggcttcgacagcatcttcaagaaggagggcctgcaggtgagcaccaagcagaagatcagcccctgggacctgttcgagggcctgaagcccagcgcccccctgagctggggctggttcggcaccgtgagagtggacagaagagtggccagaggcgaggagcagcagagactgctgctgtaccacacccacctgagacccagacccagagcctactacctggagcccctgcccctgccccccgaggacgaggagccccccgcccccaccctgctggagcccgagaagaaggcccccgagccccccaagaccgacaagcccggcgccgccccccccagcaccgaggagagaaagaagaagagcaccaagggcaagaagagaagccagcccgccaccaagaccgaggactacggcatgggccccggcagaagcggcccctacggcgtgaccgtgccccccgacctgctgcaccaccccaaccccggcagcatcacccacctgaactacagacagggcagcatcggcctgtacacccagaaccagcccctgcccgccggcggccccagagtggacccctacagacccgtgagactgcccatgcagaagctgcccaccagacccacctaccccggcgtgctgcccaccaccatgaccggcgtgatgggcctggagcccagcagctacaagaccagcgtgtacagacagcagcagcccgccgtgccccagggccagagactgagacagcagctgcagcagagccagggcatgctgggccagagcagcgtgcaccagatgacccccagcagcagctacggcctgcagaccagccagggctacaccccctacgtgagccacgtgggcctgcagcagcacaccggccccgccggcaccatggtgccccccagctacagcagccagccctaccagagcacccaccccagcaccaaccccaccctggtggaccccaccagacacctgcagcagagacccagcggctacgtgcaccagcaggcccccacctacggccacggcctgaccagcacccagagattcagccaccagaccctgcagcagacccccatgatcagcaccatgacccccatgagcgcccagggcgtgcaggccggcgtgagaagcaccgccatcctgcccgagcagcagcagcagcagcagcagcagcagcagcagcagcagcagcagcagcagcagcagcagcagcagcagcagcagcagtaccacatcagacagcagcagcagcagcagatcctgagacagcagcagcagcagcagcagcagcagcagcagcagcagcagcagcagcagcagcagcagcagcagcagcagcagcagcaccagcagcagcagcagcagcaggccgcccccccccagccccagccccagagccagccccagttccagagacagggcctgcagcagacccagcagcagcagcagaccgccgccctggtgagacagctgcagcagcagctgagcaacacccagccccagcccagcaccaacatcttcggcagatactag

SEQ ID NO: 152985 - DNA, 6531 bp, Artificial Sequence
  derived and/or modified sequence
atggccgccttcggcatcctgagctacgagcacagacccctgaagagacccagactgggcccccccgacgtgtacccccaggaccccaagcagaaggaggacgagctgaccgccctgaacgtgaagcagggcttcaacaaccagcccgccgtgagcggcgacgagcacggcagcgccaagaacgtgagcttcaaccccgccaagatcagcagcaacttcagcagcatcatcgccgagaagctgagatgcaacaccctgcccgacaccggcagaagaaagccccaggtgaaccagaaggacaacttctggctggtgaccgccagaagccagagcgccatcaacacctggttcaccgacctggccggcaccaagcccctgacccagctggccaagaaggtgcccatcttcagcaagaaggaggaggtgttcggctacctggccaagtacaccgtgcccgtgatgagagccgcctggctgatcaagatgacctgcgcctactacgccgccatcagcgagaccaaggtgaagaagagacacgtggaccccttcatggagtggacccagatcatcaccaagtacctgtgggagcagctgcagaagatggccgagtactacagacccggccccgccggcagcggcggctgcggcagcaccatcggccccctgccccacgacgtggaggtggccatcagacagtgggactacaccgagaagctggccatgttcatgttccaggacggcatgctggacagacacgagttcctgacctgggtgctggagtgcttcgagaagatcagacccggcgaggacgagctgctgaagctgctgctgcccctgctgctgagatacagcggcgagttcgtgcagagcgcctacctgagcagaagactggcctacttctgcaccagaagactggccctgcagctggacggcgtgagcagccacagcagccacgtgatcagcgcccagagcaccagcaccctgcccaccacccccgccccccagccccccaccagcagcacccccagcacccccttcagcgacctgctgatgtgcccccagcacagacccctggtgttcggcctgagctgcatcctgcagaccatcctgctgtgctgccccagcgccctggtgtggcactacagcctgaccgacagcagaatcaagaccggcagccccctggaccacctgcccatcgcccccagcaacctgcccatgcccgagggcaacagcgccttcacccagcaggtgagagccaagctgagagagatcgagcagcagatcaaggagagaggccaggccgtggaggtgagatggagcttcgacaagtgccaggaggccaccgccggcttcaccatcggcagagtgctgcacaccctggaggtgctggacagccacagcttcgagagaagcgacttcagcaacagcctggacagcctgtgcaacagaatcttcggcctgggccccagcaaggacggccacgagatcagcagcgacgacgacgccgtggtgagcctgctgtgcgagtgggccgtgagctgcaagagaagcggcagacacagagccatggtggtggccaagctgctggagaagagacaggccgagatcgaggccgagagatgcggcgagagcgaggccgccgacgagaagggcagcatcgccagcggcagcctgagcgcccccagcgcccccatcttccaggacgtgctgctgcagttcctggacacccaggcccccatgctgaccgaccccagaagcgagagcgagagagtggagttcttcaacctggtgctgctgttctgcgagctgatcagacacgacgtgttcagccacaacatgtacacctgcaccctgatcagcagaggcgacctggccttcggcgcccccggccccagaccccccagccccttcgacgaccccgccgacgaccccgagcacaaggaggccgagggcagcagcagcagcaagctggaggaccccggcctgagcgagagcatggacatcgaccccagcagcagcgtgctgttcgaggacatggagaagcccgacttcagcctgttcagccccaccatgccctgcgagggcaagggcagccccagccccgagaagcccgacgtggagaaggaggtgaagcccccccccaaggagaagatcgagggcaccctgggcgtgctgtacgaccagcccagacacgtgcagtacgccacccacttccccatcccccaggaggagagctgcagccacgagtgcaaccagagactggtggtgctgttcggcgtgggcaagcagagagacgacgccagacacgccatcaagaagatcaccaaggacatcctgaaggtgctgaacagaaagggcaccgccgagaccgaccagctggcccccatcgtgcccctgaaccccggcgacctgaccttcctgggcggcgaggacggccagaagagaagaagaaacagacccgaggccttccccaccgccgaggacatcttcgccaagttccagcacctgagccactacgaccagcaccaggtgaccgcccaggtgagcagaaacgtgctggagcagatcaccagcttcgccctgggcatgagctaccacctgcccctggtgcagcacgtgcagttcatcttcgacctgatggagtacagcctgagcatcagcggcctgatcgacttcgccatccagctgctgaacgagctgagcgtggtggaggccgagctgctgctgaagagcagcgacctggtgggcagctacaccaccagcctgtgcctgtgcatcgtggccgtgctgagacactaccacgcctgcctgatcctgaaccaggaccagatggcccaggtgttcgagggcctgtgcggcgtggtgaagcacggcatgaacagaagcgacggcagcagcgccgagagatgcatcctggcctacctgtacgacctgtacaccagctgcagccacctgaagaacaagttcggcgagctgttcagcgacttctgcagcaaggtgaagaacaccatctactgcaacgtggagcccagcgagagcaacatgagatgggcccccgagttcatgatcgacaccctggagaaccccgccgcccacaccttcacctacaccggcctgggcaagagcctgagcgagaaccccgccaacagatacagcttcgtgtgcaacgccctgatgcacgtgtgcgtgggccaccacgaccccgacagagtgaacgacatcgccatcctgtgcgccgagctgaccggctactgcaagagcctgagcgccgagtggctgggcgtgctgaaggccctgtgctgcagcagcaacaacggcacctgcggcttcaacgacctgctgtgcaacgtggacgtgagcgacctgagcttccacgacagcctggccaccttcgtggccatcctgatcgccagacagtgcctgctgctggaggacctgatcagatgcgccgccatccccagcctgctgaacgccgcctgcagcgagcaggacagcgagcccggcgccagactgacctgcagaatcctgctgcacctgttcaagaccccccagctgaacccctgccagagcgacggcaacaagcccaccgtgggcatcagaagcagctgcgacagacacctgctggccgccagccagaacagaatcgtggacggcgccgtgttcgccgtgctgaaggccgtgttcgtgctgggcgacgccgagctgaagggcagcggcttcaccgtgaccggcggcaccgaggagctgcccgaggaggagggcggcggcggcagcggcggcagaagacagggcggcagaaacatcagcgtggagaccgccagcctggacgtgtacgccaagtacgtgctgagaagcatctgccagcaggagtgggtgggcgagagatgcctgaagagcctgtgcgaggacagcaacgacctgcaggaccccgtgctgagcagcgcccaggcccagagactgatgcagctgatctgctacccccacagactgctggacaacgaggacggcgagaacccccagagacagagaatcaagagaatcctgcagaacctggaccagtggaccatgagacagagcagcctggagctgcagctgatgatcaagcagacccccaacaacgagatgaacagcctgctggagaacatcgccaaggccaccatcgaggtgttccagcagagcgccgagaccggcagcagcagcggcagcaccgccagcaacatgcccagcagcagcaagaccaagcccgtgctgagcagcctggagagaagcggcgtgtggctggtggcccccctgatcgccaagctgcccaccagcgtgcagggccacgtgctgaaggccgccggcgaggagctggagaagggccagcacctgggcagcagcagcagaaaggagagagacagacagaagcagaagagcatgagcctgctgagccagcagcccttcctgagcctggtgctgacctgcctgaagggccaggacgagcagagagagggcctgctgaccagcctgtacagccaggtgcaccagatcgtgaacaactggagagacgaccagtacctggacgactgcaagcccaagcagctgatgcacgaggccctgaagctgagactgaacctggtgggcggcatgttcgacaccgtgcagagaagcacccagcagaccaccgagtgggccatgctgctgctggagatcatcatcagcggcaccgtggacatgcagagcaacaacgagctgttcaccaccgtgctggacatgctgagcgtgctgatcaacggcaccctggccgccgacatgagcagcatcagccagggcagcatggaggagaacaagagagcctacatgaacctggccaagaagctgcagaaggagctgggcgagagacagagcgacagcctggagaaggtgagacagctgctgcccctgcccaagcagaccagagacgtgatcacctgcgagccccagggcagcctgatcgacaccaagggcaacaagatcgccggcttcgacagcatcttcaagaaggagggcctgcaggtgagcaccaagcagaagatcagcccctgggacctgttcgagggcctgaagcccagcgcccccctgagctggggctggttcggcaccgtgagagtggacagaagagtggccagaggcgaggagcagcagagactgctgctgtaccacacccacctgagacccagacccagagcctactacctggagcccctgcccctgccccccgaggacgaggagccccccgcccccaccctgctggagcccgagaagaaggcccccgagccccccaagaccgacaagcccggcgccgccccccccagcaccgaggagagaaagaagaagagcaccaagggcaagaagagaagccagcccgccaccaagaccgaggactacggcatgggccccggcagaagcggcccctacggcgtgaccgtgccccccgacctgctgcaccaccccaaccccggcagcatcacccacctgaactacagacagggcagcatcggcctgtacacccagaaccagcccctgcccgccggcggccccagagtggacccctacagacccgtgagactgcccatgcagaagctgcccaccagacccacctaccccggcgtgctgcccaccaccatgaccggcgtgatgggcctggagcccagcagctacaagaccagcgtgtacagacagcagcagcccgccgtgccccagggccagagactgagacagcagctgcagagccagggcatgctgggccagagcagcgtgcaccagatgacccccagcagcagctacggcctgcagaccagccagggctacaccccctacgtgagccacgtgggcctgcagcagcacaccggccccgccggcaccatggtgccccccagctacagcagccagccctaccagagcacccaccccagcaccaaccccaccctggtggaccccaccagacacctgcagcagagacccagcggctacgtgcaccagcaggcccccacctacggccacggcctgaccagcacccagagattcagccaccagaccctgcagcagacccccatgatcagcaccatgacccccatgagcgcccagggcgtgcaggccggcgtgagaagcaccgccatcctgcccgagcagcagcagcagcagcagcagcagcagcagcagcagcagcagcagcagcagcagcagcagcagcagcagcagcagcagtaccacatcagacagcagcagcagcagcagatcctgagacagcagcagcagcagcagcagcagcagcagcagcagcagcagcagcagcagcagcagcagcagcagcagcagcagcagcaccagcagcagcagcagcagcaggccgcccccccccagccccagccccagagccagccccagttccagagacagggcctgcagcagacccagcagcagcagcagaccgccgccctggtgagacagctgcagcagcagctgagcaacacccagccccagcccagcaccaacatcttcggcagatactag

SEQ ID NO: 152986 - protein, 2173 aa, Artificial Sequence
  derived and/or modified sequence
MSASFVPNGASLEDCHCNLFCLADLTGIKWKKYVWQGPTSAPILFPVTEEDPILSSFSRCLKADVLGVWRRDQRPGRRELWIFWWGEDPVLLTLFTMTYQKKKMECGRMDFPMNAVLCFQAVHNLLERCLMNRNFVRIGKWFVKPYEKDEKPINKSEHLSCSFTFFLHGDSNVCTSVEINQHQPVYLLSEEHITLAQQSNSPFQVILCPFGLNGTLTGQAFKMSDSATKKLIGEWKQFYPISCCLKEMSEEKQEDMDWEDDSLAAVEVLVAGVRMIYPACFVLVPQSDIPTPSPVGSTHCSSSCLGVHQVPASTRDPAMSSVTLTPPTSPEEVQTVDPQSVQKWVKFSSVSDGFNSDSTSHHGGKIPRKLANHVVDRVWQECNMNRAQNKRKYSASSGGLCEEATAAKVASWDFVEATQRTNCSCLRHKNLKSRNAGQQGQAPSLGQQQQILPKHKTNEKQEKSEKPQKRPLTPFHHRVSVSDDVGMDADSASQRLVISAPDSQVRFSNIRTNDVAKTPQMHGTEMANSPQPPPLSPHPCDVVDEGVTKTPSTPQSQHFYQMPTPDPLVPSKPMEDRIDSLSQSFPPQYQEAVEPTVYVGTAVNLEEDEANIAWKYYKFPKKKDVEFLPPQLPSDKFKDDPVGPFGQESVTSVTELMVQCKKPLKVSDELVQQYQIKNQCLSAIASDAEQEPKIDPYAFVEGDEEFLFPDKKDRQNSEREAGKKHKVEDGTSSVTVLSHEEDAMSLFSPSIKQDAPRPTSHARPPSTSLIYDSDLAVSYTDLDNLFNSDEDELTPGSKKSANGSDDKASCKESKTGNLDPLSCISTADLHKMYPTPPSLEQHIMGFSPMNMNNKEYGSMDTTPGGTVLEGNSSSIGAQFKIEVDEGFCSPKPSEIKDFSYVYKPENCQILVGCSMFAPLKTLPSQYLPPIKLPEECIYRQSWTVGKLELLSSGPSMPFIKEGDGSNMDQEYGTAYTPQTHTSFGMPPSSAPPSNSGAGILPSPSTPRFPTPRTPRTPRTPRGAGGPASAQGSVKYENSDLYSPASTPSTCRPLNSVEPATVPSIPEAHSLYVNLILSESVMNLFKDCNFDSCCICVCNMNIKGADVGVYIPDPTQEAQYRCTCGFSAVMNRKFGNNSGLFLEDELDIIGRNTDCGKEAEKRFEALRATSAEHVNGGLKESEKLSDDLILLLQDQCTNLFSPFGAADQDPFPKSGVISNWVRVEERDCCNDCYLALEHGRQFMDNMSGGKVDEALVKSSCLHPWSKRNDVSMQCSQDILRMLLSLQPVLQDAIQKKRTVRPWGVQGPLTWQQFHKMAGRGSYGTDESPEPLPIPTFLLGYDYDYLVLSPFALPYWERLMLEPYGSQRDIAYVVLCPENEALLNGAKSFFRDLTAIYESCRLGQHRPVSRLLTDGIMRVGSTASKKLSEKLVAEWFSQAADGNNEAFSKLKLYAQVCRYDLGPYLASLPLDSSLLSQPNLVAPTSQSLITPPQMTNTGNANTPSATLASAASSTMTVTSGVAISTSVATANSTLTTASTSSSSSSNLNSGVSSNKLPSFPPFGSMNSNAAGSMSTQANTVQSGQLGGQQTSALQTAGISGESSSLPTQPHPDVSESTMDRDKVGIPTDGDSHAVTYPPAIVVYIIDPFTYENTDESTNSSSVWTLGLLRCFLEMVQTLPPHIKSTVSVQIIPCQYLLQPVKHEDREIYPQHLKSLAFSAFTQCRRPLPTSTNVKTLTGFGPGLAMETALRSPDRPECIRLYAPPFILAPVKDKQTELGETFGEAGQKYNVLFVGYCLSHDQRWILASCTDLYGELLETCIINIDVPNRARRKKSSARKFGLQKLWEWCLGLVQMSSLPWRVVIGRLGRIGHGELKDWSCLLSRRNLQSLSKRLKDMCRMCGISAADSPSILSACLVAMEPQGSFVIMPDSVSTGSVFGRSTTLNMQTSQLNTPQDTSCTHILVFPTSASVQVASATYTTENLDLAFNPNNDGADGMGIFDLLDTGDDLDPDIINILPASPTGSPVHSPGSHYPHGGDAGKGQSTDRLLSTEPHEEVPNILQQPLALGYFVSTAKAGPLPDWFWSACPQAQYQCPLFLKASLHLHVPSVQSDELLHSKHSHPLDSNQTSDVLRFVLEQYNALSWLTCDPATQDRRSCLPIHFVVLNQLYNFIMNML

SEQ ID NO: 152987 - protein, 2174 aa, Artificial Sequence
  derived and/or modified sequence
MSASFVPNGASLEDCHCNLFCLADLTGIKWKKYVWQGPTSAPILFPVTEEDPILSSFSRCLKADVLGVWRRDQRPGRRELWIFWWGEDPSFADLIHHDLSEEEDGVWENGLSYECRTLLFKAVHNLLERCLMNRNFVRIGKWFVKPYEKDEKPINKSEHLSCSFTFFLHGDSNVCTSVEINQHQPVYLLSEEHITLAQQSNSPFQVILCPFGLNGTLTGQAFKMSDSATKKLIGEWKQFYPISCCLKEMSEEKQEDMDWEDDSLAAVEVLVAGVRMIYPACFVLVPQSDIPTPSPVGSTHCSSSCLGVHQVPASTRDPAMSSVTLTPPTSPEEVQTVDPQSVQKWVKFSSVSDGFNSDSTSHHGGKIPRKLANHVVDRVWQECNMNRAQNKRKYSASSGGLCEEATAAKVASWDFVEATQRTNCSCLRHKNLKSRNAGQQGQAPSLGQQQQILPKHKTNEKQEKSEKPQKRPLTPFHHRVSVSDDVGMDADSASQRLVISAPDSQVRFSNIRTNDVAKTPQMHGTEMANSPQPPPLSPHPCDVVDEGVTKTPSTPQSQHFYQMPTPDPLVPSKPMEDRIDSLSQSFPPQYQEAVEPTVYVGTAVNLEEDEANIAWKYYKFPKKKDVEFLPPQLPSDKFKDDPVGPFGQESVTSVTELMVQCKKPLKVSDELVQQYQIKNQCLSAIASDAEQEPKIDPYAFVEGDEEFLFPDKKDRQNSEREAGKKHKVEDGTSSVTVLSHEEDAMSLFSPSIKQDAPRPTSHARPPSTSLIYDSDLAVSYTDLDNLFNSDEDELTPGSKKSANGSDDKASCKESKTGNLDPLSCISTADLHKMYPTPPSLEQHIMGFSPMNMNNKEYGSMDTTPGGTVLEGNSSSIGAQFKIEVDEGFCSPKPSEIKDFSYVYKPENCQILVGCSMFAPLKTLPSQYLPPIKLPEECIYRQSWTVGKLELLSSGPSMPFIKEGDGSNMDQEYGTAYTPQTHTSFGMPPSSAPPSNSGAGILPSPSTPRFPTPRTPRTPRTPRGAGGPASAQGSVKYENSDLYSPASTPSTCRPLNSVEPATVPSIPEAHSLYVNLILSESVMNLFKDCNFDSCCICVCNMNIKGADVGVYIPDPTQEAQYRCTCGFSAVMNRKFGNNSGLFLEDELDIIGRNTDCGKEAEKRFEALRATSAEHVNGGLKESEKLSDDLILLLQDQCTNLFSPFGAADQDPFPKSGVISNWVRVEERDCCNDCYLALEHGRQFMDNMSGGKVDEALVKSSCLHPWSKRNDVSMQCSQDILRMLLSLQPVLQDAIQKKRTVRPWGVQGPLTWQQFHKMAGRGSYGTDESPEPLPIPTFLLGYDYDYLVLSPFALPYWERLMLEPYGSQRDIAYVVLCPENEALLNGAKSFFRDLTAIYESCRLGQHRPVSRLLTDGIMRVGSTASKKLSEKLVAEWFSQAADGNNEAFSKLKLYAQVCRYDLGPYLASLPLDSSLLSQPNLVAPTSQSLITPPQMTNTGNANTPSATLASAASSTMTVTSGVAISTSVATANSTLTTASTSSSSSSNLNSGVSSNKLPSFPPFGSMNSNAAGSMSTQANTVQSGQLGGQQTSALQTAGISGESSSLPTQPHPDVSESTMDRDKVGIPTDGDSHAVTYPPAIVVYIIDPFTYENTDESTNSSSVWTLGLLRCFLEMVQTLPPHIKSTVSVQIIPCQYLLQPVKHEDREIYPQHLKSLAFSAFTQCRRPLPTSTNVKTLTGFGPGLAMETALRSPDRPECIRLYAPPFILAPVKDKQTELGETFGEAGQKYNVLFVGYCLSHDQRWILASCTDLYGELLETCIINIDVPNRARRKKSSARKFGLQKLWEWCLGLVQMSSLPWRVVIGRLGRIGHGELKDWSCLLSRRNLQSLSKRLKDMCRMCGISAADSPSILSACLVAMEPQGSFVIMPDSVSTGSVFGRSTTLNMQTSQLNTPQDTSCTHILVFPTSASVQVASATYTTENLDLAFNPNNDGADGMGIFDLLDTGDDLDPDIINILPASPTGSPVHSPGSHYPHGGDAGKGQSTDRLLSTEPHEEVPNILQQPLALGYFVSTAKAGPLPDWFWSACPQAQYQCPLFLKASLHLHVPSVQSDELLHSKHSHPLDSNQTSDVLRFVLEQYNALSWLTCDPATQDRRSCLPIHFVVLNQLYNFIMNML

SEQ ID NO: 152988 - DNA, 6522 bp, Artificial Sequence
  derived and/or modified sequence
atgtccgcttctttcgtccctaatggtgcaagcttagaagactgccattgtaatctgttctgtctcgccgacctgaccggaattaaatggaagaagtacgtttggcagggcccgacctcagctccgatacttttccctgtcacagaggaggatcccatcctctccagcttcagtaggtgtttgaaggccgatgtgctgggggtatggcggagagatcagcgcccaggaagaagagaactgtggattttttggtggggcgaagaccccgtgctgctcactctgtttaccatgacatatcagaagaaaaaaatggaatgcgggaggatggactttcctatgaatgccgtactgtgctttcaagctgtacacaacctgctcgaaagatgcttgatgaaccgtaacttcgtgcggatcggaaaatggttcgtaaagccctacgagaaagatgagaaacccatcaataagtctgagcatctgagctgttcatttaccttcttcctgcatggggattccaacgtgtgtaccagcgttgagatcaatcagcatcagccagtctacttgctgtccgaagagcacatcaccctagctcagcagagtaactctcccttccaggttatactgtgtccatttggcctcaatggcacgctgaccggccaggctttcaagatgagtgactcagcaaccaaaaagctgattggcgaatggaaacagttttatcctatctcctgctgcctgaaggagatgagcgaagagaagcaggaagatatggactgggaggatgacagcctcgccgcagtggaggtgcttgtcgccggggtcagaatgatttaccccgcatgcttcgtcttagttccccagtcagatattccgaccccctcaccagttggcagtactcattgtagcagcagctgtctgggcgtacaccaagtgccggctagtactagagaccctgctatgtcatctgttacactgacccctccaacttctcccgaagaggttcagactgtcgacccccaaagcgtgcagaaatgggtaaagttctcttccgtgtccgatggtttcaattcggatagtaccagccatcatggcgggaagattcccaggaagctcgccaaccatgtcgtggacagggtttggcaagagtgcaatatgaatcgtgctcagaacaaaaggaagtattccgcttcttcaggcggtctgtgcgaggaagccaccgctgcgaaagtggccagctgggactttgtagaggctactcagcgtaccaactgtagttgcctccgacataaaaatctgaagtcacgaaacgctggccaacaggggcaagcaccaagcctgggtcagcaacagcaaatcctacccaaacataagacaaatgagaaacaggagaagtcagaaaagccccaaaaacggccactgactccctttcaccatagggtgtcagtaagcgacgacgtgggcatggatgccgacagcgcatcccagcgactggtgatctctgcaccagactctcaagtgcggttctcaaatattaggaccaatgacgttgctaaaacccctcaaatgcacggcaccgagatggcaaatagtccccaaccacctcctttgagtccccacccatgtgatgtcgtggatgagggagtaacaaaaaccccatccactccccagagtcagcacttttatcagatgccaactccagaccctctggtgccctcgaagcctatggaagaccggatcgactctctgagccagtcgtttccacctcaataccaggaagctgtcgaacccacagtttacgtgggaacagctgtcaatcttgaggaggatgaggctaacatcgcatggaagtattacaagttcccgaagaagaaggatgtggaatttctgcctccccaactgcctagcgacaagtttaaggatgatcccgttggaccgttcgggcaagaatccgtaactagtgtgacagagctgatggtccagtgcaagaagccgctgaaagtgtctgatgagctggtgcaacagtatcagattaaaaaccagtgtctgtcggccatcgcgtcagacgcggagcaggagcccaaaatcgacccatatgccttcgtggaaggtgatgaagagttcttatttccagacaaaaaagacagacagaattctgaacgggaagccggcaaaaagcataaggtggaagacggcactagcagcgtcacagtcttgagccacgaggaggacgccatgtctctcttctccccctcaatcaagcaagatgcacctagacccacctcacacgcgaggcctccttctacctctttgatatatgatagtgaccttgccgtgagctatactgacttggataacctctttaattcagacgaagacgagttaacgcccggatccaagaagtccgctaacggcagcgacgataaagccagctgtaaagaaagcaagacaggcaatctggaccccctgagttgtatctctactgccgatctccataagatgtatcccacaccaccttccctggaacagcacattatgggtttctcaccaatgaatatgaataataaggagtatggcagcatggacacaaccccaggtggcacagtgctggaggggaatagtagctccataggagctcagttcaagattgaagtagatgaaggattttgtagccccaaaccctcagagatcaaagacttctcttacgtgtataaacctgagaactgccaaatcttagtggggtgttctatgttcgccccactcaagacccttccaagccaatacctgcccccaatcaaactgcctgaggaatgcatctaccgccagtcttggacagtaggcaaactcgagctactgagttcaggcccatccatgccctttataaaggagggggatggatcaaacatggaccaggagtacgggaccgcctatacaccacagacacacaccagttttggaatgccccctagtagcgctcctcccagtaactccggagcggggatcttaccttctccctcgaccccacgtttccctacacctaggacccccagaacgccacgaacgccacggggtgcagggggcccagcttccgcccaaggatccgtgaagtacgaaaactcagacttgtattccccagcatccaccccctccacgtgccgtcctctgaacagcgtggagccggctacagtaccctccatccccgaagcccacagcttatatgtgaacctgatcctttctgagagcgtgatgaacctcttcaaggactgtaactttgacagttgttgtatttgcgtgtgcaatatgaacataaaaggagctgacgtgggcgtgtacatccccgaccctacacaagaggcccagtacagatgcacatgcgggttctccgcagttatgaatcgaaagtttggaaacaactccgggctgttcctcgaggacgagctggacataattggccgcaatactgattgcggaaaagaggccgagaagaggttcgaggcactgagagctacatccgccgagcacgtgaatgggggccttaaggaaagtgaaaagctctctgatgatctgatactgttgctacaagaccagtgcacgaatctcttcagtcctttcggagccgccgatcaggatccattccctaaatcaggggttatcagcaactgggtacgcgtggaagagagagattgctgtaatgattgttaccttgccctggagcacgggcggcagttcatggataacatgagcgggggtaaggtggatgaagcgctggtcaagtcttcctgtttacatccatggagcaaacggaatgatgtcagtatgcagtgctcccaagatatcctgaggatgcttttgagtctccagcccgtattgcaggatgcaatccagaaaaaacgcaccgttcggccctggggggtgcagggcccactgacatggcagcagttccacaaaatggctggaagaggctcttatggaacagacgaatcccccgaaccgctccccatcccaacattcctgcttggctatgattatgattatctggtgctcagcccgttcgcgttgccatattgggaaaggttaatgctggagccatatgggagccagcgggacattgcttacgtggtgctgtgccccgagaacgaggcgctccttaacggggccaaaagcttttttagagacctcacagcgatctatgaaagctgcagactgggtcagcatagaccggtgtcccggctgctgacggacggcattatgagggtgggttctactgcatccaagaagctgtctgaaaaactcgtggcagagtggtttagccaggcagcagatggcaacaacgaagccttctctaagcttaagctttacgcacaggtctgcaggtatgatcttggcccctacttggcgtcactaccgctcgatagctcactcctaagtcagcccaatcttgtcgcaccaacaagtcagagcctgattactccgccacagatgactaatactggcaatgccaacacgcccagtgcaactttggcttctgctgcctctagcaccatgaccgtcacaagcggtgtggccattagcactagcgtcgcgaccgccaattcaacattgactactgccagtacatcctcgtcaagctcctcaaatctcaattccggcgtctctagtaataagttacccagcttcccccctttcggctccatgaattccaacgccgcaggatcaatgtcaacccaagctaatactgtccagtccggccagctcggtggacagcagacatctgccttacagacagccggcattagtggagagtctagctccttaccaactcagccacacccagatgtgtccgagagcaccatggatagggacaaggttgggatccccacagacggtgacagccatgcggtgacataccccccggcgatagttgtttacattatcgacccttttacatatgaaaacactgacgagtccacgaattcctctagtgtgtggacgctgggactcctcagatgttttttagaaatggtgcaaactctaccaccacacattaaatccactgttagcgtccagatcataccgtgccagtatcttttgcagccagtgaagcatgaagatagggaaatctatccgcaacatctgaagagccttgcattctccgccttcacccaatgtaggcgccctttgcctacatctacaaacgttaaaacccttaccgggttcggacccggattggccatggaaacagccctccgttctcccgacagacctgagtgcatccggctgtatgctcccccctttattctcgcacccgtcaaggacaaacagactgaactgggagagacctttggggaagctgggcaaaagtataatgtcctgtttgttggctattgtttgtctcatgatcagcgctggattttagctagctgcacagacttgtacggcgagttactggagacatgcatcatcaacattgacgtgcccaacagagctagaaggaagaagtcatccgctcgaaaattcggcctacaaaaactgtgggaatggtgtctaggcctggtccagatgtcgtctctaccctggagagtggtcattgggcggctcggtcgcatcgggcatggcgaactcaaggactggtcgtgtctcttgagtagacggaacctgcagtccctgagtaaacgccttaaggatatgtgtaggatgtgcggcatcagcgccgcggactctccaagtatattgagcgcttgcctcgtagctatggagccacagggcagttttgttattatgcccgattctgtctcaactggatctgtctttggcaggtcgacgaccttgaatatgcagacctcccagctgaacaccccccaggatacttcctgtactcatatcttagtgtttcctacttcagcatcggtacaggtggcatctgctacctacaccaccgaaaatctcgacctggcgttcaaccccaacaatgatggtgctgatgggatgggcatcttcgacctcctcgacaccggagatgacctcgatcctgacatcatcaatatactccctgcgtctccaaccggcagccccgtccacagtccaggctcccactatccgcatggaggtgatgccggaaaagggcagtccaccgaccgtctcctgtctaccgagcctcatgaagaggtgccgaacatattacagcagcctcttgctttggggtatttcgtcagcacagctaaagccggccccctgcccgattggttctggtctgcatgcccacaggcccagtaccagtgtccattattcctcaaagcctccctacacttgcacgttccgtcggtgcagtcagacgaactactacattcaaaacactcacacccgttggactctaaccagacctccgatgtgctgcggtttgtcctcgaacagtataatgctttatcttggcttacttgtgatcccgctacccaggatcggcgctcatgtttacctatacacttcgtcgtgctgaaccagttgtacaattttatcatgaatatgctgtag

SEQ ID NO: 152989 - DNA, 6525 bp, Artificial Sequence
  derived and/or modified sequence
atgtcggcctccttcgttcctaatggggctagcttggaggattgccactgcaatcttttttgtttggccgacctgacagggatcaaatggaagaagtatgtgtggcagggtccaacctccgctcctattctgtttccagtgaccgaggaggaccctattctgagctcgttttctaggtgtctgaaggctgacgtgctgggcgtgtggagaagagaccaacgtccaggacggagagagctgtggatcttttggtggggagaggatccaagcttcgccgatctgatacaccacgacctgtccgaggaagaagacggtgtgtgggagaacggactatcctacgaatgccggactttgctgttcaaggcagtgcacaatttactcgaacggtgcctcatgaaccgaaatttcgtacgcatcggaaagtggttcgtcaagccttacgaaaaggatgagaagccaattaataaaagcgagcacctgagttgctctttcacgttcttcttacatggtgacagtaacgtttgcaccagcgtggagattaaccagcaccagccagtttatcttttgagcgaggaacacattacgctggctcagcagagtaactccccctttcaggtgattctgtgccctttcggtctcaatggcactctgacaggccaggctttcaagatgtccgactccgcgactaaaaagcttatcggagagtggaaacagttttatcctatttcttgctgcctcaaggagatgtctgaggagaagcaagaagacatggactgggaggatgacagtctcgcagccgtggaggtgctcgtggccggcgtgaggatgatttacccggcttgtttcgtcctggtgccccagtcggatataccgacaccttctccagttggttctacacactgctcgagcagctgtctcggagtgcaccaagtgcccgcgtccacccgggatcctgccatgtccagtgtcactcttacacctcccaccagccctgaggaggtccagacagtggatccccagtccgtgcagaaatgggtaaagttcagtagcgtgagtgacggatttaattctgactcaacctcgcatcacggcggcaagatacctagaaagcttgcaaatcacgttgtcgatagggtgtggcaagaatgcaacatgaacagggcacagaataaacgcaagtactccgcaagcagcggtggcctgtgcgaggaagccaccgccgcaaaagtggcaagttgggatttcgtggaagccacacagcgaaccaattgttcatgtctccggcacaagaaccttaaatcccgtaacgccggtcagcaaggccaggctccctctctggggcaacagcagcagattctgccaaagcacaagacaaatgaaaaacaagagaagagcgagaaaccccagaagcgaccactgacaccattccaccatagagtcagcgtcagtgacgatgtcgggatggatgctgactctgccagccaacggttagtaatctcagccccagacagccaagtgagattttctaacatcagaacgaacgatgttgcgaagacacctcaaatgcatggcaccgagatggccaatagccctcagcccccaccgctcagcccccatccctgtgacgtggtagatgagggagtaaccaaaaccccctcgacgccccagagccagcacttctatcagatgcccactcctgatcccctagttccctctaagcccatggaggataggatcgacagtctaagtcagtctttcccacctcagtaccaagaagccgtggaacctaccgtgtacgtaggcactgccgtcaatctggaggaggatgaagctaacatagcctggaaatattacaaatttccgaagaagaaagatgttgaatttctgcctccccaactgcctagcgacaagttcaaagatgaccctgtgggcccattcgggcaagaaagcgtgacctccgtaactgaactcatggtgcagtgcaaaaaaccactgaaggttagcgacgagctcgtacaacagtatcagattaagaatcaatgtctgagtgcgatagcgtctgacgctgaacaggaacccaagatcgatccttatgcctttgtagaaggcgacgaggaatttctgtttcccgataagaaggaccgccagaattccgagagggaggctggtaagaaacataaagttgaggacggtaccagcagtgtcaccgtcctctcgcatgaggaagatgctatgtccctgtttagtccgtcaattaagcaggacgccccacgccctactagtcacgcgcggccccccagcacatctctgatatatgactctgatctcgctgtgagttacacggaccttgacaacctgttcaactccgacgaagatgaactgacccccgggagtaaaaagtccgccaatgggagtgacgacaaggcctcctgtaaggaatctaaaaccggcaacctggatcccctctcctgtatttccaccgcagacttacataaaatgtacccgaccccaccctctctggagcagcacatcatgggcttttccccaatgaacatgaataataaggagtatggcagtatggatactacacctgggggcacagtgctcgaagggaattccagtagcataggagcccaatttaaaatcgaagtagacgaaggcttctgttccccaaagccttccgaaattaaagacttctcttatgtctacaaaccagagaactgtcagattttagtgggctgctccatgttcgcaccactcaagactttaccatcacaatacctgcctccaatcaaattgcctgaggaatgcatctatcgccagtcctggaccgtgggcaaactcgaactgctgtcgtccgggccctccatgcccttcattaaggagggtgatggatcgaatatggatcaggagtacgggaccgcgtatacccctcagacccatacctcgttcggcatgccgcccagtagtgcaccaccgtccaactccggcgccggtatactgcctagtccctctacacctagattcccaacgcctcgcacaccacgcaccccacgcactcctcgcggagccggaggccctgcatccgcccaggggtcagtcaaatatgagaactccgacctgtatagccccgcttccaccccatctacgtgcagacccttgaattccgtcgagcccgcaacggtccctagcattccagaggcccactcactctacgtaaacctgatcttaagtgagagcgtaatgaacctgttcaaagattgcaactttgatagttgctgtatttgtgtgtgcaacatgaacatcaaaggagctgacgtgggtgtctacataccagatccaactcaggaggcccagtaccgctgcacatgcggattctctgccgtgatgaacaggaaattcggcaataacagcggcttgttcctcgaagatgagctggacatcattgggcgtaacaccgactgtggaaaagaggcagaaaagcgtttcgaagcactaagagctacatcagccgaacatgtcaatggcggtctgaaagaatccgagaagctcagtgacgatctgatcctgctgcttcaggatcagtgcaccaacctcttcagcccctttggagcagccgatcaggatccattccctaagtcgggtgttatcagcaattgggtgcgagtggaagagcgtgactgttgtaacgattgctacttggccctcgaacacggcagacagttcatggataatatgtcgggcggaaaggtcgacgaagcactcgtaaagtctagctgcctgcacccttggagcaagagaaacgatgtttccatgcagtgctcccaggacatccttagaatgctcttatcactgcagccagtgctgcaagatgctattcagaaaaagcggacagtcagaccatggggtgtccaggggcctctcacctggcagcagtttcacaagatggcggggcgggggagctatgggacggatgaatctccagaacccctgcccatcccgacattccttttgggatatgattacgattatctcgttttatcgccctttgccctgccctattgggagagactcatgctcgaaccctatggatcccagcgcgatatagcatacgttgtcctgtgtcccgagaatgaggccctgcttaacggggccaagtccttcttccgcgatctgaccgccatttacgagtcttgtaggctcggccagcacagaccagtgtccagactgctcaccgacgggattatgcgcgttggaagcacggcaagcaaaaagttgagcgaaaaactggttgcagagtggttctcgcaagccgccgatggtaacaatgaggcattctccaaactcaagctctacgcccaggtatgccgctacgatttaggaccgtatttagccagccttcccctggactcctcgctcctttcccaaccaaatctggtcgcccctacgtctcagtcccttattactccacctcagatgaccaacacaggcaatgccaatacaccctccgccactttagcatccgcggctagcagtacaatgaccgttaccagcggcgtcgccatcagtacttctgtggcaacagctaacagcaccctaacgaccgcaagcacatcaagttcctcgagctcaaaccttaattctggagtgtcttcaaacaagctaccgtcatttcctccgttcggtagcatgaattctaatgccgccggttctatgtcaactcaggcgaataccgtccagtcaggtcaactcggaggacagcaaacatctgcactccagaccgcaggcatctcgggagagtccagttcactcccgacccagccgcaccccgatgttagtgagagcacaatggaccgcgataaagtcggcattccaactgacggagatagtcacgcagttacctatccaccagccattgtcgtgtacattatcgatccattcacctacgagaataccgatgaaagcacaaatagttcaagtgtgtggactctgggcctcctcagatgtttcttagaaatggtccagacattgcctcctcatatcaaatctactgtttcagttcagattattccgtgtcagtaccttcttcaacctgtcaaacacgaggaccgagagatctacccccagcacttgaagagcctggcattttcagcctttacccagtgtcggcggccacttcctaccagcacaaacgtgaagacactgactgggttcggccctggcctggctatggaaaccgcactgcgatcccccgataggccagaatgcatccggctgtatgcgccccccttcatcctggcaccggtgaaggacaagcaaaccgagctgggtgaaacctttggagaagctggccagaaatacaacgtgctgttcgtcggctactgcctttctcatgaccagcgctggatcctcgctagttgcacggatctgtacggtgagctgttagagacctgcatcatcaatatcgatgttccaaaccgggcacgtcgcaagaaaagcagcgcacgcaaatttgggctgcagaagttgtgggaatggtgcctgggcctggtccagatgtcttccctgccttggcgtgttgtgattggacggctgggtcgcataggacacggggagctgaaggactggtcatgtctgctgtcacgaagaaacttgcaatccttgtctaaacggttgaaagacatgtgcagaatgtgtggaatctctgccgccgactcccccagcatcctctctgcttgtctagttgccatggagccccagggctcattcgtaataatgccggacagtgtgagtactggctctgtcttcggcaggagtactactctcaatatgcagacctcacaactgaataccccacaggacactagctgcactcatattcttgtgttccccacctcagcttcagtccaggtggcttctgcaacatacactactgagaatttggacctggcctttaaccctaacaatgacggagccgacggcatgggaatctttgacctcctggacaccggcgacgacctcgacccagacatcattaatatactgcccgcatcacccactggaagcccagtccatagccccgggagccactacccacatgggggcgatgctggaaaaggccagagcacagacaggttactgtcaacggagcctcacgaggaggtgccaaacattctgcagcagcctctcgccttaggatactttgtttctactgcgaaagctggcccgctaccagattggttctggtctgcttgcccacaggcacaataccagtgtccactgtttttaaaggctagcctccacctccatgtgccttccgtgcaatccgatgaactgcttcacagtaagcattcccacccactcgactccaatcagacaagcgacgtactgagatttgtgcttgaacaatacaatgcccttagttggctgacctgcgacccagcaacacaggacaggcgtagttgcctgcccatccacttcgttgtcctgaaccagctgtataactttattatgaacatgctgtag

SEQ ID NO: 152990 - DNA, 6522 bp, Artificial Sequence
  derived and/or modified sequence
atgtctgccagctttgtgcccaacggggccagcctggaggactgccactgcaacctcttctgcctggccgacctgaccggcatcaagtggaagaagtatgtgtggcagggccccaccagcgcccccatcctcttccctgtgacagaggaggaccccatcctgagcagcttcagccgctgcctgaaggcagatgtgctgggcgtgtggaggcgggaccagaggcctggaagaagagagctgtggatcttctggtggggagaagatcctgtgctgctgaccctcttcaccatgacctaccagaagaagaagatggagtgtggccgcatggacttccccatgaatgctgtgctgtgcttccaggccgtgcacaacctgctggagcgctgcctgatgaacagaaactttgtgcgcatcggcaagtggtttgtgaagccctatgagaaggatgagaagcccatcaacaagtctgagcacctgagctgcagcttcaccttcttcctgcacggggacagcaatgtgtgcacctctgtggagatcaaccagcaccagcctgtgtacctgctgtctgaggagcacatcaccctggcccagcagagcaacagccccttccaggtgatcctgtgccccttcggcctgaatggcaccctgaccggccaggccttcaagatgtctgacagcgccaccaagaagctgattggagagtggaagcagttctaccccatcagctgctgcctgaaggagatgtctgaggagaagcaggaggacatggactgggaggatgacagcctggccgctgtggaggtgctggtggccggcgtgaggatgatctacccagcctgctttgtgctggtgccccagagcgacatccccacccccagccctgtgggcagcacccactgcagcagcagctgcctgggcgtgcaccaggtgcctgccagcacccgggaccctgccatgagctctgtgaccctgaccccacccaccagccctgaggaggtgcagacagtggacccccagagcgtgcagaagtgggtgaagttcagctctgtgtctgatggcttcaacagcgacagcaccagccaccacggcggcaagatccccaggaagctggccaaccacgtggtggacagagtgtggcaggagtgcaacatgaacagagcccagaacaagaggaagtacagcgccagcagcggcggcctgtgtgaggaggccacagctgccaaggtggcctcctgggactttgtggaggccacccagaggaccaactgcagctgcctgcggcacaagaacctgaagagcagaaatgccggccagcagggccaggcccccagcctgggccagcagcagcagatcctgcccaagcacaagaccaatgagaagcaggagaagtctgagaagccccagaagaggcccctgacccccttccaccaccgggtgtctgtgtctgatgatgtgggcatggatgctgacagcgccagccagaggctggtgatcagcgccccagacagccaggtgcgcttcagcaacatccgcaccaatgatgtggccaagaccccccagatgcacggcacagagatggccaacagcccccagcccccacccctgagcccccacccctgtgatgtggtggatgagggcgtgaccaagacccccagcaccccccagagccagcacttctaccagatgcccaccccagaccccctggtgcccagcaagcccatggaggacagaattgacagcctgagccagagcttccccccccagtaccaggaggccgtggagcccaccgtgtatgtgggcacagctgtgaacctggaggaggatgaggccaacatcgcctggaagtactacaagttccccaagaagaaggatgtggagttcctgcccccccagctgcccagcgacaagttcaaggatgatcctgtgggccccttcggccaggagagcgtgacctctgtgacagagctgatggtgcagtgcaagaagcccctgaaggtgtctgatgagctggtgcagcagtaccagatcaagaaccagtgcctgagcgccatcgccagtgatgctgagcaggagcccaagattgacccctatgcctttgtggagggagatgaggagttcctgttcccagacaagaaggaccggcagaacagcgagcgggaggccggcaagaagcacaaggtggaggatggcaccagctctgtgacagtgctgagccatgaagaagatgccatgagcctcttcagccccagcatcaagcaggatgccccccggcccaccagccacgcccggccccccagcaccagcctcatctatgacagcgacctggccgtgtcctacacagacctggacaacctcttcaacagtgatgaagatgagctgaccccaggcagcaagaagagcgccaacggcagtgatgacaaggccagctgcaaggagagcaagacaggcaacctggaccccctgagctgcatcagcacagctgacctgcacaagatgtaccccaccccacccagcctggagcagcacatcatgggcttcagccccatgaacatgaacaacaaggagtatggctccatggacaccaccccaggcggcaccgtgctggagggcaacagcagcagcattggagcccagttcaagattgaggtggatgagggcttctgcagccccaagcccagcgagatcaaggacttctcctatgtgtacaagccagagaactgccagatcctggtgggctgcagcatgtttgcccccctgaagaccctgcccagccagtacctgccccccatcaagctgcctgaggagtgcatctaccggcagagctggacagtgggcaagctggagctgctgagcagcggccccagcatgcccttcatcaaggagggagatggcagcaacatggaccaggagtatggaacagcctacaccccccagacccacaccagctttggcatgccacccagcagcgccccacccagcaacagcggggccggcatcctgcccagccccagcaccccccgcttccccacccccaggacccccaggacccccaggaccccaagaggagctgggggccctgccagcgcccagggctctgtgaagtatgagaacagcgacctgtacagccctgccagcacccccagcacctgccggcccctgaacagcgtggagcccgccaccgtgcccagcatccctgaggcccacagcctgtatgtgaacctgatcctgtctgagagcgtgatgaacctcttcaaggactgcaactttgacagctgctgcatctgtgtgtgcaacatgaacatcaagggagcagatgtgggcgtgtacatcccagaccccacccaggaggcccagtaccgctgcacctgtggcttctctgctgtgatgaacaggaagtttggaaacaacagcggcctcttcctggaggatgagctggacatcatcggcaggaacacagactgtgggaaggaggccgagaagagatttgaggccctgcgggccaccagcgctgagcacgtgaatggaggcctgaaggagagcgagaagctgagtgatgacctgatcctgctgctgcaggaccagtgcaccaacctcttcagcccctttggagctgctgaccaggaccccttccccaagtctggagtcatcagcaactgggtgcgggtggaggagcgggactgctgcaatgactgctacctggccctggagcacggccggcagttcatggacaacatgtctgggggcaaggtggatgaggccctggtgaagagcagctgcctgcacccctggagcaagagaaatgatgtgtccatgcagtgcagccaggacatcctgaggatgctgctgagcctgcagcctgtgctgcaggatgccatccagaagaagaggacagtgcggccctggggcgtgcagggccccctgacctggcagcagttccacaagatggccggccggggcagctatggaacagatgagagccctgagcccctgcccatccccaccttcctgctgggctatgactatgactacctggtgctgagcccctttgccctgccctactgggagcggctgatgctggagccctacggcagccagagggacatcgcctacgtggtgctgtgcccagaaaatgaggccctgctgaatggagccaagagcttcttccgggacctgacagccatctatgagagctgccgcctgggccagcacaggcctgtgtcccggctgctgacagatggcatcatgagggtgggcagcacagccagcaagaagctgtctgagaagctggtggccgagtggttcagccaggccgcagatggcaacaatgaggccttcagcaagctgaagctgtatgcccaggtgtgccgctatgacctgggcccctacctggccagcctgcccctggacagcagcctgctgagccagcccaacctggtggcccccaccagccagagcctcatcaccccaccccagatgaccaacacaggaaatgccaacacccccagcgccaccctggccagcgctgccagcagcaccatgacagtgaccagcggcgtggccatcagcacctctgtggccacagccaacagcaccctgaccacagccagcaccagcagcagcagcagcagcaacctgaacagcggcgtgagcagcaacaagctgcccagcttcccccccttcggctccatgaacagcaatgctgctggctccatgagcacccaggccaacacagtgcagagcggccagctgggcggccagcagaccagcgccctgcagacagctggcatctctggagagagcagcagcctgcccacccagccccacccagatgtgtctgagagcaccatggaccgggacaaggtgggcatccccacagatggagacagccatgctgtgacctaccccccagccatcgtggtgtacatcatcgaccccttcacctatgaaaatacagatgagagcaccaacagcagctctgtgtggaccctgggcctgctgcgctgcttcctggagatggtgcagaccctgcccccccacatcaagagcacagtgtctgtgcagatcatcccctgccagtacctgctgcagcctgtgaagcatgaagatcgggagatctacccccagcacctgaagagcctggccttcagcgccttcacccagtgccggcggcccctgcccaccagcaccaacgtgaagaccctgactggatttggacctggcctggccatggagacagccctgcggagcccagacaggcctgagtgcatccggctgtatgccccacccttcatcctggcccctgtgaaggacaagcagacagagctgggggagacctttggagaggccggccagaagtacaacgtgctgtttgtgggctactgcctgagccatgaccagcgctggatcctggccagctgcacagacctgtatggagagctgctggagacctgcatcatcaacattgatgtgcccaacagagcccggaggaagaagagcagcgccaggaagtttggcctgcagaagctgtgggagtggtgcctgggcctggtgcagatgagcagcctgccctggagggtggtgattggccgcctgggcagaattggacatggagagctgaaggactggagctgcctgctgagcagaagaaacctgcagagcctgagcaagaggctgaaggacatgtgcaggatgtgtggcatctctgctgctgacagccccagcatcctgagcgcctgcctggtggccatggagccccagggcagctttgtgatcatgccagacagcgtgtccactggatctgtgtttggccgcagcaccaccctgaacatgcagaccagccagctgaacaccccccaggacaccagctgcacccacatcctggtgttccccaccagcgcctctgtgcaggtggccagcgccacctacaccacagagaacctggacctggccttcaaccccaacaatgatggagcagatggcatgggcatctttgacctgctggacacaggagatgacctggaccctgacatcatcaacatcctgcctgccagccccaccggcagccctgtgcacagccctggcagccactacccccacggcggagatgctgggaagggccagagcacagaccggctgctgagcacagagccccatgaggaggtgcccaacatcctgcagcagcccctggccctgggctactttgtgtccacagccaaggccggccccctgcctgactggttctggagcgcctgcccccaggcccagtaccagtgccccctcttcctgaaggccagcctgcacctgcacgtgcccagcgtgcagagtgatgagctgctgcacagcaagcacagccaccccctggacagcaaccagaccagtgatgtgctgcgctttgtgctggagcagtacaatgccctgtcctggctgacctgtgaccctgccacccaggacagaagaagctgcctgcccatccactttgtggtgctgaaccagctgtacaacttcatcatgaacatgctgtag

SEQ ID NO: 152991 - DNA, 6525 bp, Artificial Sequence
  derived and/or modified sequence
atgtctgccagctttgtgcccaacggggccagcctggaggactgccactgcaacctcttctgcctggccgacctgaccggcatcaagtggaagaagtatgtgtggcagggccccaccagcgcccccatcctcttccctgtgacagaggaggaccccatcctgagcagcttcagccgctgcctgaaggcagatgtgctgggcgtgtggaggcgggaccagaggcctggaagaagagagctgtggatcttctggtggggcgaggaccccagctttgctgacctgatccaccacgacctgtctgaggaggaggatggagtgtgggagaatggcctgtcctatgagtgcaggaccctgctcttcaaggctgtgcacaacctgctggagcgctgcctgatgaacagaaactttgtgagaattggcaagtggtttgtgaagccctatgagaaggatgagaagcccatcaacaagtctgagcacctgagctgcagcttcaccttcttcctgcatggagacagcaatgtgtgcacctctgtggagatcaaccagcaccagcctgtgtacctgctgtctgaggagcacatcaccctggcccagcagagcaacagccccttccaggtgatcctgtgccccttcggcctgaatggcaccctgaccggccaggccttcaagatgtctgattctgccaccaagaagctgattggagagtggaagcagttctaccccatcagctgctgcctgaaggagatgtctgaggagaagcaggaggacatggactgggaggatgacagcctggccgctgtggaggtgctggtggccggcgtgaggatgatctacccagcctgctttgtgctggtgccccagagcgacatccccacccccagccctgtgggcagcacccactgcagcagcagctgcctgggcgtgcaccaggtgcctgccagcacccgggaccctgccatgagctctgtgaccctgaccccacccaccagccctgaggaggtgcagacagtggacccccagagcgtgcagaagtgggtgaagttcagctctgtgtctgatggcttcaacagcgacagcaccagccaccacggcggcaagatccccaggaagctggccaaccacgtggtggacagagtgtggcaggagtgcaacatgaacagagcccagaacaagaggaagtacagcgccagcagcggcggcctgtgtgaggaggccacagctgccaaggtggcctcctgggactttgtggaggccacccagaggaccaactgcagctgcctgcggcacaagaacctgaagagcagaaatgccggccagcagggccaggcccccagcctgggccagcagcagcagatcctgcccaagcacaagaccaatgagaagcaggagaagtctgagaagccccagaagaggcccctgacccccttccaccaccgggtgtctgtgtctgatgatgtgggcatggatgctgacagcgccagccagaggctggtgatcagcgccccagacagccaggtgcgcttcagcaacatccgcaccaatgatgtggccaagaccccccagatgcatggaacagagatggccaacagcccccagcccccacccctgagcccccacccctgtgatgtggtggatgaaggagtgaccaagacccccagcaccccccagagccagcacttctaccagatgcccaccccagaccccctggtgcccagcaagcccatggaggacagaattgacagcctgagccagagcttccccccccagtaccaggaggccgtggagcccaccgtgtatgtgggcacagctgtgaacctggaggaggatgaggccaacatcgcctggaagtactacaagttccccaagaagaaggatgtggagttcctgcccccccagctgcccagcgacaagttcaaggatgatcctgtgggccccttcggccaggagagcgtgacctctgtgacagagctgatggtgcagtgcaagaagcccctgaaggtgtctgatgagctggtgcagcagtaccagatcaagaaccagtgcctgagcgccatcgccagtgatgctgagcaggagcccaagattgacccctatgcctttgtggagggagatgaggagttcctgttcccagacaagaaggaccggcagaacagcgagcgggaggccggcaagaagcacaaggtggaggatggcaccagctctgtgacagtgctgagccatgaggaggatgccatgagcctcttcagccccagcatcaagcaggatgccccccggcccaccagccacgcccggccccccagcaccagcctcatctatgacagcgacctggccgtgtcctacacagacctggacaacctcttcaacagtgatgaagatgagctgaccccaggcagcaagaagagcgccaatggaagtgatgacaaggccagctgcaaggagagcaagacaggcaacctggaccccctgagctgcatcagcacagctgacctgcacaagatgtaccccaccccacccagcctggagcagcacatcatgggcttcagccccatgaacatgaacaacaaggagtatggctccatggacaccacccctgggggcaccgtgctggagggcaacagcagcagcatcggggcccagttcaagattgaggtggatgagggcttctgcagccccaagcccagcgagatcaaggacttctcctatgtgtacaagccagagaactgccagatcctggtgggctgcagcatgtttgcccccctgaagaccctgcccagccagtacctgccccccatcaagctgcctgaggagtgcatctaccggcagagctggacagtgggcaagctggagctgctgagcagcggccccagcatgcccttcatcaaggagggagatggcagcaacatggaccaggagtatggaacagcctacaccccccagacccacaccagctttggcatgccacccagcagcgccccacccagcaacagcggggccggcatcctgcccagccccagcaccccccgcttccccacccccaggacccccaggacccccaggacccccaggggggccggcggccctgccagcgcccagggctctgtgaagtatgaaaattctgacctgtacagccctgccagcacccccagcacctgccggcccctgaacagcgtggagcccgccaccgtgcccagcatccctgaggcccacagcctgtatgtgaacctgatcctgtctgagagcgtgatgaacctcttcaaggactgcaactttgacagctgctgcatctgtgtgtgcaacatgaacatcaagggagcagatgtgggcgtgtacatcccagaccccacccaggaggcccagtaccgctgcacctgtggcttctctgctgtgatgaacaggaagtttggaaacaacagcggcctcttcctggaggatgagctggacatcattggaagaaacacagactgtgggaaggaggccgagaagagatttgaggccctgcgggccaccagcgctgagcacgtgaatggaggcctgaaggagagcgagaagctgagtgatgacctgatcctgctgctgcaggaccagtgcaccaacctcttcagcccctttggagctgctgaccaggaccccttccccaagagcggggtcatcagcaactgggtgcgggtggaggagcgggactgctgcaatgactgctacctggccctggagcacggccggcagttcatggacaacatgtctgggggcaaggtggatgaggccctggtgaagagcagctgcctgcacccctggagcaagagaaatgatgtgtccatgcagtgcagccaggacatcctgaggatgctgctgagcctgcagcctgtgctgcaggatgccatccagaagaagaggacagtgcggccctggggcgtgcagggccccctgacctggcagcagttccacaagatggccggccggggcagctatggaacagatgagagccctgagcccctgcccatccccaccttcctgctgggctatgactatgactacctggtgctgagcccctttgccctgccctactgggagcggctgatgctggagccctacggcagccagagggacatcgcctacgtggtgctgtgcccagaaaatgaggccctgctgaatggagccaagagcttcttccgggacctgacagccatctatgagagctgccgcctgggccagcacaggcctgtgtcccggctgctgacagatggcatcatgagggtgggcagcacagccagcaagaagctgtctgagaagctggtggccgagtggttcagccaggccgcagatggcaacaatgaggccttcagcaagctgaagctgtatgcccaggtgtgccgctatgacctgggcccctacctggccagcctgcccctggacagcagcctgctgagccagcccaacctggtggcccccaccagccagagcctcatcaccccaccccagatgaccaacacaggaaatgccaacaccccatctgccaccctggccagcgctgccagcagcaccatgacagtgaccagcggcgtggccatcagcacctctgtggccacagccaacagcaccctgaccacagccagcaccagcagcagcagcagcagcaacctgaacagcggcgtgagcagcaacaagctgcccagcttccccccatttggctccatgaacagcaatgctgctggctccatgagcacccaggccaacacagtgcagagcggccagctgggcggccagcagaccagcgccctgcagacagctggcatcagcggggagagcagcagcctgcccacccagccccacccagatgtgtctgagagcaccatggaccgggacaaggtgggcatccccacagatggagacagccatgctgtgacctaccccccagccatcgtggtgtacatcatcgaccccttcacctatgagaacacagatgagagcaccaacagcagctctgtgtggaccctgggcctgctgcgctgcttcctggagatggtgcagaccctgcccccccacatcaagagcacagtgtctgtgcagatcatcccctgccagtacctgctgcagcctgtgaagcatgaggaccgggagatctacccccagcacctgaagagcctggccttcagcgccttcacccagtgcagaagacccctgcccaccagcaccaacgtgaagaccctgaccggcttcggccctggcctggccatggagacagccctgcggagcccagacaggcctgagtgcatccggctgtatgccccacccttcatcctggcccctgtgaaggacaagcagacagagctgggggagaccttcggggaggccggccagaagtacaacgtgctgtttgtgggctactgcctgagccatgaccagcgctggatcctggccagctgcacagacctgtatggagagctgctggagacctgcatcatcaacattgatgtgcccaacagagcccggaggaagaagagcagcgccaggaagtttggcctgcagaagctgtgggagtggtgcctgggcctggtgcagatgagcagcctgccctggagggtggtgattggccgcctgggccgcatcggccacggggagctgaaggactggagctgcctgctgagcagaagaaacctgcagagcctgagcaagaggctgaaggacatgtgcaggatgtgtggcatctctgctgctgacagccccagcatcctgagcgcctgcctggtggccatggagccccagggcagctttgtgatcatgccagattctgtgtccacaggctctgtgtttggccgcagcaccaccctgaacatgcagaccagccagctgaacaccccccaggacaccagctgcacccacatcctggtgttccccaccagcgcctctgtgcaggtggccagcgccacctacaccacagagaacctggacctggccttcaaccccaacaatgatggagcagatggcatgggcatctttgacctgctggacacaggagatgacctggaccctgacatcatcaacatcctgcctgccagccccaccggcagccctgtgcacagccctggcagccactacccccatggaggagatgctgggaagggccagagcacagaccggctgctgagcacagagccccatgaggaggtgcccaacatcctgcagcagcccctggccctgggctactttgtgtccacagccaaggccggccccctgcctgactggttctggagcgcctgcccccaggcccagtaccagtgccccctcttcctgaaggccagcctgcacctgcacgtgcccagcgtgcagagtgatgagctgctgcacagcaagcacagccaccccctggacagcaaccagaccagtgatgtgctgcgctttgtgctggagcagtacaatgccctgtcctggctgacctgtgaccctgccacccaggaccggcgcagctgcctgcccatccactttgtggtgctgaaccagctgtacaacttcatcatgaacatgctgtag

SEQ ID NO: 152992 - DNA, 7386 bp, Artificial Sequence
  derived and/or modified sequence
gtttctctctctggtcggaggcggcggtaatggcggatggtgggttgtggcgccggcggcggctgctgtgagggacgatgagtgcctccttcgtgccgaacggggccagcctggaagattgtcactgtaacctcttctgcctggctgacttgacaggaattaagtggaaaaaatatgtatggcaaggcccaacttctgcccctattctgtttcctgtgacagaagaagaccccattttgagcagttttagtcgctgccttaaggcagatgtacttggtgtttggcggcgagatcaaagacctggaagaagagaattgtggatattttggtggggtgaagacccagttttgctgaccttattcaccatgacttatcagaagaagaagatggagtgtgggagaatggactttcctatgaatgccgtactctgctttcaagcagttcacaatctattggaacggtgtttaatgaacaggaattttgtacgtattggcaagtggtttgtaaagccttatgaaaaagatgaaaaacctataaataaaagtgaacacttgtcctgctccttcacctttttcttgcatggagacagcaatgtttgtaccagtgtggaaattaaccaacatcaacctgtataccttctcagtgaagagcatatcacccttgctcaacagtctaatagcccatttcaagttatcttatgcccatttggactaaatggcactctcacaggacaggcattcaagatgtctgattcagctacaaaaaaattaattggtgaatggaaacagttctatcctatctcatgttgcttgaaggagatgtctgaagaaaaacaggaagatatggattgggaagatgattctttagctgcagtagaagttcttgttgctggtgtccgaatgatctacccagcatgctttgttctagtccctcagtcagacattcctactcctagccctgtgggatccactcactgttcatcttcttgcttgggtgtccaccaagtgcctgcttccacaagagatcctgctatgtcttcggttacgcttacaccacctacgtctcctgaggaagtccaaacagttgatcctcagtctgtccagaagtgggtcaaattttcttcagtatctgatggcttcaactccgatagtactagccaccatggtgggaaaatacccagaaaattagcaaatcatgtggtggatagagtttggcaagaatgcaatatgaacagagcacagaacaagaggaagtattctgcttcatcaggtggtctatgcgaagaagcgacagctgctaaagtggcatcctgggattttgttgaagccacacaaagaacaaattgcagttgtttgaggcacaaaaatctcaagtcaagaaatgctggacaacaaggacaggcaccatctttaggtcagcaacaacaaatacttcctaagcacaagaccaatgagaagcaagaaaagagtgaaaagccacagaaacgccccttgactccttttcaccatcgtgtgtctgttagtgatgatgttggcatggacgcagattcagccagccaaagacttgtgatctctgctccagacagtcaagtgagattttcaaatatccgaactaatgatgtagcaaagactcctcagatgcatggcaccgaaatggcaaattcacctcaaccacccccacttagtcctcacccttgtgatgtggttgatgaaggagtgactaaaacaccttcaactcctcagagtcaacatttttatcaaatgccaacaccagatcccttggttccttctaaaccaatggaagataggatagacagtttgtcccagtctttcccacctcaatatcaggaagctgtagaacctacagtatatgttggtacagcagtaaacttggaagaagatgaagccaatatagcctggaagtattacaagttcccaaagaaaaaagatgtagagtttttaccacctcaacttccaagtgataaattcaaggatgatccagttggaccttttggacaggaaagtgtaacatcagttacagagttaatggtgcaatgtaagaaacctttaaaagtttctgatgaattagtgcagcaatatcaaattaaaaaccagtgtctttcagcaatagcatctgatgcagaacaagaacctaaaattgatccatatgcatttgttgaaggagatgaggaattcctttttcctgataaaaaagatagacaaaatagtgagagagaagctggaaaaaaacacaaggtagaagatgggacatctagtgtaacagtgttatcacatgaagaagatgctatgtcattatttagtccctctatcaagcaagatgctccacgccctactagtcatgcccgtcctccatcaacaagtttgatttatgactcagacctggctgtctcttatactgaccttgataatctcttcaattctgatgaagatgaactaacacctggatctaaaaaatcagcaaatggatcagatgataaagccagctgcaaggaatcaaagacaggaaatctggacccgttatcttgcataagcactgcagatcttcataaaatgtatcctacaccaccatcattggaacaacatattatgggattttccccaatgaatatgaataataaagaatatggtagtatggatacaacacctggaggaactgttctagaaggaaatagttctagtataggagcgcagttcaaaattgaggttgatgagggattctgtagccccaaaccttctgaaattaaagatttttcttatgtctataagcctgaaaattgtcaaattctagtgggatgttccatgtttgcacctctaaaaactctaccaagccaatatctgccccctatcaaattgccagaagagtgtatttaccgtcagagttggactgttggaaaattggaattgctttcttcagggccttcaatgccattcatcaaagagggtgatggaagtaatatggatcaagaatatggcactgcttatacacctcaaactcatacttcttttgggatgcctcctagcagtgcacctcctagtaacagcggagcaggaattcttccttctccatccacccctcggtttccaactccaaggactccaaggactcctcggactcctcgtggagctggtggacctgctagtgctcaaggttcagtcaaatatgaaaattcagacttgtattcaccagcttctaccccatctacatgcagaccccttaattctgttgaacctgcaactgtcccttccatccctgaagcacacagtctttatgtaaacctcatcctttcagaatcagttatgaatttgtttaaagactgtaactttgatagttgttgcatctgtgtttgcaacatgaacatcaagggtgccgatgttggagtttacattccagatccaacgcaggaagcacaatataggtgtacctgtggcttcagtgctgtcatgaacagaaaatttggaaacaattcaggattatttcttgaagatgaactagatatcataggacgcaatacagactgtggcaaagaagcagaaaaacgttttgaagctctcagggctacctctgctgaacatgttaatggaggactaaaggaatctgaaaaattatctgatgatttgatattattgctacaagatcagtgcactaatttattttcaccctttggagcagcagaccaagatccttttcctaaaagtggtgtaattagcaattgggtacgtgttgaagagcgtgactgttgcaatgactgctaccttgcattagaacatgggcgtcagttcatggataacatgtcaggaggaaaagttgatgaagcacttgtgaaaagttcatgcttacacccctggtccaaaagaaacgatgtgagtatgcagtgctcacaggatatacttcgaatgctcctctctcttcagccagttcttcaggatgccattcagaaaaaaagaacagtaagaccttggggtgttcagggtcctctcacttggcaacaatttcataaaatggctggccgaggctcttatggaactgatgaatccccagaaccactgccaatccccacatttttgttgggttatgattatgattatctggtgctttctccatttgctcttccttattgggagagacttatgctggaaccctatggatctcaaagagatatagcctatgttgtactgtgtccagaaaatgaagccttgttaaatggagcaaaaagcttttttagagatcttactgcaatatatgagtcctgtcgattaggtcaacatagacctgtttctcgactgttaacagatgggatcatgagagttggatctactgcatcaaagaaactatcagaaaagttggtagcagaatggttttctcaggcagctgacggtaacaatgaagcattttctaaactcaagctttatgcacaagtctgcagatatgacctaggtccttatcttgcttccctgccattggacagctctctactttcccagccaaatttagttgcccctacaagtcagtctttgattactccacctcagatgacaaatactggaaatgctaatactccatctgccaccttagcatctgcagcgagcagcactatgacagtgacttcaggtgttgccatatctacttcagttgccacagctaattcaactttgaccacagcttcaacttcatcttcatcatcctccaacttgaatagtggagtatcatcaaataaactaccttcgtttccaccctttggcagtatgaacagtaatgctgcaggatccatgtctacacaagcaaatacagttcagagtggtcagctaggagggcaacagacatcagctctacagacagctgggatttctggagaatcatcttcacttcccactcagccgcatcctgatgtgtctgaaagcacgatggatcgggataaagtgggaatccccacagatggtgattcacatgcagtcacgtatccacctgcaattgttgtttatataattgatccttttacatacgaaaatacagacgagagcactaactcttctagtgtgtggacattggggctacttcgatgctttctagaaatggtccagactcttcctcctcatatcaagagtactgtttctgtacagattattccttgtcagtacctgttgcaacctgtgaagcatgaagatagagaaatctatccccagcatttaaaatccctggctttttcggcctttacccagtgtcggaggccacttccaacatcaaccaatgtgaaaacattgactggctttggtccaggtttagccatggaaactgcccttagaagtcctgatagaccagagtgtattcgactttatgcacctccttttattctggctccagtgaaggacaaacagacagagctaggagaaacatttggagaagctggacagaaatataatgttctttttgtgggatactgtttatcacatgatcaaaggtggattcttgcatcttgcacagatctatatggagaacttttagaaacttgtatcattaacatcgatgttccaaatagggctcgtcggaaaaaaagttctgctagaaaatttggtctacagaaactttgggagtggtgcttaggacttgtacaaatgagttcattgccatggagagttgtaattggtcgtctaggaaggattggtcatggagaattgaaagattggagctgtttgctgagtcgtcgaaacttgcagtctctaagtaaaaggctcaaagacatgtgtagaatgtgtggtatatctgctgcagactcccctagcattctcagtgcttgcttggtggcaatggagccgcaaggctcttttgttattatgccagattctgtgtcaactggttctgtatttggaagaagcacgactctaaatatgcagacatctcagctaaataccccacaggatacatcatgtactcatatacttgtgtttcctacttctgcttctgtgcaagtagcttcagctacttataccactgaaaatttggatttagctttcaatcccaacaatgatggagcagatggaatgggtatctttgatttgttagacacaggagatgatcttgaccctgatatcattaatatccttcctgcttctccaactggttctcctgtacattctccaggatctcattacccccatggaggtgatgcgggcaagggtcagagtactgatcggctactatcaacagaacctcatgaggaagtacctaatattcttcagcaaccattggcccttggttactttgtatcaactgccaaagcaggtccattacctgactggttctggtcagcatgtcctcaagcacaatatcagtgtcccctttttcttaaggcctctttgcacctccacgtgccttcagtgcaatctgacgagctgcttcacagtaaacactcccacccacttgactcaaatcagacttcagatgtcctcaggtttgttttggaacagtacaatgcactctcctggctaacctgtgaccctgcaacccaggacagacgctcatgtctcccaattcattttgtggtgctgaatcagttatataactttattatgaatatgctgtgatcttcatttgatggaactgtgcaagaaaagaacaaggaaaaatggatgtttcgctgcaggattaagttacaattatcttctcagtgaaggtcatttgtgatggggtctaattcttattacttcaacaaatattgttttgacttggggggaggggctataaccctgctatttttcattgactctattgaactctttaggatgatgactgatcatacaaaacgtattataacattttcgtagcaaaattaaccttttttttttccagtcacagtatttgtgaaaagtaatgagccatagtacccagtcatgttaaatgaatattaaaagcatggagaggaaacatgaggaacaatgaatttcaacatatggcttcagaacatgaagatgttcttgtatggattatagtatctagtattcaaaaatgcctgcatctcttctcttatttattgtaagtttttaaatgtataaattgtcttatatttcttaacctcttttataaaaattttcctagaaggtttatactgccttcttgctttaaagcaattggtctaaaatatatgtaatcgtcttaattaaaaagttgcagtagggttgcttttagagtattatttttttgtaagggggtgggtgggacagtaaatttgtattgtctcgatgtacagtttaacggggatagagggggaataatgtccataccattgtgtgtggaggatttacagctaagctgtagttgcagagtacatgtacagtaatgaagttcactgtgtttataaattgaaaaggtacc

SEQ ID NO: 152993 - DNA, 10464 bp, Artificial Sequence
  derived and/or modified sequence
gtttctctctctggtcggaggcggcggtaatggcggatggtgggttgtggcgccggcggcggctgctgtgagggacgatgagtgcctccttcgtgccgaacggggccagcctggaagattgtcactgtaacctcttctgcctggctgacttgacaggaattaagtggaaaaaatatgtatggcaaggcccaacttctgcccctattctgtttcctgtgacagaagaagaccccattttgagcagttttagtcgctgccttaaggcagatgtacttggtgtttggcggcgagatcaaagacctggaagaagagaattgtggatattttggtggggtgaagaccccagttttgctgaccttattcaccatgacttatcagaagaagaagatggagtgtgggagaatggactttcctatgaatgccgtactctgcttttcaaagcagttcacaatctattggaacggtgtttaatgaacaggaattttgtacgtattggcaagtggtttgtaaagccttatgaaaaagatgaaaaacctataaataaaagtgaacacttgtcctgctccttcacctttttcttgcatggagacagcaatgtttgtaccagtgtggaaattaaccaacatcaacctgtataccttctcagtgaagagcatatcacccttgctcaacagtctaatagcccatttcaagttatcttatgcccatttggactaaatggcactctcacaggacaggcattcaagatgtctgattcagctacaaaaaaattaattggtgaatggaaacagttctatcctatctcatgttgcttgaaggagatgtctgaagaaaaacaggaagatatggattgggaagatgattctttagctgcagtagaagttcttgttgctggtgtccgaatgatctacccagcatgctttgttctagtccctcagtcagacattcctactcctagccctgtgggatccactcactgttcatcttcttgcttgggtgtccaccaagtgcctgcttccacaagagatcctgctatgtcttcggttacgcttacaccacctacgtctcctgaggaagtccaaacagttgatcctcagtctgtccagaagtgggtcaaattttcttcagtatctgatggcttcaactccgatagtactagccaccatggtgggaaaatacccagaaaattagcaaatcatgtggtggatagagtttggcaagaatgcaatatgaacagagcacagaacaagaggaagtattctgcttcatcaggtggtctatgcgaagaagcgacagctgctaaagtggcatcctgggattttgttgaagccacacaaagaacaaattgcagttgtttgaggcacaaaaatctcaagtcaagaaatgctggacaacaaggacaggcaccatctttaggtcagcaacaacaaatacttcctaagcacaagaccaatgagaagcaagaaaagagtgaaaagccacagaaacgccccttgactccttttcaccatcgtgtgtctgttagtgatgatgttggcatggacgcagattcagccagccaaagacttgtgatctctgctccagacagtcaagtgagattttcaaatatccgaactaatgatgtagcaaagactcctcagatgcatggcaccgaaatggcaaattcacctcaaccacccccacttagtcctcacccttgtgatgtggttgatgaaggagtgactaaaacaccttcaactcctcagagtcaacatttttatcaaatgccaacaccagatcccttggttccttctaaaccaatggaagataggatagacagtttgtcccagtctttcccacctcaatatcaggaagctgtagaacctacagtatatgttggtacagcagtaaacttggaagaagatgaagccaatatagcctggaagtattacaagttcccaaagaaaaaagatgtagagtttttaccacctcaacttccaagtgataaattcaaggatgatccagttggaccttttggacaggaaagtgtaacatcagttacagagttaatggtgcaatgtaagaaacctttaaaagtttctgatgaattagtgcagcaatatcaaattaaaaaccagtgtctttcagcaatagcatctgatgcagaacaagaacctaaaattgatccatatgcatttgttgaaggagatgaggaattcctttttcctgataaaaaagatagacaaaatagtgagagagaagctggaaaaaaacacaaggtagaagatgggacatctagtgtaacagtgttatcacatgaagaagatgctatgtcattatttagtccctctatcaagcaagatgctccacgccctactagtcatgcccgtcctccatcaacaagtttgatttatgactcagacctggctgtctcttatactgaccttgataatctcttcaattctgatgaagatgaactaacacctggatctaaaaaatcagcaaatggatcagatgataaagccagctgcaaggaatcaaagacaggaaatctggacccgttatcttgcataagcactgcagatcttcataaaatgtatcctacaccaccatcattggaacaacatattatgggattttccccaatgaatatgaataataaagaatatggtagtatggatacaacacctggaggaactgttctagaaggaaatagttctagtataggagcgcagttcaaaattgaggttgatgagggattctgtagccccaaaccttctgaaattaaagatttttcttatgtctataagcctgaaaattgtcaaattctagtgggatgttccatgtttgcacctctaaaaactctaccaagccaatatctgccccctatcaaattgccagaagagtgtatttaccgtcagagttggactgttggaaaattggaattgctttcttcagggccttcaatgccattcatcaaagagggtgatggaagtaatatggatcaagaatatggcactgcttatacacctcaaactcatacttcttttgggatgcctcctagcagtgcacctcctagtaacagcggagcaggaattcttccttctccatccacccctcggtttccaactccaaggactccaaggactcctcggactcctcgtggagctggtggacctgctagtgctcaaggttcagtcaaatatgaaaattcagacttgtattcaccagcttctaccccatctacatgcagaccccttaattctgttgaacctgcaactgtcccttccatccctgaagcacacagtctttatgtaaacctcatcctttcagaatcagttatgaatttgtttaaagactgtaactttgatagttgttgcatctgtgtttgcaacatgaacatcaagggtgccgatgttggagtttacattccagatccaacgcaggaagcacaatataggtgtacctgtggcttcagtgctgtcatgaacagaaaatttggaaacaattcaggattatttcttgaagatgaactagatatcataggacgcaatacagactgtggcaaagaagcagaaaaacgttttgaagctctcagggctacctctgctgaacatgttaatggaggactaaaggaatctgaaaaattatctgatgatttgatattattgctacaagatcagtgcactaatttattttcaccctttggagcagcagaccaagatccttttcctaaaagtggtgtaattagcaattgggtacgtgttgaagagcgtgactgttgcaatgactgctaccttgcattagaacatgggcgtcagttcatggataacatgtcaggaggaaaagttgatgaagcacttgtgaaaagttcatgcttacacccctggtccaaaagaaacgatgtgagtatgcagtgctcacaggatatacttcgaatgctcctctctcttcagccagttcttcaggatgccattcagaaaaaaagaacagtaagaccttggggtgttcagggtcctctcacttggcaacaatttcataaaatggctggccgaggctcttatggaactgatgaatccccagaaccactgccaatccccacatttttgttgggttatgattatgattatctggtgctttctccatttgctcttccttattgggagagacttatgctggaaccctatggatctcaaagagatatagcctatgttgtactgtgtccagaaaatgaagccttgttaaatggagcaaaaagcttttttagagatcttactgcaatatatgagtcctgtcgattaggtcaacatagacctgtttctcgactgttaacagatgggatcatgagagttggatctactgcatcaaagaaactatcagaaaagttggtagcagaatggttttctcaggcagctgacggtaacaatgaagcattttctaaactcaagctttatgcacaagtctgcagatatgacctaggtccttatcttgcttccctgccattggacagctctctactttcccagccaaatttagttgcccctacaagtcagtctttgattactccacctcagatgacaaatactggaaatgctaatactccatctgccaccttagcatctgcagcgagcagcactatgacagtgacttcaggtgttgccatatctacttcagttgccacagctaattcaactttgaccacagcttcaacttcatcttcatcatcctccaacttgaatagtggagtatcatcaaataaactaccttcgtttccaccctttggcagtatgaacagtaatgctgcaggatccatgtctacacaagcaaatacagttcagagtggtcagctaggagggcaacagacatcagctctacagacagctgggatttctggagaatcatcttcacttcccactcagccgcatcctgatgtgtctgaaagcacgatggatcgggataaagtgggaatccccacagatggtgattcacatgcagtcacgtatccacctgcaattgttgtttatataattgatccttttacatacgaaaatacagacgagagcactaactcttctagtgtgtggacattggggctacttcgatgctttctagaaatggtccagactcttcctcctcatatcaagagtactgtttctgtacagattattccttgtcagtacctgttgcaacctgtgaagcatgaagatagagaaatctatccccagcatttaaaatccctggctttttcggcctttacccagtgtcggaggccacttccaacatcaaccaatgtgaaaacattgactggctttggtccaggtttagccatggaaactgcccttagaagtcctgatagaccagagtgtattcgactttatgcacctccttttattctggctccagtgaaggacaaacagacagagctaggagaaacatttggagaagctggacagaaatataatgttctttttgtgggatactgtttatcacatgatcaaaggtggattcttgcatcttgcacagatctatatggagaacttttagaaacttgtatcattaacatcgatgttccaaatagggctcgtcggaaaaaaagttctgctagaaaatttggtctacagaaactttgggagtggtgcttaggacttgtacaaatgagttcattgccatggagagttgtaattggtcgtctaggaaggattggtcatggagaattgaaagattggagctgtttgctgagtcgtcgaaacttgcagtctctaagtaaaaggctcaaagacatgtgtagaatgtgtggtatatctgctgcagactcccctagcattctcagtgcttgcttggtggcaatggagccgcaaggctcttttgttattatgccagattctgtgtcaactggttctgtatttggaagaagcacgactctaaatatgcagacatctcagctaaataccccacaggatacatcatgtactcatatacttgtgtttcctacttctgcttctgtgcaagtagcttcagctacttataccactgaaaatttggatttagctttcaatcccaacaatgatggagcagatggaatgggtatctttgatttgttagacacaggagatgatcttgaccctgatatcattaatatccttcctgcttctccaactggttctcctgtacattctccaggatctcattacccccatggaggtgatgcgggcaagggtcagagtactgatcggctactatcaacagaacctcatgaggaagtacctaatattcttcagcaaccattggcccttggttactttgtatcaactgccaaagcaggtccattacctgactggttctggtcagcatgtcctcaagcacaatatcagtgtcccctttttcttaaggcctctttgcacctccacgtgccttcagtgcaatctgacgagctgcttcacagtaaacactcccacccacttgactcaaatcagacttcagatgtcctcaggtttgttttggaacagtacaatgcactctcctggctaacctgtgaccctgcaacccaggacagacgctcatgtctcccaattcattttgtggtgctgaatcagttatataactttattatgaatatgctgtgatcttcatttgatggaactgtgcaagaaaagaacaaggaaaaatggatgtttcgctgcaggattaagttacaattatcttctcagtgaaggtcatttgtgatggggtctaattcttattacttcaacaaatattgttttgacttggggggaggggctataaccctgctatttttcattgactctattgaactctttaggatgatgactgatcatacaaaacgtattataacattttcgtagcaaaattaaccttttttttttccagtcacagtatttgtgaaaagtaatgagccatagtacccagtcatgttaaatgaatattaaaagcatggagaggaaacatgaggaacaatgaatttcaacatatggcttcagaacatgaagatgttcttgtatggattatagtatctagtattcaaaaatgcctgcatctcttctcttatttattgtaagtttttaaatgtataaattgtcttatatttcttaacctcttttataaaaattttcctagaaggtttatactgccttcttgctttaaagcaattggtctaaaatatatgtaatcgtcttaattaaaaagttgcagtagggttgcttttagagtattatttttttgtaagggggtgggtgggacagtaaatttgtattgtctcgatgtacagtttaacggggatagagggggaataatgtccataccattgtgtgtggaggatttacagctaagctgtagttgcagagtacatgtacagtaatgaagttcactgtgtttataaattgaaaaggtaccaggtcttacagcattttatatatcacatctttacagaataacatgatggcaatatacaagtggtattgttaggtggtttaacttagaataaaatgagaattcttcagttatattttgtactatggtttagggctatgactaatatttcaggccatttccggtgaaagaaacttagttttacaagaaaaaccatttgctactgaatgcttaaactaattttagtgtttaatgttacatgcttaaatttttttcagttttaacagtggcatatttaggcatggaaatattattatgaaatttattttcaggatctgctataaggttgaaatttagcccagctctaggcattttacaaattatttttcaagcagtcattcttgattgtttgacttttttttttaaattaaagattgggaatgtatgtgagagtatgcatatgtatgggtgtgtgtgtgtgcgcgcaatcaaactgtggtgtaaatagattctcagtgaattctggtattcagactctattccactagtgaaagaaccattttttaaacttcccttgccttttttatttatttaattttcttggtttggagatgtcagtcccaaacaccagagtctgtacttttctataacacagctcagattaaggtagggcatatgccaaggaggttctcacctccctaaagaagggacttgaattttagggactttaattcacccctccttcaatacaactttcccccttcttgtttgcacatgccaagataactgcttttatgcaggctgtacccccttgaaaaatcctttctacagtgctgctcacaaaagagcccaagttcgcctcctacctgcattgctgacttgaattcacagtcgccgagtctacctagctttcttggaagcagtctagcaaaatttctatttgtacgttcactaattatctacaaggacaaaatcagttgtatttacaaaactctacttcagtgtttgttttagtttttttttttactgaaacttgtttttgtgaatactctgtgcttagaattaaatatcactttcttatgaacaacataacttcttcagattgtgtatatgaaaacattagcaagtcttgttttttctatgaagcaaacacaattggtgacaaaggttgtcaatcatttcttcaaaattataatgcagttctaatggtcagcatattttgatattaaatttaaagatcacctctctgcatttgtttttaaattatgctaatacaccacacattatgttggtatgttttgttctgtactttctttaaaaaaaaaaaaaaaacttgtctgagatttgaaggaaaatgtgcttatttggaatttccataaaaagagtatcctttttatacacttaatagtgactttacaaaataaaagttatattctcagttgtttaaaatcactaacctatgataaccacacctcaatttgaaagtagatttaaaattattccctgacaggttatttaatatggagccataaggagggaacccagtacacaattattttttatttgggaatcagggaatagttcccaaatatacaggatttattgataagattttttttcttcccttcatatatccattcaaactcaatggaaagttattaaataaccattagaaaagctcagtagacttatttgagaaattaagccttgtgcaggatgatggatttgacttactaatgtactgtcacagacaaatatgggtagttttgtttaaataggtaagcaaaatattatactttatagcagtggattaccaacaccttgacttctttgttacagtgctaacatctttttttttgtgcaggtatccatgattattaagcagggtggaagttcagtattttgtcatttaaaaagattagttatataatgtctgcttccagccagtgagaaacatctagccatacctttcttatgcaagccattgagttatcaggactgtgaattaacactgtatgaataaatttctgtacaccttattgtttggccagaaggccaccaagtgtacttatatgtaatccttaaattttaaagtagctgtaatttttaaatatttctaaacttttcttaaaccactaaaattaagctcttactacttagtcaactatcctcagctgtattcgtactcaattgtcagtatggcacagattactgtattaaaatattctcctttcgtcttcatatttaccttctgaggtaattttttaacttaatgtgttactacaaagatttgcagatctttaatcaagcactatgttaatactgtaatatcagaatactatgttgcattatttaaaatgttcaaattgaatagattaaaaagtttttaaatgctattgcatcatataatttgctattcatccactatggcattgcatatcaatcagttaatacacttaatgttgcatgagtgatattttggtctgggtttcctcttaagattttagtttgtctgaattaaggaaaaatgtttttaatatacattcttattttgtcccacccctccagaaataagctggaaatcttaactttttggggggtcttttttggtgttttaatgggcccagaactgtggtttaaatttttatgtatgtattttcttttttgtggagtataaatttaaaaactggatttgggacctaaaatactcctcaggttgatgtattcatgaagttttaaaacatctttagttttcaaagtaaactggatatgtggaccttaaagttattgagtttaagctacaaattgtaacgtcattactggacatgtcagcatcaaccctctcaaaatagcttggtcactttatgaaggggcgttttaaagttgttgtttagcagtgacatttaatatggtccaattgcttttctttttaacgtgacaaaaagagaataaggaacaaacactattgctgccgaatgccataacactgagttgtacaaattgtgattgaggaaatgaaaaggtttatactttttaaaaaaaaaaaaacaaaaacaaaaaacaaaacttcaaatggaataaattattcatgaagccttc

SEQ ID NO: 152994 - DNA, 6522 bp, Artificial Sequence
  derived and/or modified sequence
atgagcgccagcttcgtgcccaacggcgccagcctggaggactgccactgcaacctgttctgcctcgccgacttaactggaatcaaatggaaaaaatatgtgtggcaaggacccacctctgcaccaatactctttccagtcactgaggaagatcccatattaagctcctttagcaggtgtctcaaggctgatgtgctgggggtttggcggcgggaccagcgacccggacggagagaactctggattttctggtggggagaagatccagttttgctgacccttttcacaatgacctatcaaaagaagaaaatggaatgtggcagaatggactttcctatgaatgccgtgctgtgctttcaggctgtccacaaccttctcgaaaggtgtttgatgaataggaatttcgtccggatcggaaagtggttcgtgaagccatatgagaaagacgagaagcccatcaataagtcagaacacctatcctgctctttcacattttttttgcacggagactcaaacgtctgtacctctgtggaaattaatcagcaccagcccgtgtacctcctaagtgaagagcacatcaccttagcacaacagagtaattcaccctttcaggttattctgtgcccatttggcctgaatggaactcttaccgggcaggcattcaaaatgagcgactcggctacaaaaaagcttatcggagaatggaagcagttctacccaattagttgttgcctgaaggagatgagcgaagaaaagcaggaggacatggactgggaggatgactctctcgccgctgtggaggttttggtggcaggggttaggatgatctacccagcttgcttcgtcctggtccctcagagcgatatccccaccccgtctcccgtaggcagtacccactgtagtagtagctgcttgggcgtccaccaggtgccagcttcgacccgggaccctgctatgagcagtgtgaccctgacacctccaacttcgcctgaggaagttcagaccgttgacccccagtctgtccagaaatgggtgaaattttctagtgtttcagatggtttcaacagcgacagtactagtcaccatggcggcaaaatccctcggaaactggccaaccacgtggtggaccgggtgtggcaggaatgtaatatgaatcgggctcagaacaagcgtaagtattctgcgtcctcaggaggattgtgtgaagaagcaacagccgcgaaggtcgcaagttgggactttgtggaggcaactcagcgaactaattgcagctgtttacggcacaagaacctgaaatcaaggaatgcaggtcagcagggacaagctccaagccttgggcagcaacaacagatcctgcctaagcacaagactaacgagaaacaggaaaagtctgaaaaaccccaaaaaaggcctctcacgcccttccatcaccgggtgagcgtcagtgatgacgtcggaatggacgctgatagtgccagccaacgcctcgtgatctctgcgcctgatagccaggtcagattctctaacataaggactaatgatgtggccaaaaccccgcagatgcatggcactgaaatggctaatagcccacagccacccccactcagcccccacccctgcgacgtggtggacgaaggtgtgaccaagactccttccactccacagtctcaacatttctatcaaatgcccacacctgatccactggttcccagcaaacccatggaggaccggatcgattccctgagtcagtccttccccccccagtaccaggaggccgtagaacccaccgtgtatgtcggcactgctgtcaatctagaagaggatgaggcgaacattgcttggaagtattacaagtttccaaagaagaaggacgtggaatttctgcccccgcagcttccaagtgataaatttaaggacgatcccgtaggaccctttggccaggagtccgtgacgtcggtcaccgagttaatggtgcagtgtaaaaaacccctgaaggtatccgacgaattggtgcagcaataccagataaagaaccaatgcctgtcagctatcgctagtgacgccgaacaggagcccaagattgacccatatgcattcgttgagggcgatgaggagttcttgtttcctgataagaaggaccgtcagaacagtgaaagggaggccgggaagaagcataaagtcgaggacgggacaagctctgtgaccgtactgtcgcatgaagaggatgctatgtctcttttctcacccagtattaaacaagatgccccacgccctacttcacacgctagacctccgagtacaagtctcatatacgattccgatttagccgtcagctacacagatttagataatctcttcaatagtgatgaagatgaattgacccccgggagcaagaagagcgctaatggcagtgacgacaaagcttcatgtaaagagtccaaaaccggcaatctcgacccactgtcctgcatcagcaccgctgacctgcacaaaatgtatcccactccacccagcctggagcaacacataatgggcttctcccctatgaatatgaataacaaggagtacggttctatggacacgactcctgggggcactgtgctcgagggaaactctagcagtatcggcgcacagttcaaaatcgaggtcgatgaaggattttgcagccccaaaccctcagagattaaggattttagctatgtctataagcccgagaattgccagattctcgtggggtgtagcatgtttgctccgctcaaaaccctgccatcacaatatttgcctcctatcaaactgccagaggagtgtatctacaggcagagctggacggttggcaagcttgagctgctgtcaagcggtccatccatgccctttatcaaggagggtgatggctcaaatatggatcaagaatacggaactgcctatactcctcagacacacacttcttttgggatgccgccttcatctgctcctccttctaatagcggcgctgggatactcccctccccttccaccccccgtttccctactcctagaacaccgcgcacaccacggacaccaagaggcgcaggcggtccggcctctgcccagggaagcgttaagtatgaaaactccgatttatactccccagctagtacaccctctacgtgtcgacccctgaacagcgtggagccggctacagtcccaagcatacctgaggcccactccctgtatgtgaatctgatactgagtgagagtgttatgaatctttttaaagattgcaattttgattcctgttgcatctgcgtgtgcaacatgaacatcaaaggagcggatgtgggtgtctatatcccagatcctactcaggaggctcaataccggtgtacttgtggcttcagcgctgttatgaacagaaagtttggcaataattccggactcttcctagaagacgagttggacattatcgggcgcaacactgactgcggaaaagaagctgagaagaggttcgaggccttgagagcgaccagtgcagagcacgtgaatggagggttgaaagagagcgagaagcttagtgacgatctgatcctccttctgcaagatcagtgtacaaatctgttcagcccttttggagctgctgaccaggacccgttccccaagagtggagtcatctccaattgggtgagagtagaggaacgggattgctgcaatgactgctatctggctctcgaacatggaagacaatttatggataatatgtccggagggaaggtggatgaggcccttgttaaatctagctgcctgcatccttggagcaaaagaaacgatgtaagcatgcagtgttcccaagatatcctccgtatgctgctcagcctgcagcccgtgctgcaggacgccatccagaaaaaacgcactgttcggccttggggcgtgcaaggccccctgacctggcagcaatttcacaaaatggctggtagaggtagttatgggaccgacgagtcgcctgaacctttgcctattccaacctttctcttgggatacgattatgattacctagtgctgtcacccttcgccctcccctactgggagaggttaatgctggaaccttacggctctcagcgggatatagcttacgtagttctgtgccctgagaatgaggccctcctaaatggggccaaaagtttttttcgagatttaacagctatctacgagtcctgccgtctgggtcagcaccgtcctgtgagccgcctcctcacagacgggatcatgcgggtgggttcgacagccagtaagaaactaagcgagaaactcgtggctgagtggttttcccaagcagccgacggaaacaatgaggccttctcaaaactgaaactttacgcacaggtgtgcaggtatgacttaggaccctacctcgccagcttgcctctcgactcgtctttgttgagtcagcctaacttggtggcccccacttcccagagcttaatcacaccaccacagatgaccaatactgggaacgccaacacgccgtcagctaccctcgccagcgccgcaagctctacaatgactgtgacaagcggcgtcgcaatttccacgtccgtggcgactgccaactccactctgacaacagcaagcaccagttcttcatcgtcctctaacttgaattcaggagtgagcagcaataagctgccatcttttccccccttcgggtcaatgaactctaacgccgccggaagcatgagcacccaggcaaataccgtgcaaagcggccagctcgggggccagcaaacctctgcccttcagactgccgggatctctggagagtctagctctctccctacacagccgcacccagatgtgtccgaatcaactatggatagggataaagtaggaatccctactgacggcgatagccatgctgtcacatacccacctgctattgtggtgtatatcatcgatccatttacctatgagaacaccgacgagagcaccaattcttcgtctgtctggaccctgggactgctgcggtgctttcttgaaatggtgcagactttgcctcctcacatcaagtccaccgtatcggtgcagatcatcccctgtcagtatctgctccaaccagtcaagcatgaggatcgggagatctacccgcagcaccttaagtccctggcattctccgcattcacacagtgccgccgccccctccccacaagcaccaacgtgaaaaccctcaccggtttcggacctggcctggccatggaaacagcactccggagcccagatagacccgaatgtatacggctgtacgccccaccctttattctcgcccccgttaaagacaagcaaactgaactcggtgagaccttcggagaggccggccaaaagtataatgtgctgtttgtggggtattgtctgtcgcacgatcagcggtggattctggcaagctgtacggatctgtatggtgagctactggagacctgtatcatcaatatcgacgtgccaaaccgagctcgcagaaagaagtcatcagcccggaagtttggcctccagaaactttgggaatggtgtctgggtttggtacagatgagctcgttaccatggagagtggtcatcggacgtctgggcaggatcgggcatggagaattgaaagactggagttgcctgctgtctcggaggaaccttcagtcgctttctaagaggctaaaggacatgtgtcgtatgtgcggtatctctgccgccgatagccctagcatactgtccgcatgcttggttgcgatggagccacaggggtcatttgtcattatgcccgactccgtttctacgggttctgtgttcggtagatctaccacactgaatatgcagacatctcagctgaacaccccgcaggatacaagttgcacccacattttggtttttcccacatcagcctcagtacaggtggctagcgccacatacacgacagagaatcttgatctggccttcaaccctaacaatgatggagcagacggcatggggatcttcgacttgctggataccggcgatgatttagacccagacatcatcaacatcctgccggcctcacccaccggaagccccgtccattccccgggcagtcactatcctcacgggggggacgctggaaaaggccagagtacagaccgcctactcagcactgagccccatgaagaggtgccaaacatcctccagcagcctctcgcattggggtactttgttagcacggcaaaagcaggtccattgcccgactggttttggtctgcctgcccacaggcacaatatcagtgtcctttgttccttaaagcctcattgcacctgcacgtcccatcagtccaatcagacgaactgctacactcaaagcactcccaccctctggatagcaaccagactagcgacgtgttgagattcgttctggagcagtacaatgctctcagctggcttacttgtgaccctgctacccaagaccgcaggtcatgcctgccaatccactttgtcgtgttgaatcagctatacaacttcattatgaacatgctttag

SEQ ID NO: 152995 - DNA, 6525 bp, Artificial Sequence
  derived and/or modified sequence
atgagcgccagcttcgtgcccaacggcgccagcctggaggactgccactgcaacctcttttgtcttgctgacctcacaggtatcaagtggaaaaagtacgtgtggcaaggaccaactagcgcccctattctgtttccagttactgaggaagatcctatactcagttcattttctcggtgtctcaaggccgacgtcctaggcgtctggcgccgggatcagcgcccaggtagaagggaactgtggatcttctggtggggggaagacccgtcatttgcggacctgatacatcacgacttaagcgaggaggaggatggagtgtgggaaaacgggctgtcttacgaatgtcgaaccctcctattcaaagccgtccacaatcttctagaaaggtgtcttatgaatcgaaacttcgtgcgcatcggaaaatggtttgtgaagccatacgaaaaagatgaaaagcctatcaacaagagtgaacacttaagctgcagctttacctttttcctgcatggcgactctaacgtgtgcacatctgtggaaataaaccaacatcaaccagtctatttactgtccgaggaacatatcacattagctcagcagtccaacagtccatttcaggtgattctgtgtccttttgggctgaatggtacgctcaccggccaagcgttcaaaatgtccgactctgcaactaagaagctcatcggtgagtggaaacagttctaccccattagctgttgcctcaaagaaatgtcggaagagaagcaggaggatatggattgggaggatgacagcctggccgctgtagaagtgctggtcgccggcgtccggatgatttacccagcttgctttgtcctggtgcctcagtccgacattcccacaccatctcccgtgggatctacccattgttcatcttcctgcctgggcgtgcaccaggtaccagcaagcacccgggatcccgccatgtcctctgtcacactgacaccccccacttctcctgaagaagtccagacagtcgatcctcagagcgtgcagaagtgggttaagttctcctccgtgtccgatgggttcaactctgactctacctcacatcacggcggaaagattcctaggaaattggcgaatcatgtcgtcgatcgtgtatggcaggagtgcaacatgaacagagctcagaataaacgaaaatatagtgccagtagtggaggtttgtgtgaagaggccaccgccgccaaagtggcctcttgggacttcgttgaagccactcagcggacaaattgcagctgtctgcggcacaagaacttgaaaagtcggaacgccggtcagcaggggcaagccccttctctcggccaacagcagcagatattgcctaagcataagacaaatgagaaacaggaaaaatcagagaaacctcagaagaggcctcttactccttttcatcatagggtgtccgtgtctgacgatgtgggaatggatgccgactctgcctctcagcggttggtgatcagcgcacctgattctcaagtgagattttccaatatcaggaccaacgatgttgctaaaacccctcagatgcacgggactgagatggctaattcacctcaaccacccccgctgagccctcacccatgcgatgtggttgacgaaggggtcactaagacaccgtcgacacctcagagtcagcacttttaccagatgcccacacccgacccgctagttccgagcaagcccatggaggacaggattgattctctgtcccagtcattcccaccgcagtatcaggaagccgttgagcccactgtatatgttgggactgcagtgaatctggaagaagacgaggctaacatcgcatggaagtattataaatttcctaaaaaaaaagacgtagaattcttacctcctcaacttccgagcgacaagttcaaagatgatcccgtcggtccattcggtcaggagtcagtcacttccgtgaccgaactgatggtccaatgcaaaaagccactgaaagtatcggatgagctggtgcagcagtatcagattaagaatcagtgtctgtctgccatagccagtgatgcagagcaggaacccaagattgacccctacgctttcgtggaaggcgacgaggaattcctgttccccgacaaaaaagaccggcagaactcagagcgcgaagctggcaagaaacataaagtcgaagatggcaccagcagtgtcactgtcctgtcccacgaggaggacgcaatgagtctattcagcccatccataaagcaggacgcgcctcgacccacctcccatgcacgacctccttccacctcgctgatttatgactccgatctcgcagtttcctacacagacctggacaatctttttaattccgacgaagacgagctgacaccgggatccaagaagtccgcaaacggctctgatgacaaggcctcttgtaaggaatccaagaccgggaacctggaccctctgtcctgtatcagcacagccgacctgcacaagatgtacccgactccgccaagcctggaacaacacataatggggttctccccaatgaatatgaacaacaaggaatatggctcaatggacaccaccccagggggcaccgtgctggaagggaattcatcctccatcggcgcacaatttaagatcgaggtggatgagggtttctgcagtccaaagccttccgagattaaggacttttcctacgtgtataagcctgagaactgccagatacttgtgggatgtagtatgttcgcgccattaaagacactgccctctcagtacctgcccccaatcaagctaccggaggagtgtatctatcgccaaagctggactgtgggcaagttggagctgctatcttctggcccatccatgcctttcattaaagaaggcgatgggtctaatatggaccaggagtacggcactgcatataccccacagactcatacgtcattcgggatgcctccttccagcgcccctccgagcaactctggggccggaatactgcctagcccaagtaccccaagatttcccacccccaggactccccggacccccaggacgccccgaggcgccggaggcccggcatcagcacagggcagcgtcaaatacgaaaatagtgacctctattccccagcgagtaccccatccacatgccgcccgttgaattctgtggagcctgcgactgtcccaagcattcccgaagctcatagcctctatgtgaacctgatcctttctgagagcgtcatgaatctgttcaaagattgtaatttcgactcatgctgtatctgcgtgtgtaacatgaatattaagggggcagacgtcggcgtctacattccagacccaacacaggaggcccaataccgctgcacatgtggtttcagtgctgttatgaaccggaaattcggaaataattctggcctgtttttggaggacgagctggatattatcggaaggaatacagattgtgggaaggaggccgagaagcgctttgaagccttgagggccacatctgccgagcacgtgaatggtgggctgaaggagagcgaaaagctgtccgatgacctcattttactgctgcaagaccagtgtactaacctcttcagcccattcggggccgccgatcaggatccattccctaagtccggcgtaatcagcaactgggtgcgagtggaggagagggattgctgcaacgactgctaccttgctctggagcatgggagacagttcatggacaatatgtcagggggtaaggtggacgaggcactggtgaaaagttcttgtctgcacccctggtccaagagaaacgatgtgagcatgcagtgctctcaggacatcttgagaatgctgctgtctttacagcctgtgctgcaagatgccatccagaagaaaaggactgttcggccgtggggggtgcaaggccccctgacctggcagcagttccataagatggctgggagaggatcttatggaacagatgaatctcccgagcccctgcctattcccaccttcctcctaggctatgattacgactacctcgtgctcagtcccttcgccctgccttattgggaacgactgatgctggaaccatatggctcacagagagacattgcctacgttgtcctatgtcccgagaacgaggctctgctgaacggcgctaagtcatttttccgagacctgacggccatctatgagagttgccgactgggccagcaccggccagtgtcacggctcttaaccgacggaattatgcgggtgggaagcaccgcctctaagaagttgtccgagaaattggtggctgaatggtttagtcaggcggcagacggtaacaacgaggcttttagcaaactgaagctttacgcccaggtctgccgatatgacctcggcccatacctggcaagcctgccactggacagttctctcctatctcagcctaatctggtggcacctacgagccagagccttatcacgccaccccagatgaccaacacaggaaacgcaaatactccatctgctacgctcgcatcggccgcatccagcaccatgacagtgacttcgggagtggcaatcagtacatccgtggcgacagccaacagcaccctgaccaccgcctctacgtcatcaagtagttccagcaatttgaattcaggggtgtctagcaataaattaccatctttcccgcccttcggcagcatgaactcaaacgccgccgggagcatgagcacccaggccaacacagtacagtcaggacaactcggcggccagcagacatcggcacttcagactgccggaatctccggtgaaagctcaagcctgccaacccagccccaccctgatgtgagtgagagtacgatggaccgcgacaaagtggggattcccactgatggtgattcccatgccgtgacttacccccctgctattgtagtgtatatcatcgacccatttacttatgagaataccgatgaaagtaccaactcctcttcggtgtggacactggggttgctgcgttgcttcctggaaatggtgcaaacgcttcccccacatatcaagtcaacagtcagcgtgcagatcatcccatgccagtatctgctgcagcctgtgaaacacgaggatagggaaatttacccccagcacttgaaaagcctcgccttttctgcctttactcagtgtcgaagaccattgcctacttcaacaaatgtcaagaccctgaccggcttcgggcccggacttgccatggagactgctctacgcagtcccgatcgacccgagtgtataaggctgtacgccccgcccttcattctggcccccgttaaggataagcagactgaactaggcgagacctttggcgaggccgggcaaaagtataatgttctcttcgttggctattgcctctctcatgaccagagatggatcctggccagctgtactgacctttacggcgaactcctcgaaacgtgtattatcaacatcgatgtaccaaacagagccagacggaagaagtcatcagcccgcaaatttgggttacagaagctgtgggagtggtgtctgggactggtccaaatgagctcgctgccctggagagtcgtaatcgggaggttagggcggattgggcatggtgagctaaaggattggagttgcctgctatcgaggcggaacctacagtctctgagtaagagacttaaggatatgtgccggatgtgcgggatctcagccgctgatagtccctcaattctgtctgcctgtctggtggccatggaacctcagggatcgttcgttatcatgccagactccgtaagtaccgggtccgtgttcggccgctccacaacacttaatatgcagacttctcaattgaatacccctcaggatacgtcatgcacccatatcttagtgttccccacttcggccagtgttcaggttgctagtgccacatacacgacggagaatctggatcttgcatttaaccctaacaatgatggagctgatggcatgggcatcttcgacctactggacacaggggatgacctggaccccgacataatcaacatcctgcccgcctccccaaccggaagtcccgtacactcgcccggttctcattacccacacggaggagatgctgggaagggtcagtcaaccgaccgattactgtccacagaaccccatgaggaagtgcccaacatcctgcaacagcccctggccctcggttattttgttagtaccgccaaagctgggcctctacccgactggttttggtccgcctgcccacaggcccaataccagtgtccattgttcttaaaggctagccttcacctgcacgtgccttctgtgcagagtgacgagctcttacactccaagcattctcatccgctggattccaaccagacctctgacgtcctcagattcgtcctcgagcaatataatgcactgtcatggctgacgtgcgacccagctacacaggaccgccgttcctgccttcccatccattttgtggtccttaatcagctgtataacttcataatgaatatgttatag

SEQ ID NO: 152996 - DNA, 6521 bp, Artificial Sequence
  derived and/or modified sequence
atgtcagcttccttcgtcccaaatggggcatcgctcgaggactgccattgcaacctgttctgtcttgccgaccttacaggaattaaatggaagaagtatgtctggcaggggcctacttcggcgcctatactcttcccagtgactgaggaggaccctatactgtcatctttctcgcgctgtctcaaggcagacgtgttgggagtctggaggcgcgatcaaaggccgggacggagagaactgtggattttctggtggggtgaggacccggtcctgctgacccttttcacaatgacctatcagaagaaaaaaatggaatgcgggagaatggatttcccaatgaacgccgttctctgtttccaggctgtccacaatttgctagagagatgcctgatgaacaggaacttcgtgagaatcggaaaatggttcgtgaaaccctacgaaaaagatgaaaaaccaattaataaaagtgagcacctttcttgttcatttacattttttctgcatggcgactccaatgtgtgtacgagcgtggaaatcaaccagcaccagcctgtttacctgctcagcgaggagcacataactcttgcacagcagtctaattcccccttccaggttatcctgtgccctttcggtctaaatgggaccttgacaggccaagcctttaaaatgtccgattccgcgaccaagaaactgattggtgagtggaagcagttctaccctatttcttgttgtctaaaagagatgtctgaggagaaacaggaagatatggattgggaagacgacagccttgcagctgttgaggtactcgtcgccggtgtccgcatgatctaccctgcctgtttcgttcttgtcccacagagtgatatacccacgcccagcccagtgggatccacccactgcagttctagctgcctaggggtgcatcaagtcccagcatctaccagagatcccgctatgtcctccgttacactaactccccctacgtcccccgaagaagtccagactgtggatccccagagtgttcagaaatgggtgaaattctctagcgtgtccgacggcttcaactccgattcaacctcacatcatggtggaaaaatccctcgtaaattggcaaaccatgtcgttgaccgggtgtggcaagaatgtaatatgaacagggctcaaaacaagagaaagtattcagcaagttcgggcggtctctgtgaggaggccacggcagcgaaggtcgcctcctgggactttgttgaggccactcagagaacaaattgctcctgtttgaggcataagaatctaaagtcacgcaacgccggacagcaggggcaagcaccctctctaggccagcagcagcaaattttgccaaagcacaagactaacgagaagcaagagaagagcgaaaaaccacaaaagcggcctctgactcccttccatcatagggtcagcgtctccgacgatgttggaatggatgcagactccgcttctcagagacttgtgatcagcgcccctgacagtcaggtgcggttctctaatataaggacaaatgatgtcgcgaaaactccgcagatgcacggcactgagatggccaattccccccagccaccgcctcttagtcctcatccctgcgatgtagtggatgaaggagtcactaaaaccccttcaacgccacagtcgcagcacttctaccaaatgccaacaccagaccctttggtgccatcaaaacctatggaagacagaattgatagtctgtcccaaagctttcctccccagtaccaagaagctgtagagcctaccgtgtacgtggggacagctgtgaaccttgaggaagacgaagcaaatatcgcatggaagtactacaagtttccaaaaaagaaagatgttgaattcctgcctccacagctgccatctgacaagtttaaagacgatccagtaggaccgttcggacaggaaagtgtcacctcagtgacagaattgatggtgcaatgcaaaaagcctctgaaggtcagcgacgagctggttcagcagtaccaaatcaagaaccagtgtctcagcgccattgcctcagatgctgagcaggaaccgaagatcgacccctacgcttttgtggagggtgacgaggagtttctgttccccgataaaaaggaccgccagaattcagagagggaggcaggtaagaagcacaaagttgaggacggaacctctagtgtgacagttttgtcccacgaagaagacgctatgagtcttttttccccttcgattaaacaggacgcgccaagacccacctcgcacgccagaccacccagcactagcctgatttatgactcggacttagccgtgagttatacggacctcgataatctgtttaattcggacgaggacgagctgacccccggatccaagaagtccgcaaacgggagcgacgataaggcgagctgcaaagagtcgaagacgggaaacctcgatccactatcttgcatcagtactgcagacctgcacaaaatgtacccaacgccaccttccctagagcagcacattatgggtttctctccaatgaacatgaataataaggagtatggttctatggacaccaccccagggggaacagttctggaggggaacagctcatctattggtgctcagtttaaaatcgaagtagatgaagggttctgcagcccaaaacctagtgagattaaagatttcagttacgtatataaacctgagaattgtcagatcctggtagggtgcagcatgttcgcccctctgaaaacgcttcctagccagtatttacccccaattaaattacctgaagagtgtatttacagacagtcttggacggtggggaaacttgagctgctgtcttcgggcccttcaatgccatttattaaagagggcgatggcagtaacatggatcaggaatacgggaccgcgtataccccacagactcatacctcttttggtatgccaccgtcatctgcaccaccatccaacagcggggctggcatcctccccagtcctagcactcccagatttcctaccccacggacacccaggacaccacgcacaccccgtggagccggaggccctgcatctgcccagggtagcgtgaagtacgaaaattccgacttgtactcgccagctagcacccctagcacatgccgacccctaaactctgtggaaccagctacagtgccaagtataccagaagcccactccctctacgtgaacttgatactctccgagtcggtgatgaatctttttaaggactgtaacttcgacagttgctgcatctgcgtttgtaacatgaacatcaaaggcgctgacgtcggcgtctacatcccagatcccactcaagaggcacagtacaggtgcacttgtggattcagcgctgttatgaacaggaagttcggcaataactctggtctctttctggaagatgaactggacatcattggacgtaacacggattgcggcaaggaggccgagaagaggttcgaggctctccgcgctacaagtgccgaacacgtaaatggtggactaaaggaatcagaaaaacttagtgacgacctgatccttctattacaggatcagtgcaccaatctgttttccccgttcggtgcagccgaccaagacccattcccaaagagtggggtgatctcgaactgggtcagggtggaggagagagattgttgtaacgattgttatctcgcgttagagcacggcagacagttcatggataacatgagtgggggaaaagtggacgaagctctggttaagagttcatgcctgcatccctggagtaaacgtaacgatgtgtccatgcagtgttcccaggacatcctgaggatgctgctgagccttcagccggtattgcaggatgccatacagaaaaagcgaactgtgaggccttggggcgtgcagggtcccctcacctggcaacaattccataagatggcaggaagggggtcttatggaacagatgaatcgcctgagcctctgcccattccaacgttcctgcttggatatgactatgattacctggtgttatcccctttcgcacttccttactgggaaaggctgatgctcgaaccttacggctcacaacgggacattgcatacgtcgtgctatgccctgaaaatgaagctcttttaaacggcgctaagtccttttttcgcgacctgactgcaatatacgaaagctgtagattgggccagcatcgccctgtctctagacttctaactgacgggataatgcgggtcggatccactgcttctaagaagctctctgaaaagttagtggccgagtggttttcacaggcggctgacggcaataacgaagccttctctaagctaaaactgtacgcccaagtgtgtcgctacgacctaggaccctatctcgcgagccttcctcttgattcttctcttctctcacaaccgaacctggtggcaccgacaagccaaagtctgatcacccctcctcagatgactaacactgggaatgccaatacccctagcgcaacactggcttctgccgcttcgagcacaatgacagtgacaagcggggtggcaattagcacatccgtggcaacagcaaactcaactcttaccactgcatccacatcatctagttcatccagtaacctgaattctggggtcagctctaacaagcttccaagcttcccgccatttgggtccatgaattcgaacgccgcaggctcaatgagcacacaggcgaatactgtacagtccggccagctgggcggacagcagaccagcgcccttcagactgccggtattagcggcgaaagtagttcccttcccacccagcctcaccctgacgtgtctgagtctactatggatagggataaggtcggcatacctaccgatggggattctcatgctgtgacttaccctcctgctatcgtggtttacatcattgatcccttcacctacgagaacaccgatgaaagcacaaactctagctccgtatggacactgggtttgctgaggtgctttctggaaatggtgcagacacttcccccacatatcaagtcaacggtgagtgtgcagatcatcccctgtcagtacctcctgcagcctgttaaacatgaggaccgcgaaatctaccctcagcatcttaagtctcttgcattcagtgcgtttactcaatgccgtcggccactgccaacgtccaccaacgtgaagaccctgaccggatttggcccaggcctggcgatggagacagctcttcgctcgccagaccggccagagtgcattcgcctgtacgcaccccctttcatcttagctcccgtaaaggataagcagaccgagctaggtgagacattcggggaggctggtcagaagtataacgtcttattcgttgggtattgcttgtcacatgatcagagatggattctcgccagttgtaccgacttgtacggggaactgctcgaaacctgcattatcaatatagacgtgcccaacagagcacggagaaaaaagtcctccgctcgcaagttcggcctgcaaaagctgtgggagtggtgtctcggtctggtgcaaatgtccagcctgccctggcgcgtcgtcattgggaggctcggcaggatcgggcatggagagctgaaggactggtcctgcctcctgtctcggaggaacctccaaagtctttcaaagagattaaaggatatgtgtagaatgtgcggcattagcgccgcagattcccctagcatcctgtctgcgtgtctcgtggctatggagcctcagggctccttcgtgatcatgcccgacagtgtcagtaccggaagcgtatttgggcgatcaactactctgaacatgcagacaagccaactcaatactccacaggatacttcatgcactcacatcctggtcttccctactagtgcctcggtgcaggtagcatccgccacgtacacaaccgagaacctggaccttgcattcaatcccaacaacgacggagccgacggcatgggtatatttgatttacttgatactggggacgatcttgatccggacatcattaatatcttacctgcctctcctaccggctcacccgtgcactcccccggaagccattatccacatggtggggatgccggaaaaggccagtcgaccgacaggctgctgtccacagagcctcacgaggaggtgcccaacatcttacaacagccgctggctcttggctacttcgtcagcaccgcaaaggccggacctctcccagactggttctggagcgcatgcccacaagctcagtaccagtgccctctgtttctcaaagcctcactacacctgcacgtcccttccgtccagtctgacgaactgttgcactccaaacacagccatcccttagatagcaaccagacatctgacgtgctgcggttcgtcctggaacagtataacgctttatcctggctgacctgtgaccccgcaacccaggaccggagaagctgtttacccatacattttgtggtcctaaaccagttatataacttcatcatgaatatgctcta

SEQ ID NO: 152997 - DNA, 6524 bp, Artificial Sequence
  derived and/or modified sequence
atgtccgccagttttgtcccaaatggcgctagcctggaagattgccattgtaacctgttctgtcttgccgacctgactggtatcaaatggaaaaagtacgtgtggcagggaccgacatccgctcccatactctttcctgtcactgaagaagatcccattctgagcagtttctcaaggtgtttgaaggccgacgtgctgggggtatggagacgtgatcagaggcctggcagaagagagttgtggattttttggtggggagaagatccgagtttcgctgacctgattcaccacgacctgtccgaggaagaggatggagtttgggagaacggcttgagctatgagtgcagaactctactgtttaaggcggttcacaacctgctcgagcgttgtctcatgaatcgtaattttgtgcgtatcggtaagtggttcgtgaagccctacgagaaagacgagaaacctatcaacaagtcggaacacctttcctgcagcttcacattctttctgcacggtgattcaaatgtctgtacctctgtggaaattaatcaacaccagccagtttatctcctctcagaggagcacatcacactggcccagcaatctaactcaccttttcaggtcattttgtgcccctttggcttgaatggcactttgacggggcaggcattcaagatgtcagattctgctactaagaagctgatcggggagtggaaacagttctaccccatctcctgttgtctgaaagaaatgagcgaggagaagcaggaggacatggactgggaagatgactcccttgctgcagtggaggtgctggtggcaggcgtgcgcatgatctacccagcctgctttgtgctggtaccccagtctgacattcctaccccgagcccagtcggatccacacattgttccagttcttgcctcggagtgcaccaggtccccgctagcactagagaccccgctatgagttccgttaccttgaccccccctacctctccggaggaggtccagaccgtggatcctcagtctgttcagaagtgggtgaaattttctagcgtgtcagacggattcaatagcgatagtacttctcaccatggaggcaaaatccccaggaagctggccaatcatgttgtcgatcgcgtatggcaagagtgtaatatgaaccgcgcacagaataagcggaagtactcagctagctccgggggtctctgcgaggaggccacagctgcaaaagttgcctcatgggatttcgtggaggcgactcagcgcacaaactgcagttgtctgcgccacaaaaatcttaaaagccgcaatgctggacagcagggccaggcaccatccctgggtcaacagcaacagatcttacctaagcacaaaaccaatgagaagcaagaaaagtccgagaagccacagaagagacctctgacaccatttcaccaccgggtctctgtgtcagacgatgtgggcatggacgctgattctgccagccagagactcgtgatttcagcacccgatagccaagtgaggttttcaaacataagaacaaacgacgtagccaagaccccccagatgcacggaacagagatggcaaacagtccacagcctcccccacttagtccccatccttgcgacgtggtcgatgagggagtgacgaaaaccccatccactccacagtcccagcatttttaccagatgcctactccagatccactagtcccaagcaagcccatggaagatcggatagatagcctcagccagtctttcccacctcagtatcaggaagctgtggagccaaccgtttacgttggcacggcggttaatctggaggaggatgaagctaacatcgcctggaagtattataaattcccaaagaagaaagacgtggaatttctgcctccacaactgcccagcgacaaatttaaagacgacccagtgggaccatttggacaagagtcggttacgagcgtcaccgaactgatggttcagtgcaaaaaacccctgaaggtgtccgacgagctggtacaacagtatcagatcaagaatcagtgcctgtctgctatcgcttccgatgctgaacaagaacctaagattgatccatacgcattcgttgagggcgacgaagaatttcttttcccagacaagaaggatagacagaactcagaaagggaggccggtaaaaagcacaaggtggaggacggcactagctccgtcactgtgctcagccacgaagaagacgccatgtccctgttttccccgtcgatcaagcaggacgccccaaggccaacctctcacgcaagacctccaagcacaagtttgatttacgattccgatttagcagtgtcctacactgacctggacaatctctttaacagcgacgaagacgagctcacacctggtagcaaaaaaagtgcaaatggttcagacgacaaggcatcatgtaaggagagtaagaccggcaacctggacccgctgagttgcatcagcaccgccgaccttcataaaatgtatcctaccccaccatccttggagcagcacatcatgggtttctcacccatgaacatgaacaataaggaatacgggagcatggatactacaccaggaggcacagtgctggaaggaaatagctccagcattggggctcagttcaaaatcgaagtcgacgaaggcttttgttcccctaagccatcagagatcaaagattttagttacgtgtataaacctgaaaactgccagatccttgttggctgttctatgttcgctcccctaaagacccttcccagtcaatacctaccccctattaaactgcccgaagagtgcatttaccggcaatcttggactgtggggaaactggaattgctttcatctggtccgtcaatgcctttcatcaaagagggcgacgggagtaatatggatcaggagtacggaaccgcctacactccgcaaacacacacttccttcggtatgccccctagtagcgctcccccaagcaactcgggagccggtatcttaccatccccttctactccacgcttccctacaccgcgaacccctcgtactcctcggactccacgaggtgcgggtgggccagcgagtgcacagggatcggtgaaatacgaaaactcggacttgtactcgcctgctagtacccctagcacgtgccgaccattgaattccgttgagcccgctaccgtgccctccataccagaggcccattctctctacgtcaatctgatcctatctgagtcagttatgaatctcttcaaggattgcaacttcgactcctgctgcatttgtgtgtgcaacatgaatataaagggggcagatgtcggcgtctacattcctgaccctacacaggaggcacagtaccgatgcacctgcgggttctccgcagttatgaatcgaaaatttggcaacaacagtggactatttctggaggatgagcttgatatcatcggacggaatacagattgtgggaaggaggccgaaaaaagattcgaggcactgagggccacctcagctgagcacgtcaatggtggactcaaagagtctgagaagctatcagacgatctgatcctgctactacaggatcaatgcactaacttattcagcccttttggcgcagccgaccaggatccatttcccaaaagcggggtgatctccaactgggtgagagtcgaagagcgcgactgctgcaacgattgttatctggctctcgagcacggcagacagttcatggataacatgagtggcggaaaagtggatgaggcactggtcaaatcctcatgtctccatccctggagcaaaaggaatgacgtcagtatgcagtgcagccaagatatcttaagaatgctcttaagtctgcagcctgtactccaggatgctatccaaaaaaagcgaacggtccggccttggggcgtgcagggcccacttacttggcaacagttccacaagatggctggcagagggtcatacggcacggacgaatctccagagcccttaccaatccccacatttctcttggggtatgattacgactacctagtccttagccctttcgctttgccctactgggaacgtcttatgctggaaccctatgggtcacaacgcgatatagcctacgtggtgctctgccccgagaatgaagccttgttgaacggtgccaagagtttctttagagatttgaccgcaatctacgagtcttgccgcttgggacaacatcgtccagtgtcccgcttgctgacagatgggattatgcgagtcggaagcaccgcgtctaagaaactgtcggaaaaactggtggctgagtggttctctcaggcagctgatggcaacaatgaggccttctccaagttgaagctgtacgcccaggtttgtcggtatgatttagggccatacctggcttctcttccactggattctagtcttctttctcagccaaatctggtcgcacccacaagccagtcgctgataacgcctccccagatgaccaacaccggcaatgccaacactccatctgccactctcgcctctgctgcctcctccactatgactgtgacatcaggcgtggccatatctacatctgtagcgacagcgaactctactttgaccaccgcatccacaagttcgagcagctcctctaatctgaatagtggggttagcagtaacaaactgccgagctttcccccattcggctccatgaacagtaacgcagctgggagcatgtccacacaggcgaatacagtgcagagcggacagctgggcggtcaacaaacttcagcactacaaaccgctggcatctccggggagtcctcatctttgccgacacagccacaccccgacgtgtcagagtcaaccatggaccgggataaagtgggtattcctacagatggggatagccacgccgtcacttaccctcccgcaatcgtggtctacatcattgatccttttacatacgaaaacaccgatgaaagtaccaattcgtctagcgtgtggaccttgggcctgctacgatgctttttggagatggtgcagactctgccccctcatattaaatcaacagtgtcagtccagataattccttgtcagtacctgctgcagcccgtaaagcacgaggatcgtgaaatctacccacagcacctgaagtccctggctttcagcgcctttacgcagtgtagacgtcctcttcctacaagcacaaatgttaagacgcttaccgggtttgggcctggactcgcgatggaaactgccctccggagccctgaccggccagaatgcataaggctttacgcgccaccttttattctggcaccagtaaaggataagcagaccgagctaggggagacctttggtgaggcagggcagaagtataacgtgctcttcgtgggctactgcctgagtcacgaccagcgttggatcctggctagctgcacagatctgtacggcgagctgttggagacgtgcattatcaacatcgacgtgcccaacagagctcgtagaaaaaagtccagtgcaagaaaatttggcctacagaaactctgggagtggtgtctgggcctcgtgcagatgagcagtctgccctggagagtggtgataggtcgcttagggcgaattggacacggcgagctgaaagattggtcctgcttactctctaggaggaacttgcagtctctcagcaagcgcctgaaggacatgtgcaggatgtgtgggatctcagccgctgattcgccgtctatcttgagcgcttgcttagtagcaatggaaccccaaggatcgttcgttatcatgccagacagtgtgtccacaggaagcgtgttcgggagatccaccacccttaatatgcagaccagccaactgaacaccccacaggatactagctgcacccatattctggtgttccctacaagtgccagtgtccaggttgccagcgcaacctatacaacagagaatctggatctggcatttaatccgaacaacgacggggctgacggcatgggcatctttgacctcctggatactggcgacgatctcgacccagatatcattaacatcctgcccgcttcccccactgggagccccgtgcactccccaggaagccattatccccacggtggggacgctggcaagggacaaagtacagatagactgctatccacagagccccacgaggaggtgcccaatatcctgcagcagcccctggctctggggtactttgtgagcacagctaaggcaggcccactgccagattggttctggagtgcttgccctcaggcacagtatcaatgccctctgtttctgaaggcttccttgcacctgcacgtcccgtccgtacagtccgacgaactgttacattcaaaacatagccacccccttgattcaaatcagaccagtgacgtattgcgattcgtgcttgagcaatacaatgccttgtcatggcttacctgcgaccccgctacgcaggaccggcgatcctgtttgcctatccatttcgtagttcttaatcagctctacaactttattatgaacatgctata

SEQ ID NO: 152998 - DNA, 6522 bp, Artificial Sequence
  derived and/or modified sequence
atgagcgccagcttcgtgcccaacggcgccagcctggaggactgccactgcaacctgttctgcctggccgacctgaccggcatcaagtggaagaagtacgtgtggcagggccccaccagcgcccccatcctgttccccgtgaccgaggaggaccccatcctgagcagcttcagcagatgcctgaaggccgacgtgctgggcgtgtggagaagagaccagagacccggcagaagagagctgtggatcttctggtggggcgaggaccccgtgctgctgaccctgttcaccatgacctaccagaagaagaagatggagtgcggcagaatggacttccccatgaacgccgtgctgtgcttccaggccgtgcacaacctgctggagagatgcctgatgaacagaaacttcgtgagaatcggcaagtggttcgtgaagccctacgagaaggacgagaagcccatcaacaagagcgagcacctgagctgcagcttcaccttcttcctgcacggcgacagcaacgtgtgcaccagcgtggagatcaaccagcaccagcccgtgtacctgctgagcgaggagcacatcaccctggcccagcagagcaacagccccttccaggtgatcctgtgccccttcggcctgaacggcaccctgaccggccaggccttcaagatgagcgacagcgccaccaagaagctgatcggcgagtggaagcagttctaccccatcagctgctgcctgaaggagatgagcgaggagaagcaggaggacatggactgggaggacgacagcctggccgccgtggaggtgctggtggccggcgtgagaatgatctaccccgcctgcttcgtgctggtgccccagagcgacatccccacccccagccccgtgggcagcacccactgcagcagcagctgcctgggcgtgcaccaggtgcccgccagcaccagagaccccgccatgagcagcgtgaccctgaccccccccaccagccccgaggaggtgcagaccgtggacccccagagcgtgcagaagtgggtgaagttcagcagcgtgagcgacggcttcaacagcgacagcaccagccaccacggcggcaagatccccagaaagctggccaaccacgtggtggacagagtgtggcaggagtgcaacatgaacagagcccagaacaagagaaagtacagcgccagcagcggcggcctgtgcgaggaggccaccgccgccaaggtggccagctgggacttcgtggaggccacccagagaaccaactgcagctgcctgagacacaagaacctgaagagcagaaacgccggccagcagggccaggcccccagcctgggccagcagcagcagatcctgcccaagcacaagaccaacgagaagcaggagaagagcgagaagccccagaagagacccctgacccccttccaccacagagtgagcgtgagcgacgacgtgggcatggacgccgacagcgccagccagagactggtgatcagcgcccccgacagccaggtgagattcagcaacatcagaaccaacgacgtggccaagaccccccagatgcacggcaccgagatggccaacagcccccagcccccccccctgagcccccacccctgcgacgtggtggacgagggcgtgaccaagacccccagcaccccccagagccagcacttctaccagatgcccacccccgaccccctggtgcccagcaagcccatggaggacagaatcgacagcctgagccagagcttccccccccagtaccaggaggccgtggagcccaccgtgtacgtgggcaccgccgtgaacctggaggaggacgaggccaacatcgcctggaagtactacaagttccccaagaagaaggacgtggagttcctgcccccccagctgcccagcgacaagttcaaggacgaccccgtgggccccttcggccaggagagcgtgaccagcgtgaccgagctgatggtgcagtgcaagaagcccctgaaggtgagcgacgagctggtgcagcagtaccagatcaagaaccagtgcctgagcgccatcgccagcgacgccgagcaggagcccaagatcgacccctacgccttcgtggagggcgacgaggagttcctgttccccgacaagaaggacagacagaacagcgagagagaggccggcaagaagcacaaggtggaggacggcaccagcagcgtgaccgtgctgagccacgaggaggacgccatgagcctgttcagccccagcatcaagcaggacgcccccagacccaccagccacgccagaccccccagcaccagcctgatctacgacagcgacctggccgtgagctacaccgacctggacaacctgttcaacagcgacgaggacgagctgacccccggcagcaagaagagcgccaacggcagcgacgacaaggccagctgcaaggagagcaagaccggcaacctggaccccctgagctgcatcagcaccgccgacctgcacaagatgtaccccaccccccccagcctggagcagcacatcatgggcttcagccccatgaacatgaacaacaaggagtacggcagcatggacaccacccccggcggcaccgtgctggagggcaacagcagcagcatcggcgcccagttcaagatcgaggtggacgagggcttctgcagccccaagcccagcgagatcaaggacttcagctacgtgtacaagcccgagaactgccagatcctggtgggctgcagcatgttcgcccccctgaagaccctgcccagccagtacctgccccccatcaagctgcccgaggagtgcatctacagacagagctggaccgtgggcaagctggagctgctgagcagcggccccagcatgcccttcatcaaggagggcgacggcagcaacatggaccaggagtacggcaccgcctacaccccccagacccacaccagcttcggcatgccccccagcagcgccccccccagcaacagcggcgccggcatcctgcccagccccagcacccccagattccccacccccagaacccccagaacccccagaacccccagaggcgccggcggccccgccagcgcccagggcagcgtgaagtacgagaacagcgacctgtacagccccgccagcacccccagcacctgcagacccctgaacagcgtggagcccgccaccgtgcccagcatccccgaggcccacagcctgtacgtgaacctgatcctgagcgagagcgtgatgaacctgttcaaggactgcaacttcgacagctgctgcatctgcgtgtgcaacatgaacatcaagggcgccgacgtgggcgtgtacatccccgaccccacccaggaggcccagtacagatgcacctgcggcttcagcgccgtgatgaacagaaagttcggcaacaacagcggcctgttcctggaggacgagctggacatcatcggcagaaacaccgactgcggcaaggaggccgagaagagattcgaggccctgagagccaccagcgccgagcacgtgaacggcggcctgaaggagagcgagaagctgagcgacgacctgatcctgctgctgcaggaccagtgcaccaacctgttcagccccttcggcgccgccgaccaggaccccttccccaagagcggcgtgatcagcaactgggtgagagtggaggagagagactgctgcaacgactgctacctggccctggagcacggcagacagttcatggacaacatgagcggcggcaaggtggacgaggccctggtgaagagcagctgcctgcacccctggagcaagagaaacgacgtgagcatgcagtgcagccaggacatcctgagaatgctgctgagcctgcagcccgtgctgcaggacgccatccagaagaagagaaccgtgagaccctggggcgtgcagggccccctgacctggcagcagttccacaagatggccggcagaggcagctacggcaccgacgagagccccgagcccctgcccatccccaccttcctgctgggctacgactacgactacctggtgctgagccccttcgccctgccctactgggagagactgatgctggagccctacggcagccagagagacatcgcctacgtggtgctgtgccccgagaacgaggccctgctgaacggcgccaagagcttcttcagagacctgaccgccatctacgagagctgcagactgggccagcacagacccgtgagcagactgctgaccgacggcatcatgagagtgggcagcaccgccagcaagaagctgagcgagaagctggtggccgagtggttcagccaggccgccgacggcaacaacgaggccttcagcaagctgaagctgtacgcccaggtgtgcagatacgacctgggcccctacctggccagcctgcccctggacagcagcctgctgagccagcccaacctggtggcccccaccagccagagcctgatcacccccccccagatgaccaacaccggcaacgccaacacccccagcgccaccctggccagcgccgccagcagcaccatgaccgtgaccagcggcgtggccatcagcaccagcgtggccaccgccaacagcaccctgaccaccgccagcaccagcagcagcagcagcagcaacctgaacagcggcgtgagcagcaacaagctgcccagcttcccccccttcggcagcatgaacagcaacgccgccggcagcatgagcacccaggccaacaccgtgcagagcggccagctgggcggccagcagaccagcgccctgcagaccgccggcatcagcggcgagagcagcagcctgcccacccagccccaccccgacgtgagcgagagcaccatggacagagacaaggtgggcatccccaccgacggcgacagccacgccgtgacctacccccccgccatcgtggtgtacatcatcgaccccttcacctacgagaacaccgacgagagcaccaacagcagcagcgtgtggaccctgggcctgctgagatgcttcctggagatggtgcagaccctgcccccccacatcaagagcaccgtgagcgtgcagatcatcccctgccagtacctgctgcagcccgtgaagcacgaggacagagagatctacccccagcacctgaagagcctggccttcagcgccttcacccagtgcagaagacccctgcccaccagcaccaacgtgaagaccctgaccggcttcggccccggcctggccatggagaccgccctgagaagccccgacagacccgagtgcatcagactgtacgccccccccttcatcctggcccccgtgaaggacaagcagaccgagctgggcgagaccttcggcgaggccggccagaagtacaacgtgctgttcgtgggctactgcctgagccacgaccagagatggatcctggccagctgcaccgacctgtacggcgagctgctggagacctgcatcatcaacatcgacgtgcccaacagagccagaagaaagaagagcagcgccagaaagttcggcctgcagaagctgtgggagtggtgcctgggcctggtgcagatgagcagcctgccctggagagtggtgatcggcagactgggcagaatcggccacggcgagctgaaggactggagctgcctgctgagcagaagaaacctgcagagcctgagcaagagactgaaggacatgtgcagaatgtgcggcatcagcgccgccgacagccccagcatcctgagcgcctgcctggtggccatggagccccagggcagcttcgtgatcatgcccgacagcgtgagcaccggcagcgtgttcggcagaagcaccaccctgaacatgcagaccagccagctgaacaccccccaggacaccagctgcacccacatcctggtgttccccaccagcgccagcgtgcaggtggccagcgccacctacaccaccgagaacctggacctggccttcaaccccaacaacgacggcgccgacggcatgggcatcttcgacctgctggacaccggcgacgacctggaccccgacatcatcaacatcctgcccgccagccccaccggcagccccgtgcacagccccggcagccactacccccacggcggcgacgccggcaagggccagagcaccgacagactgctgagcaccgagccccacgaggaggtgcccaacatcctgcagcagcccctggccctgggctacttcgtgagcaccgccaaggccggccccctgcccgactggttctggagcgcctgcccccaggcccagtaccagtgccccctgttcctgaaggccagcctgcacctgcacgtgcccagcgtgcagagcgacgagctgctgcacagcaagcacagccaccccctggacagcaaccagaccagcgacgtgctgagattcgtgctggagcagtacaacgccctgagctggctgacctgcgaccccgccacccaggacagaagaagctgcctgcccatccacttcgtggtgctgaaccagctgtacaacttcatcatgaacatgctgtag

SEQ ID NO: 152999 - DNA, 6525 bp, Artificial Sequence
  derived and/or modified sequence
atgagcgccagcttcgtgcccaacggcgccagcctggaggactgccactgcaacctgttctgcctggccgacctgaccggcatcaagtggaagaagtacgtgtggcagggccccaccagcgcccccatcctgttccccgtgaccgaggaggaccccatcctgagcagcttcagcagatgcctgaaggccgacgtgctgggcgtgtggagaagagaccagagacccggcagaagagagctgtggatcttctggtggggcgaggaccccagcttcgccgacctgatccaccacgacctgagcgaggaggaggacggcgtgtgggagaacggcctgagctacgagtgcagaaccctgctgttcaaggccgtgcacaacctgctggagagatgcctgatgaacagaaacttcgtgagaatcggcaagtggttcgtgaagccctacgagaaggacgagaagcccatcaacaagagcgagcacctgagctgcagcttcaccttcttcctgcacggcgacagcaacgtgtgcaccagcgtggagatcaaccagcaccagcccgtgtacctgctgagcgaggagcacatcaccctggcccagcagagcaacagccccttccaggtgatcctgtgccccttcggcctgaacggcaccctgaccggccaggccttcaagatgagcgacagcgccaccaagaagctgatcggcgagtggaagcagttctaccccatcagctgctgcctgaaggagatgagcgaggagaagcaggaggacatggactgggaggacgacagcctggccgccgtggaggtgctggtggccggcgtgagaatgatctaccccgcctgcttcgtgctggtgccccagagcgacatccccacccccagccccgtgggcagcacccactgcagcagcagctgcctgggcgtgcaccaggtgcccgccagcaccagagaccccgccatgagcagcgtgaccctgaccccccccaccagccccgaggaggtgcagaccgtggacccccagagcgtgcagaagtgggtgaagttcagcagcgtgagcgacggcttcaacagcgacagcaccagccaccacggcggcaagatccccagaaagctggccaaccacgtggtggacagagtgtggcaggagtgcaacatgaacagagcccagaacaagagaaagtacagcgccagcagcggcggcctgtgcgaggaggccaccgccgccaaggtggccagctgggacttcgtggaggccacccagagaaccaactgcagctgcctgagacacaagaacctgaagagcagaaacgccggccagcagggccaggcccccagcctgggccagcagcagcagatcctgcccaagcacaagaccaacgagaagcaggagaagagcgagaagccccagaagagacccctgacccccttccaccacagagtgagcgtgagcgacgacgtgggcatggacgccgacagcgccagccagagactggtgatcagcgcccccgacagccaggtgagattcagcaacatcagaaccaacgacgtggccaagaccccccagatgcacggcaccgagatggccaacagcccccagcccccccccctgagcccccacccctgcgacgtggtggacgagggcgtgaccaagacccccagcaccccccagagccagcacttctaccagatgcccacccccgaccccctggtgcccagcaagcccatggaggacagaatcgacagcctgagccagagcttccccccccagtaccaggaggccgtggagcccaccgtgtacgtgggcaccgccgtgaacctggaggaggacgaggccaacatcgcctggaagtactacaagttccccaagaagaaggacgtggagttcctgcccccccagctgcccagcgacaagttcaaggacgaccccgtgggccccttcggccaggagagcgtgaccagcgtgaccgagctgatggtgcagtgcaagaagcccctgaaggtgagcgacgagctggtgcagcagtaccagatcaagaaccagtgcctgagcgccatcgccagcgacgccgagcaggagcccaagatcgacccctacgccttcgtggagggcgacgaggagttcctgttccccgacaagaaggacagacagaacagcgagagagaggccggcaagaagcacaaggtggaggacggcaccagcagcgtgaccgtgctgagccacgaggaggacgccatgagcctgttcagccccagcatcaagcaggacgcccccagacccaccagccacgccagaccccccagcaccagcctgatctacgacagcgacctggccgtgagctacaccgacctggacaacctgttcaacagcgacgaggacgagctgacccccggcagcaagaagagcgccaacggcagcgacgacaaggccagctgcaaggagagcaagaccggcaacctggaccccctgagctgcatcagcaccgccgacctgcacaagatgtaccccaccccccccagcctggagcagcacatcatgggcttcagccccatgaacatgaacaacaaggagtacggcagcatggacaccacccccggcggcaccgtgctggagggcaacagcagcagcatcggcgcccagttcaagatcgaggtggacgagggcttctgcagccccaagcccagcgagatcaaggacttcagctacgtgtacaagcccgagaactgccagatcctggtgggctgcagcatgttcgcccccctgaagaccctgcccagccagtacctgccccccatcaagctgcccgaggagtgcatctacagacagagctggaccgtgggcaagctggagctgctgagcagcggccccagcatgcccttcatcaaggagggcgacggcagcaacatggaccaggagtacggcaccgcctacaccccccagacccacaccagcttcggcatgccccccagcagcgccccccccagcaacagcggcgccggcatcctgcccagccccagcacccccagattccccacccccagaacccccagaacccccagaacccccagaggcgccggcggccccgccagcgcccagggcagcgtgaagtacgagaacagcgacctgtacagccccgccagcacccccagcacctgcagacccctgaacagcgtggagcccgccaccgtgcccagcatccccgaggcccacagcctgtacgtgaacctgatcctgagcgagagcgtgatgaacctgttcaaggactgcaacttcgacagctgctgcatctgcgtgtgcaacatgaacatcaagggcgccgacgtgggcgtgtacatccccgaccccacccaggaggcccagtacagatgcacctgcggcttcagcgccgtgatgaacagaaagttcggcaacaacagcggcctgttcctggaggacgagctggacatcatcggcagaaacaccgactgcggcaaggaggccgagaagagattcgaggccctgagagccaccagcgccgagcacgtgaacggcggcctgaaggagagcgagaagctgagcgacgacctgatcctgctgctgcaggaccagtgcaccaacctgttcagccccttcggcgccgccgaccaggaccccttccccaagagcggcgtgatcagcaactgggtgagagtggaggagagagactgctgcaacgactgctacctggccctggagcacggcagacagttcatggacaacatgagcggcggcaaggtggacgaggccctggtgaagagcagctgcctgcacccctggagcaagagaaacgacgtgagcatgcagtgcagccaggacatcctgagaatgctgctgagcctgcagcccgtgctgcaggacgccatccagaagaagagaaccgtgagaccctggggcgtgcagggccccctgacctggcagcagttccacaagatggccggcagaggcagctacggcaccgacgagagccccgagcccctgcccatccccaccttcctgctgggctacgactacgactacctggtgctgagccccttcgccctgccctactgggagagactgatgctggagccctacggcagccagagagacatcgcctacgtggtgctgtgccccgagaacgaggccctgctgaacggcgccaagagcttcttcagagacctgaccgccatctacgagagctgcagactgggccagcacagacccgtgagcagactgctgaccgacggcatcatgagagtgggcagcaccgccagcaagaagctgagcgagaagctggtggccgagtggttcagccaggccgccgacggcaacaacgaggccttcagcaagctgaagctgtacgcccaggtgtgcagatacgacctgggcccctacctggccagcctgcccctggacagcagcctgctgagccagcccaacctggtggcccccaccagccagagcctgatcacccccccccagatgaccaacaccggcaacgccaacacccccagcgccaccctggccagcgccgccagcagcaccatgaccgtgaccagcggcgtggccatcagcaccagcgtggccaccgccaacagcaccctgaccaccgccagcaccagcagcagcagcagcagcaacctgaacagcggcgtgagcagcaacaagctgcccagcttcccccccttcggcagcatgaacagcaacgccgccggcagcatgagcacccaggccaacaccgtgcagagcggccagctgggcggccagcagaccagcgccctgcagaccgccggcatcagcggcgagagcagcagcctgcccacccagccccaccccgacgtgagcgagagcaccatggacagagacaaggtgggcatccccaccgacggcgacagccacgccgtgacctacccccccgccatcgtggtgtacatcatcgaccccttcacctacgagaacaccgacgagagcaccaacagcagcagcgtgtggaccctgggcctgctgagatgcttcctggagatggtgcagaccctgcccccccacatcaagagcaccgtgagcgtgcagatcatcccctgccagtacctgctgcagcccgtgaagcacgaggacagagagatctacccccagcacctgaagagcctggccttcagcgccttcacccagtgcagaagacccctgcccaccagcaccaacgtgaagaccctgaccggcttcggccccggcctggccatggagaccgccctgagaagccccgacagacccgagtgcatcagactgtacgccccccccttcatcctggcccccgtgaaggacaagcagaccgagctgggcgagaccttcggcgaggccggccagaagtacaacgtgctgttcgtgggctactgcctgagccacgaccagagatggatcctggccagctgcaccgacctgtacggcgagctgctggagacctgcatcatcaacatcgacgtgcccaacagagccagaagaaagaagagcagcgccagaaagttcggcctgcagaagctgtgggagtggtgcctgggcctggtgcagatgagcagcctgccctggagagtggtgatcggcagactgggcagaatcggccacggcgagctgaaggactggagctgcctgctgagcagaagaaacctgcagagcctgagcaagagactgaaggacatgtgcagaatgtgcggcatcagcgccgccgacagccccagcatcctgagcgcctgcctggtggccatggagccccagggcagcttcgtgatcatgcccgacagcgtgagcaccggcagcgtgttcggcagaagcaccaccctgaacatgcagaccagccagctgaacaccccccaggacaccagctgcacccacatcctggtgttccccaccagcgccagcgtgcaggtggccagcgccacctacaccaccgagaacctggacctggccttcaaccccaacaacgacggcgccgacggcatgggcatcttcgacctgctggacaccggcgacgacctggaccccgacatcatcaacatcctgcccgccagccccaccggcagccccgtgcacagccccggcagccactacccccacggcggcgacgccggcaagggccagagcaccgacagactgctgagcaccgagccccacgaggaggtgcccaacatcctgcagcagcccctggccctgggctacttcgtgagcaccgccaaggccggccccctgcccgactggttctggagcgcctgcccccaggcccagtaccagtgccccctgttcctgaaggccagcctgcacctgcacgtgcccagcgtgcagagcgacgagctgctgcacagcaagcacagccaccccctggacagcaaccagaccagcgacgtgctgagattcgtgctggagcagtacaacgccctgagctggctgacctgcgaccccgccacccaggacagaagaagctgcctgcccatccacttcgtggtgctgaaccagctgtacaacttcatcatgaacatgctgtag

SEQ ID NO: 153000 - protein, 348 aa, Artificial Sequence
  derived and/or modified sequence
MASREDELRNCVVCGDQATGYHFNALTCEGCKGFFRRTVSKSIGPTCPFAGSCEVSKTQRRHCPACRLQKCLDAGMRKDMILSAEALALRRAKQAQRRAQQTPVQLSKEQEELIRTLLGAHTRHMGTMFEQFVQFRPPAHLFIHHQPLPTLAPVLPLVTHFADINTFMVLQVIKFTKDLPVFRSLPIEDQISLLKGAAVEICHIVLNTTFCLQTQNFLCGPLRYTIEDGARVGFQVEFLELLFHFHGTLRKLQLQEPEYVLLAAMALFSPDRPGVTQRDEIDQLQEEMALTLQSYIKGQQRRPRDRFLYAKLLGLLAELRSINEAYGYQIQHIQGLSAMMPLLQEICS

SEQ ID NO: 153001 - protein, 147 aa, Artificial Sequence
  derived and/or modified sequence
MASREDELRNCVVCGDQATGYHFNALTCEGCKGFFRRTVSKSIGPTCPFAGSCEVSKTQRRHCPACRLQKCLDAGMRKDIPCPLKTRSPFSREQLWKSVTSYSIPLSVSKHKTSSAGLFATQLKMEPVTDLELPREMRLISCKRRWH

SEQ ID NO: 153002 - DNA, 1381 bp, Artificial Sequence
  derived and/or modified sequence
ataaaacagacatctcttgttttccagatactacgggtcataatccctaactccaatcactggcaactcctgagatcagaggaaaaccagcaacagcgtgggagtttggggagaggcattccataccagattctgtggcctgcaggtgacatgctgcctaagagaagcaggagtctgtgacagccaccccaacacgtgacgtcatggccagtagggaagatgagctgaggaactgtgtggtatgtggggaccaagccacaggctaccactttaatgcgctgacttgtgagggctgcaagggtttcttcaggagaacagtcagcaaaagcattggtcccacctgcccctttgctggaagctgtgaagtcagcaagactcagaggcgccactgcccagcctgcaggttgcagaagtgcttagatgctggcatgaggaaagacatgatactgtcggcagaagccctggcattgcggcgagcaaagcaggcccagcggcgggcacagcaaacacctgtgcaactgagtaaggagcaagaagagctgatccggacactcctgggggcccacacccgccacatgggcaccatgtttgaacagtttgtgcagtttaggcctccagctcatctgttcatccatcaccagcccttgcccaccctggcccctgtgctgcctctggtcacacacttcgcagacatcaacactttcatggtactgcaagtcatcaagtttactaaggacctgcccgtcttccgttccctgcccattgaagaccagatctcccttctcaagggagcagctgtggaaatctgtcacatcgtactcaataccactttctgtctccaaacacaaaacttcctctgcgggcctcttcgctacacaattgaagatggagcccgtgtggggttccaggtagagtttttggagttgctctttcacttccatggaacactacgaaaactgcagctccaagagcctgagtatgtgctcttggctgccatggccctcttctctcctgaccgacctggagttacccagagagatgagattgatcagctgcaagaggagatggcactgactctgcaaagctacatcaagggccagcagcgaaggccccgggatcggtttctgtatgcgaagttgctaggcctgctggctgagctccggagcattaatgaggcctacgggtaccaaatccagcacatccagggcctgtctgccatgatgccgctgctccaggagatctgcagctgaggccatgctcacttccttccccagctcacctggaacaccctggatacactggagtgggaaaatgctgggaccaaagattgggccgggttcaaagggagcccagtggttgcaatgaaagactaaagcaataa

SEQ ID NO: 153003 - DNA, 1047 bp, Artificial Sequence
  derived and/or modified sequence
atggcctcccgcgaggatgagcttcgcaattgtgtcgtgtgtggcgatcaggctaccggatatcattttaacgcactgacctgtgaaggttgtaaaggcttcttcaggcgaaccgtaagcaaatctatagggccaacttgtccattcgcaggcagttgcgaagtttcaaaaacccagcgccgacactgtcccgcctgccgcctgcagaaatgtctggacgccggcatgcgaaaggatatgattctgagtgcagaggctctagcactgcggcgggctaaacaagcacaacgcagagcccagcagacccccgtgcagttgtccaaagagcaggaagagctgattcggacactgcttggcgctcatactcggcacatgggaacaatgttcgaacagttcgtgcagttcaggcctcccgcacacttattcattcaccatcagcctttaccaactctggcccccgtgttgcctctggttacacattttgcagatatcaacacttttatggtcctccaggtgattaaattcaccaaggatctcccggtttttagatctttgccgattgaggaccagatttcattactcaagggcgcagccgtggagatttgtcatatcgttttgaacaccaccttctgtctccagacccagaatttcctctgtggaccactgcggtacacaatcgaagacggggcgcgggtagggtttcaggtggagttcctcgagctgctatttcactttcatgggactctgcgcaagctgcagctacaagaacctgagtacgtccttttggcagctatggcacttttctcacccgacaggccgggcgtcacccaaagagatgagatcgatcaactccaagaagagatggctctgacattgcagtcctacatcaaagggcagcagcggcgcccgcgggaccggttcctctatgccaaactgctcggcctactggccgagctgagatcaattaatgaggcctacggttatcagatccagcacatccaaggtctcagcgccatgatgcccctcctccaagaaatttgtagctag

SEQ ID NO: 153004 - DNA, 1473 bp, Artificial Sequence
  derived and/or modified sequence
gtcatgctgggaaaacctcccacccaggcctttgccctgagtccagggtctgtgccctaaccccacagtcactgagagcaactggaggccacataaaacagacatctcttgttttccagatactacgggtcataatccctaactccaatcactggcaactcctgagatcagaggaaaaccagcaacagcgtgggagtttggggagaggcattccataccagattctgtggcctgcaggtgacatgctgcctaagagaagcaggagtctgtgacagccaccccaacacgtgacgtcatggccagtagggaagatgagctgaggaactgtgtggtatgtggggaccaagccacaggctaccactttaatgcgctgacttgtgagggctgcaagggtttcttcaggagaacagtcagcaaaagcattggtcccacctgcccctttgctggaagctgtgaagtcagcaagactcagaggcgccactgcccagcctgcaggttgcagaagtgcttagatgctggcatgaggaaagacatgatactgtcggcagaagccctggcattgcggcgagcaaagcaggcccagcggcgggcacagcaaacacctgtgcaactgagtaaggagcaagaagagctgatccggacactcctgggggcccacacccgccacatgggcaccatgtttgaacagtttgtgcagtttaggcctccagctcatctgttcatccatcaccagcccttgcccaccctggcccctgtgctgcctctggtcacacacttcgcagacatcaacactttcatggtactgcaagtcatcaagtttactaaggacctgcccgtcttccgttccctgcccattgaagaccagatctcccttctcaagggagcagctgtggaaatctgtcacatcgtactcaataccactttctgtctccaaacacaaaacttcctctgcgggcctcttcgctacacaattgaagatggagcccgtgtggggttccaggtagagtttttggagttgctctttcacttccatggaacactacgaaaactgcagctccaagagcctgagtatgtgctcttggctgccatggccctcttctctcctgaccgacctggagttacccagagagatgagattgatcagctgcaagaggagatggcactgactctgcaaagctacatcaagggccagcagcgaaggccccgggatcggtttctgtatgcgaagttgctaggcctgctggctgagctccggagcattaatgaggcctacgggtaccaaatccagcacatccagggcctgtctgccatgatgccgctgctccaggagatctgcagctgaggccatgctcacttccttccccagctcacctggaacaccctggatacactggagtgggaaaatgctgggaccaaagattgggccgggttcaaagggagcccagtggttgcaatgaaagactaaagcaataa

SEQ ID NO: 153005 - DNA, 1047 bp, Artificial Sequence
  derived and/or modified sequence
atggccagcagagaagatgagctgaggaactgtgtggtgtgtggggaccaggccaccggctaccacttcaatgccctgacctgtgagggctgcaagggcttcttccggaggacagtgtccaagagcatcggccccacctgcccctttgctggcagctgtgaggtgtccaagacccagaggaggcactgcccagcctgccgcctgcagaagtgcctggatgctggcatgaggaaggacatgatcctgtctgctgaggccctggccctgcggcgggccaagcaggcccagaggcgggcccagcagacccctgtgcagctgagcaaggagcaggaggagctgatccgcaccctgctgggcgcccacaccaggcacatgggcaccatgtttgagcagtttgtgcagttccggcccccagcccacctgttcatccaccaccagcccctgcccaccctggcccctgtgctgcccctggtgacccactttgctgacatcaacaccttcatggtgctgcaggtgatcaagttcaccaaggacctgcccgtcttccgcagcctgcccatcgaggaccagatcagcctgctgaagggagctgctgtggagatctgccacatcgtgctgaacaccaccttctgcctgcagacccagaacttcctgtgtggccccctgcgctacaccattgaagatggagcccgggtgggcttccaggtggagttcctggagctgctcttccacttccacggcaccctgaggaagctgcagctgcaggagccagaatatgtgctgctggccgccatggccctcttctccccagacaggcctggggtgacccagagagatgaaattgaccagctgcaggaggagatggccctgaccctgcagagctacatcaagggccagcagaggcggccccgggaccgcttcctgtatgccaagctgctgggcctgctggccgagctgcggagcatcaatgaggcctacggctaccagatccagcacatccagggcctgagcgccatgatgcccctgctgcaggagatctgcagctag

SEQ ID NO: 153006 - DNA, 1047 bp, Artificial Sequence
  derived and/or modified sequence
atggccagccgggaggacgagctgcggaactgcgtggtgtgcggcgaccaggcaactgggtaccacttcaatgcactcacttgtgaggggtgcaagggcttctttaggcgaacagtgtcaaagtcgatcgggcccacatgcccgttcgcaggatcatgtgaggtgagcaaaacccagaggagacattgtcccgcctgtcggctgcagaagtgccttgacgccggtatgcggaaggatatgatactctcagccgaggccctggcgcttcggagagcgaaacaggctcagcggagggctcagcagaccccagtacaactctctaaagagcaggaggagctgatccgcaccctcctgggtgcacatacccgacacatgggtactatgtttgagcagtttgtgcaattcagaccgcccgcgcatctgtttatacatcaccagccgctccccacccttgcgcctgtgctccccttggtgacccatttcgcagacatcaatacatttatggtgctacaggtgattaagtttactaaagatctccctgtgtttaggtcactccccatcgaggatcagatcagtctgctgaagggcgccgctgtggagatatgccacattgtcttgaacaccacattctgtttgcagacacagaattttctgtgtggcccactgagatataccatcgaagatggcgcccgcgtgggatttcaggtcgagttcctcgaattgctattccattttcatggtaccctccggaagctccaactccaggaacctgagtacgtcctgctcgccgccatggctctgttctccccagatcggcccggcgtcacccagagggacgaaatcgaccaattgcaggaagagatggctctgacactccagtcttacattaagggccagcagagaaggcccagagatcgatttttatacgccaagctgctcggcctcctcgccgaactcagatcaataaacgaagcttacggatatcaaatacagcacatccagggactgagtgctatgatgccactgcttcaggagatttgctcttag

SEQ ID NO: 153007 - DNA, 1047 bp, Artificial Sequence
  derived and/or modified sequence
atggcctcccgagaagatgaattaaggaactgtgtcgtgtgcggagatcaggcgaccgggtaccatttcaacgcactgacttgtgaagggtgtaagggattttttcggcgtactgtgagcaagagtatcggccctacttgtccttttgctggcagttgtgaagtgagcaagacccagcggagacactgccctgcgtgtaggctccagaaatgcctggatgctggaatgaggaaggacatgatcctgagcgccgaagcactcgcccttcgccgagccaagcaggcacaaaggagggctcagcaaacgcctgttcagttgtcaaaagagcaggaagaactcatcaggaccttgctgggcgcacacactcgccatatgggcacaatgtttgagcaattcgtgcaatttaggcctcctgcccacctttttattcatcatcagcccctcccaacactggccccagtcttgcccctggttacacatttcgcggatatcaataccttcatggtcttgcaggtgatcaaatttaccaaggatttaccagtgtttcgatcattgcctatcgaggatcagattagcctattaaaaggtgcagcagtggagatttgtcacatcgtgctgaatacgacattttgtctgcaaacacagaacttcctctgtggccctttacggtatactatcgaagatggtgccagagtgggcttccaggtagaattcctggagctcttattccattttcacgggaccctcaggaagctgcagcttcaggagcctgaatacgtgctgctggctgcgatggcactgttctctcctgaccggcctggagtaactcagagggacgaaatcgaccagctgcaggaggagatggccttgactctccaatcatacattaaaggccagcaaagacgccctcgcgacaggtttctttatgctaaacttcttggcctgctggcggaactgaggtctatcaatgaggcctacgggtatcagattcaacacatccaagggctctccgcaatgatgcctcttctgcaagaaatctgttcttag

SEQ ID NO: 153008 - DNA, 1047 bp, Artificial Sequence
  derived and/or modified sequence
atggccagcagagaggacgagctgagaaactgcgtggtgtgcggcgaccaggccaccggctaccacttcaacgccctgacctgcgagggctgcaagggcttcttcagaagaaccgtgagcaagagcatcggccccacctgccccttcgccggcagctgcgaggtgagcaagacccagagaagacactgccccgcctgcagactgcagaagtgcctggacgccggcatgagaaaggacatgatcctgagcgccgaggccctggccctgagaagagccaagcaggcccagagaagagcccagcagacccccgtgcagctgagcaaggagcaggaggagctgatcagaaccctgctgggcgcccacaccagacacatgggcaccatgttcgagcagttcgtgcagttcagaccccccgcccacctgttcatccaccaccagcccctgcccaccctggcccccgtgctgcccctggtgacccacttcgccgacatcaacaccttcatggtgctgcaggtgatcaagttcaccaaggacctgcccgtgttcagaagcctgcccatcgaggaccagatcagcctgctgaagggcgccgccgtggagatctgccacatcgtgctgaacaccaccttctgcctgcagacccagaacttcctgtgcggccccctgagatacaccatcgaggacggcgccagagtgggcttccaggtggagttcctggagctgctgttccacttccacggcaccctgagaaagctgcagctgcaggagcccgagtacgtgctgctggccgccatggccctgttcagccccgacagacccggcgtgacccagagagacgagatcgaccagctgcaggaggagatggccctgaccctgcagagctacatcaagggccagcagagaagacccagagacagattcctgtacgccaagctgctgggcctgctggccgagctgagaagcatcaacgaggcctacggctaccagatccagcacatccagggcctgagcgccatgatgcccctgctgcaggagatctgcagctag

SEQ ID NO: 153009 - protein, 472 aa, Artificial Sequence
  derived and/or modified sequence
MGSKMNLIEHSHLPTTDEFSFSENLFGVLTEQVAGPLGQNLEVEPYSQYSNVQFPQVQPQISSSSYYSNLGFYPQQPEEWYSPGIYELRRMPAETLYQGETEVAEMPVTKKPRMGASAGRIKGDELCVVCGDRASGYHYNALTCEGCKGFFRRSITKNAVYKCKNGGNCVMDMYMRRKCQECRLRKCKEMGMLAECLLTEIQCKSKRLRKNVKQHADQTVNEDSEGRDLRQVTSTTKSCREKTELTPDQQTLLHFIMDSYNKQRMPQEITNKILKEEFSAEENFLILTEMATNHVQVLVEFTKKLPGFQTLDHEDQIALLKGSAVEAMFLRSAEIFNKKLPSGHSDLLEERIRNSGISDEYITPMFSFYKSIGELKMTQEEYALLTAIVILSPDRQYIKDREAVEKLQEPLLDVLQKLCKIHQPENPQHFACLLGRLTELRTFNHHHAEMLMSWRVNDHKFTPLLCEIWDVQ

SEQ ID NO: 153010 - DNA, 2213 bp, Artificial Sequence
  derived and/or modified sequence
actctctcctcctcctcacctcattgtctccccgacttatcctaatgcgaaattggattctgagcatttgtagcaaaatcgctgggatctggagaggaagactcagtccagaatcctcccagggccttgaaagtccatctctgacccaaaacaatccaaggaggtagaagacatcgtagaaggagtgaaagaagaaaagaagacttagaaacatagctcaaagtgaacactgcttctcttagtttcctggatttcttctggacatttcctcaagatgaaacttcagacactttggagttttttttgaagaccaccataaagaaagtgcatttcaattgaaaaatttggatgggatcaaaaatgaatctcattgaacattcccatttacctaccacagatgaattttctttttctgaaaatttatttggtgttttaacagaacaagtggcaggtcctctgggacagaacctggaagtggaaccatactcgcaatacagcaatgttcagtttccccaagttcaaccacagatttcctcgtcatcctattattccaacctgggtttctacccccagcagcctgaagagtggtactctcctggaatatatgaactcaggcgtatgccagctgagactctctaccagggagaaactgaggtagcagagatgcctgtaacaaagaagccccgcatgggcgcgtcagcagggaggatcaaaggggatgagctgtgtgttgtttgtggagacagagcctctggataccactataatgcactgacctgtgaggggtgtaaaggtttcttcaggagaagcattaccaaaaacgctgtgtacaagtgtaaaaacgggggcaactgtgtgatggatatgtacatgcgaagaaagtgtcaagagtgtcgactaaggaaatgcaaagagatgggaatgttggctgaatgcttgttaactgaaattcagtgtaaatctaagcgactgagaaaaaatgtgaagcagcatgcagatcagaccgtgaatgaagacagtgaaggtcgtgacttgcgacaagtgacctcgacaacaaagtcatgcagggagaaaactgaactcaccccagatcaacagactcttctacattttattatggattcatataacaaacagaggatgcctcaggaaataacaaataaaattttaaaagaagaattcagtgcagaagaaaattttctcattttgacggaaatggcaaccaatcatgtacaggttcttgtagaattcacaaaaaagctaccaggatttcagactttggaccatgaagaccagattgctttgctgaaagggtctgcggttgaagctatgttccttcgttcagctgagattttcaataagaaacttccgtctgggcattctgacctattggaagaaagaattcgaaatagtggtatctctgatgaatatataacacctatgtttagtttttataaaagtattggggaactgaaaatgactcaagaggagtatgctctgcttacagcaattgttatcctgtctccagatagacaatacataaaggatagagaggcagtagagaagcttcaggagccacttcttgatgtgctacaaaagttgtgtaagattcaccagcctgaaaatcctcaacactttgcctgtctcctgggtcgcctgactgaattacggacattcaatcatcaccacgctgagatgctgatgtcatggagagtaaacgaccacaagtttaccccacttctctgtgaaatctgggacgtgcagtgatggggattacaggggaggggtctagctcctttttctctctcatattaatctgatgtataactttcctttatttcacttgtacccagtttcactcaagaaatcttgatgaatatttatgttgtaattacatgtgtaacttccacaactgtaaatattgggctagatagaacaactttctctacattgtgttttaaaaggctccagggaatcctgcattctaattggcaagccctgtttgcctaattaaattgattgttacttcaattctatctgttgaactagggaaaatctcattttgctcatcttaccatattgcatatattttattaaagagttgtattcaatcttggcaataaagcaaacataatggcaacagaaaaaaaaaaaaaaaaaaaaaaaaaaaaaaaaaaaaaaaaaaaaaaaaaaaaaaaaaaaaaaaaaaaaaa

SEQ ID NO: 153011 - DNA, 1419 bp, Artificial Sequence
  derived and/or modified sequence
atgggcagcaagatgaatttgattgaacattctcatttgcccacaacagatgagtttagtttcagcgagaacctgtttggtgtcctgaccgagcaagtagccggaccccttgggcagaatcttgaggttgagccctattcccaatatagtaatgtgcaatttcctcaagtgcagccacagataagcagctctagttactacagtaatcttgggttttatccccagcaaccagaggaatggtattcccccggtatctacgaactcagaagaatgccggcagaaacactctaccaaggggagaccgaagttgccgaaatgcctgtgactaagaaacccagaatgggtgctagcgcaggtcgtatcaagggcgatgagctttgtgtggtgtgtggagatcgtgccagcggctaccattacaatgcactgacctgtgagggctgcaagggattcttcagacggtccattactaagaatgctgtctataaatgtaagaacggaggtaactgtgtgatggatatgtacatgaggaggaagtgccaggagtgtagattgcgcaagtgcaaggaaatgggcatgctggcagagtgcctgctaactgagattcagtgcaagtctaaacgcctaagaaaaaacgtgaagcaacatgcagaccagaccgtaaacgaggacagcgaaggtcgggatctacgccaggtcacttcaacaactaagtcatgccgtgaaaagacagagctgacacctgatcagcaaaccctcctgcactttatcatggacagctataacaaacagagaatgccccaagagatcacaaataagattctgaaggaggaattctctgcagaggaaaatttcctgatcctgaccgaaatggctactaaccatgttcaagtgctcgttgaatttacgaagaaactccctggcttccagacactcgaccacgaagaccagattgcacttttgaagggatctgcagttgaagctatgttcctgcggtccgctgaaatattcaataaaaagctcccctctggacactccgacctgctagaggagagaattcggaattccggtatcagtgatgaatacattacgcctatgttctccttctacaagtctataggggaactgaagatgacacaggaagaatacgcgctgctgacagccattgtaatactctctccagaccgccagtacatcaaagatagggaagctgtcgagaaattgcaggaaccactgctggatgtgctccaaaagctctgcaagatacaccagccagaaaatccccaacatttcgcctgtcttttagggagacttacagaactgagaaccttcaatcatcatcatgccgagatgcttatgagttggcgcgtgaacgaccacaagtttactcctcttctgtgcgaaatatgggatgtgcagtag

SEQ ID NO: 153012 - DNA, 2884 bp, Artificial Sequence
  derived and/or modified sequence
acattcctcattctggggctttgcggttttgtcttgggaatctcgaggctctcccaaggttcctttctatgtttatatcatttagcagggaaggattgttaatgactaatctgtgtccatgaggcacagagccaaggaagagatgctgctgctagcccagaaggccgcctgtgatcatgcacagtacactggaactctctcctcctcctcacctcattgtctccccgacttatcctaatgcgaaattggattctgagcatttgtagcaaaatcgctgggatctggagaggaagactcagtccagaatcctcccagggccttgaaagtccatctctgacccaaaacaatccaaggaggtagaagacatcgtagaaggagtgaaagaagaaaagaagacttagaaacatagctcaaagtgaacactgcttctcttagtttcctggatttcttctggacatttcctcaagatgaaacttcagacactttggagttttttttgaagaccaccataaagaaagtgcatttcaattgaaaaatttggatgggatcaaaaatgaatctcattgaacattcccatttacctaccacagatgaattttctttttctgaaaatttatttggtgttttaacagaacaagtggcaggtcctctgggacagaacctggaagtggaaccatactcgcaatacagcaatgttcagtttccccaagttcaaccacagatttcctcgtcatcctattattccaacctgggtttctacccccagcagcctgaagagtggtactctcctggaatatatgaactcaggcgtatgccagctgagactctctaccagggagaaactgaggtagcagagatgcctgtaacaaagaagccccgcatgggcgcgtcagcagggaggatcaaaggggatgagctgtgtgttgtttgtggagacagagcctctggataccactataatgcactgacctgtgaggggtgtaaaggtttcttcaggagaagcattaccaaaaacgctgtgtacaagtgtaaaaacgggggcaactgtgtgatggatatgtacatgcgaagaaagtgtcaagagtgtcgactaaggaaatgcaaagagatgggaatgttggctgaatgcttgttaactgaaattcagtgtaaatctaagcgactgagaaaaaatgtgaagcagcatgcagatcagaccgtgaatgaagacagtgaaggtcgtgacttgcgacaagtgacctcgacaacaaagtcatgcagggagaaaactgaactcaccccagatcaacagactcttctacattttattatggattcatataacaaacagaggatgcctcaggaaataacaaataaaattttaaaagaagaattcagtgcagaagaaaattttctcattttgacggaaatggcaaccaatcatgtacaggttcttgtagaattcacaaaaaagctaccaggatttcagactttggaccatgaagaccagattgctttgctgaaagggtctgcggttgaagctatgttccttcgttcagctgagattttcaataagaaacttccgtctgggcattctgacctattggaagaaagaattcgaaatagtggtatctctgatgaatatataacacctatgtttagtttttataaaagtattggggaactgaaaatgactcaagaggagtatgctctgcttacagcaattgttatcctgtctccagatagacaatacataaaggatagagaggcagtagagaagcttcaggagccacttcttgatgtgctacaaaagttgtgtaagattcaccagcctgaaaatcctcaacactttgcctgtctcctgggtcgcctgactgaattacggacattcaatcatcaccacgctgagatgctgatgtcatggagagtaaacgaccacaagtttaccccacttctctgtgaaatctgggacgtgcagtgatggggattacaggggaggggtctagctcctttttctctctcatattaatctgatgtataactttcctttatttcacttgtacccagtttcactcaagaaatcttgatgaatatttatgttgtaattacatgtgtaacttccacaactgtaaatattgggctagatagaacaactttctctacattgtgttttaaaaggctccagggaatcctgcattctaattggcaagccctgtttgcctaattaaattgattgttacttcaattctatctgttgaactagggaaaatctcattttgctcatcttaccatattgcatatattttattaaagagttgtattcaatcttggcaataaagcaaacataatggcaacaggattttctttgggaacaaaatttgataaatatacaaactcatttctttaaatgttgaaagacatcctattgaatctgagggggtaatttacagaaagatactgtctctcgcacttttgtcatctctggaaaagtcctggtgaatagtcattcatttgtaatagccctctgatcatttccttttctttgaagttcaaagagaatagcaaacagaaaagttaacaattttcacataaaatattccctcaagcaatcctttcccccatagttagtcttgaggcaggattcacaaattcagagtatgcagctaactgcagtgatgggaccttcgctttcctctcttaaaagtgaggaaatgattggcttcattgtatccaatcatctttctgttttgttttgcttttgaaaacattcctacagctgggagcacagctgctgtatacttcccccaaagcaggaattagttcatttccttccttcattgttacactgttgcattcttctccctattatcctttggtgaatacaataaaacaccttctataagta

SEQ ID NO: 153013 - DNA, 1419 bp, Artificial Sequence
  derived and/or modified sequence
atgggcagcaagatgaacctgattgagcacagccacctgcccaccacagatgagttctccttcagcgagaacctgtttggagtgctgacagagcaggtggccggccccctgggccagaacctggaggtggagccctacagccagtacagcaatgtgcagttcccccaggtgcagccccagatcagcagcagcagctactacagcaacctgggcttctacccccagcagcctgaggagtggtacagccctggcatctatgagctgcggaggatgcctgctgagaccctgtaccagggcgagacagaggtggccgagatgcctgtgaccaagaagcccaggatgggcgccagcgctggccgcatcaagggagatgagctgtgtgtggtgtgtggggaccgggccagcggctaccactacaatgccctgacctgtgagggctgcaagggcttcttccgccgcagcatcaccaagaatgctgtgtacaagtgcaagaatggaggcaactgtgtgatggacatgtacatgaggaggaagtgccaggagtgccgcctgaggaagtgcaaggagatgggcatgctggctgaatgtctgctgacagagatccagtgcaagagcaagaggctgaggaagaatgtgaagcagcacgccgaccagacagtgaatgaagacagcgagggccgggacctgcggcaggtgaccagcaccaccaagagctgccgggagaagacagagctgaccccagaccagcagaccctgctgcacttcatcatggacagctacaacaagcagaggatgccccaggagatcaccaacaagatcctgaaggaggagttctctgctgaggagaacttcctgatcctgacagagatggccaccaaccacgtgcaggtgctggtggagttcaccaagaagctgcccggcttccagaccctggaccacgaggaccagatcgccctgctgaagggcagcgctgtggaggccatgttcctgcggtctgctgagatcttcaacaagaagctgcccagcggccacagcgacctgctggaggagcgcatcagaaattctggcatcagtgatgagtacatcacccccatgttctccttctacaagagcatcggggagctgaagatgacccaggaggagtatgccctgctgacagccatcgtcatcctgagcccagaccggcagtacatcaaggaccgggaggccgtggagaagctgcaggagcccctgctggatgtgctgcagaagctgtgcaagatccaccagcctgagaacccccagcactttgcctgcctgctgggccgcctgacagagctgcggaccttcaaccaccaccacgccgagatgctgatgtcctggagggtgaatgaccacaagttcacccccctgctgtgtgagatctgggatgtgcagtag

SEQ ID NO: 153014 - DNA, 1419 bp, Artificial Sequence
  derived and/or modified sequence
atgggcagcaagatgaacctgatcgagcacagccacctgcccaccaccgacgagttcagtttctccgaaaacttgttcggggtgctgaccgaacaggtagccggccctctgggccaaaatctggaggtggagccttattcccaatattctaatgtacagttcccacaggtgcagccacaaatatcctccagtagctactacagtaacctcggattttatccccaacaacctgaagaatggtactcccctgggatctacgaactccgaaggatgcccgcggaaactctgtaccagggcgagacagaggtagctgaaatgccagttacgaaaaagcctcgtatgggggcatccgccggcaggataaaaggcgacgaattgtgtgtcgtctgtggcgaccgggcctccggctaccactataacgccctcacatgcgaaggatgcaaaggattctttagaagatctatcacaaaaaatgccgtgtacaagtgcaagaatggagggaactgcgtgatggatatgtatatgcggcgcaaatgccaggagtgtaggttgagaaaatgtaaggagatgggtatgcttgccgagtgtctccttacggaaatccagtgtaagtcaaagcggttgcgtaagaacgtcaagcaacatgcagatcagacagtgaacgaggactccgaagggagagatttgcgtcaggtaaccagtaccactaagagttgtcgggagaagactgagctgacgcctgatcagcagaccctgctgcattttatcatggattcttataacaaacaacggatgccgcaagagatcaccaataaaattctcaaggaggagttctcagccgaagagaatttcctgatcctgacggaaatggctaccaaccatgtccaagtcctcgtcgaattcactaagaagctacctggtttccaaacgttagaccatgaggatcaaattgcccttctgaagggatccgccgtcgaagctatgttcttaaggtcagccgaaatcttcaacaagaagctaccttctggacactcggaccttctcgaagagcggattaggaattctgggattagtgatgaatacatcacccccatgttctccttctacaagagtattggggaattaaagatgacacaggaagaatatgctcttttgactgcaattgttatcttaagccctgacaggcagtacattaaagaccgggaagccgtcgaaaaactccaggagccactgctggacgttctgcaaaaactctgcaagattcatcagccagaaaacccacagcactttgcatgcctgctgggacgattaaccgaactcaggactttcaaccaccaccatgcagaaatgctgatgtcctggcgagtgaatgatcataagttcaccccactgctctgtgagatttgggatgtgcagtag

SEQ ID NO: 153015 - DNA, 1419 bp, Artificial Sequence
  derived and/or modified sequence
atgggctctaaaatgaacctcatcgagcactcacacctgcctactaccgatgaattttcctttagcgagaacttgtttggcgtgttaaccgaacaggtggctgggcctctgggacagaacctggaggtcgagccttatagccagtactccaacgtccagtttccccaggtccagcctcaaatcagctccagcagttactattccaatctgggtttttatccacaacagcccgaggaatggtacagccccggtatctacgagttacgcagaatgccagccgaaaccttataccagggggaaacagaagttgcggagatgcctgttacaaaaaagcctcgcatgggggcaagcgccggacggatcaagggggatgaactttgcgtggtatgcggagaccgcgctagtggatatcattacaatgcactcacgtgcgaaggatgtaaagggtttttcaggaggtccatcacaaagaatgcagtgtataagtgcaaaaatggaggaaattgtgtgatggatatgtatatgcgtcgaaaatgtcaagagtgcagactccgcaagtgtaaagagatgggcatgctggcagaatgtttactcactgagatacagtgcaaatccaaacgactccgcaagaacgttaagcagcacgccgatcaaactgtcaacgaagattccgaaggccgtgatcttagacaagtcacctctactaccaagtcctgtagagagaagactgagttgactcctgatcagcagacattactccacttcatcatggattcatataataaacagaggatgccccaggaaatcacgaacaagatcctcaaggaagaattttccgccgaggagaacttcctgatcttgaccgagatggctactaatcacgtccaggtgttagtggagttcaccaagaaattaccaggattccagaccctggaccatgaggaccagatagcactgctaaagggcagcgccgtggaggcaatgttcctgcgttctgcggaaatattcaacaagaagctcccttctgggcactcagacctgctcgaggaaagaatcaggaacagtgggatttccgatgaatacatcacccccatgtttagtttttataaatccattggagaactcaagatgacacaggaagagtatgcccttttaacggcgatcgtcatcctcagtccagacaggcagtatattaaagatagggaagccgtcgagaagctgcaggagcccttgcttgatgtgttacaaaaactgtgcaagatccatcagcctgagaacccccagcatttcgcctgcttactgggcagactaactgaactccgtacttttaatcaccatcatgccgagatgttaatgtcgtggcgggtgaacgaccataagttcacgcccttgctatgcgagatctgggacgtccagtag

SEQ ID NO: 153016 - DNA, 1419 bp, Artificial Sequence
  derived and/or modified sequence
atgggcagcaagatgaacctgatcgagcacagccacctgcccaccaccgacgagttcagcttcagcgagaacctgttcggcgtgctgaccgagcaggtggccggccccctgggccagaacctggaggtggagccctacagccagtacagcaacgtgcagttcccccaggtgcagccccagatcagcagcagcagctactacagcaacctgggcttctacccccagcagcccgaggagtggtacagccccggcatctacgagctgagaagaatgcccgccgagaccctgtaccagggcgagaccgaggtggccgagatgcccgtgaccaagaagcccagaatgggcgccagcgccggcagaatcaagggcgacgagctgtgcgtggtgtgcggcgacagagccagcggctaccactacaacgccctgacctgcgagggctgcaagggcttcttcagaagaagcatcaccaagaacgccgtgtacaagtgcaagaacggcggcaactgcgtgatggacatgtacatgagaagaaagtgccaggagtgcagactgagaaagtgcaaggagatgggcatgctggccgagtgcctgctgaccgagatccagtgcaagagcaagagactgagaaagaacgtgaagcagcacgccgaccagaccgtgaacgaggacagcgagggcagagacctgagacaggtgaccagcaccaccaagagctgcagagagaagaccgagctgacccccgaccagcagaccctgctgcacttcatcatggacagctacaacaagcagagaatgccccaggagatcaccaacaagatcctgaaggaggagttcagcgccgaggagaacttcctgatcctgaccgagatggccaccaaccacgtgcaggtgctggtggagttcaccaagaagctgcccggcttccagaccctggaccacgaggaccagatcgccctgctgaagggcagcgccgtggaggccatgttcctgagaagcgccgagatcttcaacaagaagctgcccagcggccacagcgacctgctggaggagagaatcagaaacagcggcatcagcgacgagtacatcacccccatgttcagcttctacaagagcatcggcgagctgaagatgacccaggaggagtacgccctgctgaccgccatcgtgatcctgagccccgacagacagtacatcaaggacagagaggccgtggagaagctgcaggagcccctgctggacgtgctgcagaagctgtgcaagatccaccagcccgagaacccccagcacttcgcctgcctgctgggcagactgaccgagctgagaaccttcaaccaccaccacgccgagatgctgatgagctggagagtgaacgaccacaagttcacccccctgctgtgcgagatctgggacgtgcagtag

SEQ ID NO: 153017 - protein, 1475 aa, Artificial Sequence
  derived and/or modified sequence
MASGAGGVGGGGGGKIRTRRCHQGPIKPYQQGRQQHQGILSRVTESVKNIVPGWLQRYFNKNEDVCSCSTDTSEVPRWPENKEDHLVYADEESSNITDGRITPEPAVSNTEEPSTTSTASNYPDVLTRPSLHRSHLNFSMLESPALHCQPSTSSAFPIGSSGFSLVKEIKDSTSQHDDDNISTTSGFSSRASDKDITVSKNTSLPPLWSPEAERSHSLSQHTATSSKKPAFNLSAFGTLSPSLGNSSILKTSQLGDSPFYPGKTTYGGAAAAVRQSKLRNTPYQAPVRRQMKAKQLSAQSYGVTSSTARRILQSLEKMSSPLADAKRIPSIVSSPLNSPLDRSGIDITDFQAKREKVDSQYPPVQRLMTPKPVSIATNRSVYFKPSLTPSGEFRKTNQRIDNKCSTGYEKNMTPGQNREQRESGFSYPNFSLPAANGLSSGVGGGGGKMRRERTRFVASKPLEEEEMEVPVLPKISLPITSSSLPTFNFSSPEITTSSPSPINSSQALTNKVQMTSPSSTGSPMFKFSSPIVKSTEANVLPPSSIGFTFSVPVAKTAELSGSSSTLEPIISSSAHHVTTVNSTNCKKTPPEDCEGPFRPAEILKEGSVLDILKSPGFASPKIDSVAAQPTATSPVVYTRPAISSFSSSGIGFGESLKAGSSWQCDTCLLQNKVTDNKCIACQAAKLSPRDTAKQTGIETPNKSGKTTLSASGTGFGDKFKPVIGTWDCDTCLVQNKPEAIKCVACETPKPGTCVKRALTLTVVSESAETMTASSSSCTVTTGTLGFGDKFKRPIGSWECSVCCVSNNAEDNKCVSCMSEKPGSSVPASSSSTVPVSLPSGGSLGLEKFKKPEGSWDCELCLVQNKADSTKCLACESAKPGTKSGFKGFDTSSSSSNSAASSSFKFGVSSSSSGPSQTLTSTGNFKFGDQGGFKIGVSSDSGSINPMSEGFKFSKPIGDFKFGVSSESKPEEVKKDSKNDNFKFGLSSGLSNPVSLTPFQFGVSNLGQEEKKEELPKSSSAGFSFGTGVINSTPAPANTIVTSENKSSFNLGTIETKSASVAPFTCKTSEAKKEEMPATKGGFSFGNVEPASLPSASVFVLGRTEEKQQEPVTSTSLVFGKKADNEEPKCQPVFSFGNSEQTKDENSSKSTFSFSMTKPSEKESEQPAKATFAFGAQTSTTADQGAAKPVFSFLNNSSSSSSTPATSAGGGIFGSSTSSSNPPVATFVFGQSSNPVSSSAFGNTAESSTSQSLLFSQDSKLATTSSTGTAVTPFVFGPGASSNNTTTSGFGFGATTTSSSAGSSFVFGTGPSAPSASPAFGANQTPTFGQSQGASQPNPPGFGSISSSTALFPTGSQPAPPTFGTVSSSSQPPVFGQQPSQSAFGSGTTPNSSSAFQFGSSTTNFNFTNNSPSGVFTFGANSSTPAASAQPSGSGGFPFNQSPAAFTVGSNGKNVFSSSGTSFSGRKIKTAVRRRK

SEQ ID NO: 153018 - DNA, 4428 bp, Artificial Sequence
  derived and/or modified sequence
atggctagtggggcaggaggggtcggaggtgggggaggcggcaaaattagaaccagacggtgccaccagggcccgatcaagccatatcaacagggaagacagcagcaccaaggaattctgagtagggtgaccgagagcgtgaagaatatcgtcccagggtggttgcaacgttattttaataaaaatgaggacgtttgtagttgcagtacagataccagcgaggtaccaaggtggcctgagaacaaagaagatcatctagtatatgccgacgaggagagctcaaatattaccgatggccgtataacaccagaaccagctgtttctaacacagaagagccttctacaaccagtaccgcatccaattatcccgatgtcctcactcgccccagtttgcatagaagccacctgaattttagcatgttagagagccctgcccttcactgtcagccctccaccagtagcgcgttccccattggcagctctgggtttagcttggtgaaagagatcaaggactctaccagccagcatgacgatgacaatatatcaaccaccagcgggttttcaagtagggctagcgacaaggatataactgttagtaagaatacctcactgcctcccctgtggagcccggaggcagagcggtctcattcactctcccaacacaccgctacatcaagcaagaaacctgccttcaatctgagcgccttcggtaccttgagcccctctctgggaaactcctccatactgaaaacctcacaactaggtgatagtcctttttatcctggaaagacaacctatggcggcgccgctgctgccgtcagacagtccaaactgcgcaacacaccatatcaggccccagtgagacgccagatgaaggccaagcagctctcggcgcagtcttacggagtgacatcctctaccgctcggcgcattctccagagtcttgagaagatgtcctcacctttggccgatgccaagagaatcccatcaatcgtcagtagcccattaaatagcccccttgacaggagcgggatagatataaccgattttcaggctaagcgggagaaggtggacagccaatatccccctgtccaacggttgatgactcccaaaccagtgagtatcgccactaaccggtccgtctatttcaagccaagcctgactccaagcggagaatttagaaagacaaatcagcggatcgacaacaagtgttctactggctacgaaaagaatatgaccccggggcagaatagagaacagcgcgaaagtggcttctcttacccgaacttctcacttccggctgcaaacggcctgtcttccggagtaggggggggcggcgggaagatgagacgtgaaaggacccgattcgtcgctagcaagccccttgaagaggaagaaatggaggttccggtgctgcccaaaattagcctgccaataacatccagctctctgccgacattcaattttagctcacctgaaatcactacttctagtccctcacccataaacagcagccaggccctgacgaataaagtgcaaatgaccagcccctcatctaccgggagcccaatgttcaagttttcttctcctattgtgaagagtactgaagccaatgttttgcccccatcttcaattggattcacattcagtgtacccgtcgcaaaaaccgcagaactatccgggtcatcttccactcttgaaccaatcatttcctctagcgctcatcacgtaacaacggtaaatagtactaattgtaaaaaaaccccacccgaagactgtgagggcccctttaggcctgctgaaattttgaaagaaggctccgtattggatattctgaagagtccgggtttcgcatctcctaaaatcgacagcgtggctgctcagcccaccgctaccagcccggtcgtgtacacgaggccagccattagttcattttcgtcctccggtattggcttcggcgagtcactgaaagcgggctcttcctggcagtgtgacacctgcctcctgcagaataaagtcacggacaataagtgcatagcctgtcaggctgccaaactatccccccgagacaccgctaagcagacagggatcgaaacgcccaacaagagcggcaaaaccacattgtccgcatcaggaacaggattcggggataagtttaaaccggtcattggcacgtgggattgtgatacatgtttggtgcaaaataaaccagaagcaatcaagtgtgtagcttgtgagacgccgaaaccaggtacgtgtgttaagcgcgccctgacgttgactgtcgtatctgagagcgctgagaccatgaccgcaagttccagctcatgcaccgtcactaccgggacactcggttttggtgataaattcaaacgccccatcggctcctgggagtgttccgtgtgctgtgtgagtaacaacgctgaggataacaagtgcgtctcttgtatgtctgagaagcctggcagttctgtgcctgcaagtagtagtagtactgtgcccgtgtcattaccatctggggggtccctcgggctcgaaaaattcaagaaaccagagggaagctgggactgtgaattgtgccttgtacagaataaagctgacagcaccaagtgccttgcctgtgagagtgccaagccgggaactaaaagtggatttaaagggttcgataccagtagctcttcctctaattcagctgcaagctcatcatttaagtttggggtcagttcctccagcagtggccctagtcagacactcacaagcactgggaattttaaattcggggatcagggaggcttcaagatcggtgtatcgtcagacagcgggagtataaaccccatgtcagaaggcttcaagtttagcaaacctattggggacttcaagtttggggtgtcctcagagagcaaacctgaggaagtgaagaaggactcgaaaaacgacaattttaagtttggcctgtcctctggactatcaaatcccgtgagtctgacgcccttccagtttggtgtgtctaacctgggccaagaggaaaaaaaggaagaactgcccaaatcctcaagtgcggggttcagcttcgggacaggcgttattaactctactcccgcccccgctaacactatagtgacaagcgaaaacaagagtagcttcaatttgggaactatcgaaactaaatctgccagtgtggcccctttcacatgcaaaacaagtgaggccaaaaaggaagaaatgccagccaccaaaggagggttttcattcggcaatgtggaaccagcgtccctgccctcagccagcgtcttcgttttgggaagaacagaagagaagcaacaggagcccgtgacatctacctccctagttttcgggaaaaaggccgacaacgaagaacccaagtgccaacccgtgtttagctttggtaactcggagcagacgaaagacgaaaattcctcaaaaagtaccttctcttttagcatgactaagccgtccgaaaaagagtccgaacagccagctaaagctacattcgccttcggagcccaaacttcaaccaccgctgaccagggtgccgcgaagccagtcttttcctttctgaataattcttcaagtagcagcagcacacccgccaccagcgcgggaggaggcattttcggcagctccacaagctcttcaaacccacctgttgccaccttcgtcttcggccagagctctaatcccgtgtcttctagcgccttcgggaacacagcggagagcagtacctctcagtctttgttgttcagtcaggacagcaagttggcaacgacttccagcacaggaacagccgtgactccctttgtcttcggccccggtgcctcctccaataatactactaccagcggcttcggcttcggcgccacgacaacaagcagctccgccgggtctagttttgtgttcggcactggcccatcagcacccagcgcctcccccgccttcggggccaatcagacgcccacctttggacagtcacagggcgcatctcagcctaatccacccggtttcggtagcatttctagttcaacagctctatttcccacaggctcacagccagctccccctacctttggcactgttagcagttctagccaaccacctgtgtttggacagcagccaagccagtcagccttcggcagtggcactacaccaaattcctcatctgccttccagttcgggtcctccacaactaatttcaatttcactaataactcgcctagcggcgtgttcacttttggtgcaaattcttctacccctgcggcttcggcccaaccttctggctcaggtgggttcccatttaatcagtcaccggccgccttcactgtcggctctaacgggaaaaacgtattttcatcctccggtacatcgttctctggacggaaaatcaaaactgccgtccgaagacgtaaatag

SEQ ID NO: 153019 - DNA, 4428 bp, Artificial Sequence
  derived and/or modified sequence
atggccagcggggccggcggcgtgggcggcggcggcggcggcaagatccgcacccggcgctgccaccagggccccatcaagccctaccagcagggccggcagcagcaccagggcatcctgagccgggtgacagagagcgtgaagaacatcgtgcccggctggctgcagcgctacttcaacaagaatgaagatgtgtgcagctgcagcacagacaccagcgaggtgccccgctggccagagaacaaggaggaccacctggtgtatgcagatgaggagagcagcaacatcacagatggccgcatcaccccagagcctgctgtgagcaacacagaggagcccagcaccaccagcacagccagcaactacccagatgtgctgacccggcccagcctgcacaggagccacctgaacttctccatgctggagagccctgccctgcactgccagcccagcaccagcagcgccttccccatcggcagcagcggcttcagcctggtgaaggagatcaaggacagcaccagccagcatgatgatgacaacatcagcaccaccagcggcttcagcagccgggccagtgacaaggacatcaccgtgtccaagaacaccagcctgccccccctgtggagccctgaggccgagaggagccacagcctgagccagcacacagccaccagcagcaagaagccagccttcaacctgagcgccttcggcaccctgagccccagcctgggcaacagcagcatcctgaagaccagccagctgggggacagccccttctacccaggcaagaccacctacggcggcgctgctgctgctgtgcggcagagcaagctgaggaacaccccctaccaggcccctgtgcggcggcagatgaaggccaagcagctgagcgcccagagctatggagtgaccagcagcacagcccggcgcatcctgcagagcctggagaagatgagcagccccctggctgatgccaagaggatccccagcatcgtgagcagccccctgaacagccccctggacagaagtggcatcgacatcacagacttccaggccaagcgggagaaggtggacagccagtacccacctgtgcagaggctgatgacccccaagcctgtgtccatcgccaccaacagatctgtgtacttcaagcccagcctgacccccagcggggagttcaggaagaccaaccagagaattgacaacaagtgcagcacaggctatgagaagaacatgaccccaggccagaaccgggagcagcgggagagcggcttctcctaccccaacttcagcctgcctgctgccaacggcctgagcagcggcgtgggcggcggcggcggcaagatgaggcgggagaggaccaggtttgtggccagcaagcccctggaggaggaggagatggaggtgcctgtgctgcccaagatcagcctgcccatcaccagcagcagcctgcccaccttcaacttcagcagccctgagatcaccaccagcagccccagccccatcaacagcagccaggccctgaccaacaaggtgcagatgaccagccccagcagcacaggcagccccatgttcaagttcagcagccccatcgtgaagagcacagaggccaacgtgctgccccccagcagcatcggcttcaccttctctgtgcctgtggccaagacagctgagctgagcggcagcagcagcaccctggagcccatcatcagcagcagcgcccaccacgtgaccaccgtgaacagcaccaactgcaagaagaccccacctgaggactgtgagggccccttccggcctgctgagatcctgaaggagggctctgtgctggacatcctgaagagccctggctttgccagccccaagattgacagcgtggccgcccagcccacagccaccagccctgtggtgtacaccaggcctgccatcagcagcttcagcagcagcggcatcggctttggagagagcctgaaggccggcagctcctggcagtgtgacacctgcctgctgcagaacaaggtgacagacaacaagtgcatcgcctgccaggccgccaagctgagcccccgggacacagccaagcagacaggaattgagacccccaacaagagcggcaagaccaccctgagcgccagcggcactggatttggagacaagttcaagcctgtgattggcacctgggactgtgacacctgcctggtgcagaacaagccagaggccatcaagtgtgtggcctgtgagacccccaagccaggcacctgtgtgaagagggccctgaccctgactgtggtgtctgagagcgctgagaccatgacagccagcagcagcagctgcaccgtgaccaccggcaccctgggctttggagacaagttcaagaggcccatcggctcctgggagtgcagcgtgtgctgcgtgagcaacaatgctgaggacaacaagtgtgtgtcctgcatgtctgagaagccaggcagctctgtgcctgccagcagcagcagcacagtgcctgtgtccctgcccagcggcggcagcctgggcctggagaagttcaagaagccagagggctcctgggactgtgagctgtgcctggtgcagaacaaggctgacagcaccaagtgcctggcctgtgagagcgccaagccaggcaccaagagcggcttcaagggctttgacaccagcagcagcagcagcaacagcgctgccagcagcagcttcaagtttggagtgagcagcagcagcagcggccccagccagaccctgaccagcactggaaacttcaagtttggagaccagggcggcttcaagattggagtgtccagtgacagcggcagcatcaaccccatgtctgagggcttcaagttcagcaagcccatcggggacttcaagtttggagtgtcctctgagagcaagccagaggaggtgaagaaggacagcaagaatgacaacttcaagtttggcctgagcagcggcctgagcaaccctgtgtccctgacccccttccagtttggagtgagcaacctgggccaggaggagaagaaggaggagctgcccaagagcagcagcgctggcttctcctttggcaccggggtcatcaacagcaccccagccccagccaacaccatcgtgaccagcgagaacaagagcagcttcaacctgggcaccatcgagaccaagagcgcctctgtggcccccttcacctgcaagaccagcgaggccaagaaggaggagatgcctgccaccaagggcggcttctcctttggaaatgtggagcccgccagcctgcccagcgcctctgtgtttgtgctgggccgcacagaggagaagcagcaggagcctgtgaccagcaccagcctggtgtttgggaagaaggctgacaatgaggagcccaagtgccagcctgtgttctcctttggaaacagcgagcagaccaaggatgagaacagcagcaagagcaccttctccttctccatgaccaagcccagcgagaaggagagcgagcagcctgccaaggccacctttgcctttggagcccagaccagcaccacagctgaccagggcgccgccaagcctgtgttctccttcctgaacaacagcagcagcagcagcagcaccccagccaccagcgctgggggcggcatcttcggcagcagcaccagcagcagcaacccccctgtggccacctttgtgtttggccagagcagcaaccctgtgagcagcagcgccttcggcaacacagctgagagcagcaccagccagagcctgctcttcagccaggacagcaagctggccaccaccagcagcactggaacagctgtgaccccatttgtgtttggacctggggccagcagcaacaacaccaccaccagcggctttggatttggagccaccaccaccagcagcagcgctggcagcagctttgtgtttggcaccggccccagcgcccccagcgccagccctgcctttggagccaaccagacccccaccttcggccagagccagggcgccagccagcccaaccccccaggcttcggcagcatcagcagcagcacagccctcttccccaccggcagccagcctgccccacccaccttcggcaccgtgagcagcagcagccagccccctgtgtttggccagcagcccagccagagcgcctttggaagtggcaccacccccaacagcagcagcgccttccagtttggcagcagcaccaccaacttcaacttcaccaacaacagccccagcggggtcttcacctttggagccaacagcagcaccccagctgccagcgcccagcccagcggcagcggcggcttccccttcaaccagagccctgctgccttcaccgtgggcagcaatggcaagaatgtgttcagcagcagcggcaccagcttcagcggcaggaagatcaagacagctgtgagaagaaggaagtag

SEQ ID NO: 153020 - DNA, 4428 bp, Artificial Sequence
  derived and/or modified sequence
atggccagcggcgccggcggcgtgggcggcggcggcggcggcaagatcaggactcgtcggtgccatcagggcccaatcaagccataccaacaaggacggcagcagcaccagggcattctcagcagagtcaccgagtccgtgaaaaacattgtgccgggctggcttcagcgctactttaacaaaaacgaagatgtgtgtagctgcagcacagatacttccgaggtccctcgctggccagaaaataaagaagatcatctcgtttacgccgatgaggagtcttctaatattacagacggtagaattaccccagaacctgcagtatctaacactgaagaaccttctaccactagtacagctagtaactatccggatgtactaaccagaccctccctacatcgttcacacctaaatttctccatgcttgaaagtcctgctctacactgtcagccaagcacctcaagtgcttttccaattggctctagtggcttctcccttgttaaggaaatcaaagatagtacctctcagcacgatgacgacaacatctcaacgacaagcggctttagttcacgggccagcgataaggatattacagtgagcaaaaatacttccttgccaccactatggtctcctgaggccgagcgcagtcattctttgtctcagcacacggccacttcttctaagaaaccagcttttaatctgtctgcatttgggaccctctcaccatccttgggcaactccagcatccttaaaacatcccaacttggggattctcccttctacccgggcaaaactacatatggcggggccgcagcggccgtgagacaatcaaaactgaggaacaccccataccaggcacccgtgcgccggcaaatgaaggctaagcagttgtcagcacagtcatatggggtcacatcaagcaccgcccgcaggattcttcagagcctggagaagatgtcatcaccgctcgccgacgctaaacgcatccctagcatcgttagcagccctctcaatagccctctcgaccgatcaggtatcgatattacagatttccaggcgaagagagagaaggttgatagccagtaccccccagtacaacgtctgatgacacccaaacccgtgtctatcgccaccaataggagtgtgtacttcaagccaagcctgacgccttccggcgagtttcgcaagaccaatcagcggattgacaataagtgtagcactggctacgaaaagaacatgacacctggccaaaatcgggaacagagggaaagcggtttcagttaccccaatttttctctcccagctgccaatggcctcagcagtggcgtgggaggcggaggtggaaaaatgcgtcgggagaggaccaggttcgtagcatcaaagcctctggaggaggaggaaatggaggtcccagtactgcccaagataagcttgccgatcacatcctctagcttgcccacatttaatttttcgagcccggaaatcacaacatcatccccgtccccaatcaactctagccaggccctgacgaataaagtacagatgacctcgccatccagcaccggatctccaatgttcaaattttcctcacccatcgtgaaatccaccgaagccaatgttctgccccccagcagtatcggatttaccttttctgtcccagtagccaaaactgcagagctgtctggctcaagctctacgctcgaacccatcatcagttcgtctgcgcaccacgtgaccaccgtgaacagcaccaattgcaagaaaacacctccagaggactgtgagggtccctttaggcccgccgagatactgaaagaggggagcgttttggacatacttaagagccccgggttcgccagtcccaaaatcgatagcgttgccgcccagcctacagcgacaagccctgttgtgtataccagacccgcgatctcctcctttagctcttctgggattggatttggtgaatctctgaaggccggttctagctggcagtgcgacacttgcctgcttcaaaacaaggtgaccgataacaagtgcatcgcctgccaggccgccaaactgtctccccgcgataccgccaagcagactggcattgagactcctaacaagagcggcaagacgactttgtccgcttcaggcacaggatttggcgataagttcaaaccagttataggcacatgggactgcgatacctgtcttgttcagaacaagcccgaagccatcaaatgtgtggcctgtgagacaccaaaacccggtacctgtgtaaaacgcgctcttacactcaccgtggtcagtgaaagcgccgagacaatgacagcttcatcttcctcttgtaccgtgactaccggtactctaggctttggggacaagttcaaaaggccaatcggttcctgggagtgtagcgtctgttgcgtctcgaataacgccgaggataataagtgcgtgagctgtatgtctgaaaagcctggttcttctgtgcccgccagctctagcagcaccgtcccagtgtcattgcccagcggtggctctctaggcctggaaaagttcaagaagcctgagggaagttgggattgtgaactgtgcctggtccagaataaggccgacagcacaaaatgcctggcttgcgaatccgccaaacctggcacaaagtccggattcaaggggtttgacacatcgtcatcttcctccaactccgcagcaagctccagctttaaatttggcgtcagctcatcaagcagcggcccctctcagaccttaacctccacaggtaatttcaaattcggcgaccagggcggattcaagatcggggtgtcctctgactccggctcgatcaacccaatgagtgaaggctttaagttcagtaagccaatcggcgactttaagttcggggtgagcagcgaatctaaacccgaggaggtgaaaaaggattctaagaacgacaactttaagtttgggctgtcttctggattatctaatcctgtttcgctgacccctttccagtttggagtttccaacctgggccaggaggaaaagaaagaggaactgcctaaatcgtcctccgcaggattttccttcggaaccggggttataaacagtaccccagcgccggccaacacaatcgtaacatctgagaataagtcgagcttcaacctgggcaccatcgagacaaagagcgccagcgttgccccattcacatgcaagacgagcgaagctaaaaaagaggagatgccagcaaccaaaggggggttcagctttgggaacgtagaacccgcaagcctaccgtcagcctcggtgttcgtgctggggcgaaccgaagagaagcagcaggagcccgtcacctctacctccttagtcttcgggaagaaagccgataatgaggaacccaagtgtcagcctgtgttttcatttggcaactctgaacagactaaagatgagaattcatccaagagtactttttcttttagtatgaccaagccgtcggaaaaagaatcggagcagcctgccaaagctacttttgcatttggcgcgcagacgagtacgacagcggatcagggagcagctaagcccgtctttagctttctgaacaatagcagcagttcgagcagcacacccgcaacctcagctggggggggcatcttcggaagtagtacttcctcttccaatccaccagtggcaactttcgtgtttggacagtcctctaatcctgtatcgtcatccgccttcggaaacacagccgagagctcaacgtcgcaaagtctgctgttctcacaggacagtaaactcgccacaacttcttccaccggcactgccgtaacacccttcgtatttgggccgggggcctccagcaataacacaaccacttccggatttgggttcggtgcaaccaccacaagctcgagcgcaggctcatcatttgtttttggaacggggccaagcgcgccctctgcgtcccccgcatttggcgcaaatcagacacccacatttggccaatcgcaaggtgcctctcagccgaacccacccgggttcgggtctatttcgtctagtactgctctgttcccaaccgggtcacagccagctccgcctacctttggtacagtgtcttcaagctctcaacctcctgtgtttggccagcagccatcacagtcagcattcggatccggtactactcctaatagtagctccgcattccagttcggcagctctactactaactttaatttcacaaataactccccaagtggtgtgtttacctttggggccaattcttctacgcccgccgctagcgcgcagccatccggttcaggcggctttccctttaatcagtcccccgccgcttttacagtcgggtctaacggcaagaacgttttttcctcttcaggaacatccttcagtggcagaaagattaaaactgctgtgaggcgaaggaaatag

SEQ ID NO: 153021 - DNA, 5487 bp, Artificial Sequence
  derived and/or modified sequence
atggcctcgggagccggaggagtcggagggggcggtggcggcaagatccggacgcggcgttgccaccaggggccaattaagccttaccagcaggggcgacaacagcatcagggcattcttagcagggttacagaatctgttaagaatattgtgccagggtggctacaaagatacttcaacaagaatgaagatgtatgcagctgttcaacagacacaagcgaggttccacgctggccagaaaataaagaggaccatctggtatatgccgatgaggagagctctaatattactgatgggagaatcacacctgagccagcagtcagtaatacagaagaaccttcaacaactagtactgcttcaaattatccagatgtgttaacaaggccttctcttcatcggagccatctgaatttttccatgttggaatcccctgcattacactgtcagccatctacatcctcggcattcccaattggcagttcgggattttcccttgtaaaggaaattaaagattctacctctcagcatgatgatgataacatctcaactaccagtggtttttcttcaagagcttctgataaagatataactgtttcaaagaacacttcattgccacctctgtggtccccagaagctgaacgttctcactcactctcacagcacactgccaccagctcaaaaaaaccagcattcaacttgtctgcctttggaacactttccccttcacttgggaattcttcaatccttaaaaccagtcagcttggagattctcctttttatcctggaaaaacaacatacggtggggcagcagctgctgtaagacagtctaaactacgaaatacaccttatcaggcaccagttagaagacaaatgaaagctaagcaactcagtgcacaatcttacggtgtgaccagttcaacagctcggcgaatattgcagtctttagagaagatgtcaagccctttagcggatgcaaaaagaattccatccattgtttcttctcctctgaattctcctcttgataggagtgggatagatatcacagattttcaggccaaaagagaaaaggtggattctcaatatcctcctgttcagagacttatgaccccaaagccagtttccatagcaacaaatcgaagtgtttattttaaaccatctctgactccttctggtgaattcaggaagactaatcaaagaatagataacaagtgcagtactggatatgaaaaaaatatgacacccggacaaaatagagaacaacgagaaagtggcttttcatatccaaatttcagtttgcctgcagccaatggtttatcttctggagtaggtggtggaggtggcaagatgagacgagaaagaacacgctttgttgcttctaaacctctggaggaggaggaaatggaagttccagtattaccgaaaatctctctaccgatcaccagttcttcactgcctacctttaattttagttcccctgagatcacaacttcctctccatcacccatcaattcgtctcaagcattaacaaacaaggtacaaatgacctctccgagcagcactggcagtcccatgtttaaattttcatctccaatcgtaaaatctactgaggcaaatgtactacctccatcatctattggatttacatttagtgtgcctgttgcaaaaacagcagaactttctggttctagtagtactttagaaccaattataagtagttcagctcatcatgtcactacagtgaacagtacaaattgtaagaagacaccacctgaagattgtgagggtccttttagacctgcagaaatcctgaaagaaggaagtgttctagatattctgaaaagccctggtttcgcatcgccgaagatagattctgttgctgctcagcccaccgcaacaagcccagtagtttatacaagaccagcaataagtagcttttcttctagtggaattgggtttggggagagtttaaaagctgggtcatcatggcagtgtgatacatgtctactccagaacaaagttacagacaacaaatgcatagcctgtcaagcagcaaaattgtcacccagagatactgctaaacagactggaattgaaacaccaaataaaagtggcaaaacaactctttctgcatcagggacaggctttggagacaaatttaaaccagtgataggcacttgggattgtgatacctgtttagtgcaaaataaacctgaagcaataaaatgtgtagcctgtgaaacaccgaaacctggaacttgtgtgaagcgagcccttacattgacagtggtttcggaaagtgctgagactatgactgcttcatcttccagctgcactgtaaccactggtaccttaggatttggagataaattcaaaaggcccattggatcttgggagtgttcagtatgctgtgtttctaataatgcagaagacaataagtgtgtgtcctgtatgtctgagaaaccaggaagttcagtacctgcttcaagtagcagcactgtacctgtctctctgccttctggaggctctctaggattggaaaagttcaagaaacccgagggaagctgggactgtgaattgtgcctagtgcagaataaggcagactctaccaaatgtttggcatgtgaaagtgcaaagccaggcacaaaatctgggtttaaaggctttgacacatcttcctcatcttcgaactcagcagcctcctcatccttcaaatttggtgtctcatcatcctcttctgggccttctcagactttaacaagcactggaaattttaaatttggagatcagggaggattcaaaataggtgtgtcatccgattctgggtctataaaccccatgagtgaaggctttaaattttctaaaccaataggagattttaaatttggagtttcatctgaatctaagcccgaagaagttaaaaaagatagtaagaatgataattttaagtttggactttcttctggtttaagcaacccagtttctttaactccatttcaatttggggtatctaatcttggacaggaagaaaagaaagaggaactgcccaaatcttcctctgcaggttttagctttggtacaggtgttattaactccacccctgctcctgctaacaccatagtgacctctgagaacaagagcagcttcaaccttggaaccatagaaaccaagagtgcttcagtggctcctttcacatgtaagacatcagaagctaaaaaagaagaaatgcctgccaccaaaggaggattctcttttggcaacgtggagcctgcctctctgccatctgcctcagtgtttgttttgggaaggacagaagagaaacagcaagagcctgtcacttctacttccctagtttttgggaagaaagctgacaatgaagagccaaagtgtcaaccagtgttttcctttgggaattcagagcaaaccaaagatgagaattcttcaaagtccacatttagttttagtatgacaaaaccatctgagaaggaatctgaacagccagcaaaagccacttttgcctttggagctcaaactagtactacagctgatcaaggtgcagcaaagccagtttttagtttcttgaacaacagttcctctagttcaagtacaccagccacttctgctggtggtggcatatttggtagttccacctcttcctccaatccacctgtggctacctttgtgtttggacagtccagcaatcctgtgagcagctctgcctttggtaacactgctgaatccagcacctctcagtctttgctattttctcaagatagcaaactagcaaccacatccagcacaggtacagctgtcaccccatttgtctttggtccaggagccagcagtaataatactaccacctctggtttcggctttggagccacaaccacatctagctctgcaggatcctcctttgtatttggaactggaccctcagcaccatctgccagtccagcatttggtgctaaccagaccccaacatttggacaaagtcaaggtgccagccagcccaatcccccaggctttggatctatatcatcttccacagcattatttcccactggttctcagcctgcaccacctacttttgggacagtgtcaagcagtagccagccccctgtgtttggacagcaacctagtcagtctgcatttggctctggaacaactcctaattctagttcggctttccagtttggcagcagcactacaaatttcaacttcacaaacaacagtccatcaggagtgttcacatttggtgcaaattctagcacacctgcagcctcagcccagccttcaggctcggggggctttccatttaaccagtctccagcagcatttacagtggggtcaaatgggaaaaatgtgttctcttcttctggaacttcattctctggtcgcaagataaagactgctgttagacgcaggaaataaaggtcacattggtgttgtactcaattttaacaacagctggtgccctgctttcagatactggattgtactttgtgctggggttatctgaagtcagatctgcctaaggacttctttaattttggaattttcctcctttctctttcgttacagaagccccaccctgcctcacccacccttttttaaataaataaatagctagactggtgactgattcttcagcaaaaatattttatgatccagcagattattcactgatttgacatagtctggctgtacccaggaatggagcctgcacggtgaatggctttgtatagaacctctttgtctacaccattatgtgcgctgataagcgttcatggaacgcgttgaaattgtaattatatctgaggaattctgtatagattagaattctgtatagattagagagtgttgaaacggatgatttctatgctgagtttgtgctggtgtatgtgtgaagtgagtgagttgggtgtattgtgcgctaaacttttctgatagaggaagcctgattaaagaatggtccgtgctaaggacttgttagatctagttcactctccatttaataattatatgctatttctatattttcattctcctatcacctgtcttgcctttttcattattttattatgaaacttgtgtaaatacaattttgtttctgtactttttggcataacataaatctgtgaacttgaaatttgaattttgtgttagagatttttttgttgtttgtttagtcttgtctcagattttattatgtaaatcccattattcaaagttgcctaaatccatttggaaatctttaaaaaaaaaattggggattcttaaagttgaatttattggcttttctgatccagttttgtttggaccaaaaaccagtattgtacaaagtattaagcatatatttttatatttactaaaatggactgtggtgactttggataataaggaaaagtttaatattaaagccatgtttattacagtataattaacatgttaaaccatgggataaatgccatcaataaaaaattatgacat

SEQ ID NO: 153022 - DNA, 4428 bp, Artificial Sequence
  derived and/or modified sequence
atggcaagcggcgcaggtggagtaggcggaggcggtgggggtaagataagaacaaggcgttgtcatcagggcccaatcaagccgtaccaacaaggtcgacaacaacatcaggggatcttaagcagggttactgaaagcgtgaaaaatatagtgcctgggtggctgcagcgttacttcaacaagaatgaggacgtctgctcctgctccactgatacctcagaggtcccaaggtggccagagaataaggaggatcatttggtgtatgcggacgaagagtcaagtaatatcacggacggacgcatcaccccggagcccgcagtcagtaatactgaggaacctagcacaactagcacggcttcaaactaccccgatgtgcttacccgtcccagtttacatcgctcccatttaaacttctctatgctcgaatcacccgcactacattgccaaccttcgacgtccagtgccttccccattggtagtagtggattctccctggtaaaggagatcaaggattccacttcccagcatgacgatgacaatatcagcaccacaagcgggtttagtagtagagccagtgacaaggatattaccgtctcaaaaaacacatctctcccccctttatggtcaccggaagccgagaggagtcactcgctaagccaacacacagcgacatcctcgaagaagcccgcttttaacctgtcagctttcggaaccttgtcaccttctcttggaaactcatccattctgaaaaccagccagcttggcgatagccccttctatccaggtaagacaacctacggaggagcagccgcagccgtgcggcagtcgaagcttaggaataccccgtaccaggctcccgttaggaggcaaatgaaggcaaagcagttgagtgcccaaagttatggcgtgactagctctacagcgagaagaatactccaatccttggagaaaatgtctagtcccctggccgatgcaaagcggattccttccatcgtctcttctcctttgaactcacccctggaccggagtgggattgacataacggacttccaggccaaacgggagaaggtggactctcagtacccccctgtacagagactgatgacgcccaaaccagtgtccattgcaacaaacaggtctgtatacttcaagccctccctcaccccatccggcgagttcagaaaaacgaatcagcgtatcgacaataagtgttccactgggtacgaaaaaaacatgactccagggcagaaccgggagcagagggagtccggtttctcatatcccaactttagtttgcccgctgccaacgggctgtcctctggcgtaggcggtggcggagggaagatgcggcgagaacgcacccgattcgtagcctcaaagccactggaagaggaagagatggaagtccccgtactgccaaagatctctctgccaataacaagcagtagcctgcctactttcaatttttcaagccctgagataacgactagttcaccatccccgattaacagtagccaggcgttgactaacaaggtgcagatgacgagtcccagctccacaggctctcccatgttcaagttctcatcaccaatcgttaagagcaccgaagccaatgtcttgcctcctagctcaattggcttcacctttagtgtgcccgtcgctaaaaccgccgagctgtccggcagttcctccacacttgaacctatcatatcttccagcgcgcaccatgtgacaacggtgaatagcactaactgcaaaaagacacctcccgaagattgtgagggaccctttaggccggctgagatattaaaagagggctcagttctggacattctgaaatcccctggctttgcttcgccaaaaattgattcagtggctgctcagccaaccgcaacttccccagtcgtgtacactagaccggcaatttcttccttcagttcctctggcattggcttcggcgagtccctgaaagccggatcatcatggcagtgtgacacctgtcttcttcagaacaaggtgactgacaacaagtgcatcgcttgccaggccgctaaactgtcgcctagggacactgcgaaacagactggcatcgagactcctaacaagtcaggaaagaccactcttagtgcctccgggactggctttggtgataaattcaaacctgtgatcggcacgtgggattgcgatacatgcctagtccagaataaaccagaggctataaagtgcgtcgcatgcgagacacctaaacccggaacttgtgtcaaaagagcgctcacactgacagtcgtgtccgaaagcgcggagaccatgaccgcctcttcatcatcatgcactgtgactacaggaaccctgggattcggcgataaatttaaaaggccaatcgggagctgggagtgtagcgtttgttgtgtcagtaacaacgctgaggataataagtgcgtgagctgtatgtcagaaaagcctgggagctccgtccctgcttcaagtagctcaactgtgcccgtgtcattacccagcggtggatccctcggcctggaaaaatttaaaaaacccgagggctcatgggattgtgagctgtgcctagtccagaataaggccgactcaaccaaatgtctggcctgtgagtcagcaaaacctggcacaaaatctggattcaagggattcgacacgagcagctcttcctcaaacagcgcggcatcctcttccttcaagttcggcgtttcgtcatcctcttcaggcccttcccaaactctgacatccaccggcaatttcaaatttggcgaccagggcggattcaaaataggagttagctccgacagcgggagcattaatcccatgagcgagggtttcaagttctctaaacccatcggtgacttcaagtttggcgtctcttcggaatcaaagccggaagaggtcaaaaaagacagtaagaatgacaacttcaagttcgggctctcaagcggcttgtccaaccccgtgagtctgacgcctttccagtttggtgtctccaatcttgggcaagaggagaagaaagaggagttaccgaagtcctctagtgccggattttcattcggcactggtgtgatcaactctacaccagcacccgcaaatacgattgtcacctctgagaacaaatcttcctttaatcttggtacaatcgaaactaagtcagccagcgtcgcaccttttacatgtaagacctcggaggctaaaaaggaagaaatgccagccactaaagggggattttccttcggcaatgtcgagcccgcatctctgccgtccgctagcgtttttgtactcggcagaacagaggaaaaacagcaggagcccgtcacttcaacttccctagtgttcggaaagaaagccgacaacgaggaacccaagtgccagcccgtctttagctttgggaactctgagcagaccaaagacgaaaactcctcgaagagtactttttcatttagtatgactaaaccctccgagaaggaatccgagcagccagccaaagctaccttcgccttcggggctcagacaagtactacggcagatcaaggcgctgcaaagccagtgttctcctttctgaataatagcagtagctccagtagtactccagctacaagcgcgggagggggaatcttcggaagtagtacgagcagcagcaatccccctgtggcaacattcgtcttcgggcagtcatcaaaccctgtatcatcatctgcgtttggcaataccgccgagagcagtactagccagtcattgttattttcccaggattctaagttggccacgaccagcagtaccggcacggcggttacaccttttgtttttgggcctggtgcttcatcaaataatacaacgacctccgggttcgggttcggggctacaactacctcgtcctccgcagggagctctttcgtattcggcaccggcccttccgctccatccgcatccccggctttcggcgctaaccagacacctacatttgggcagtcccagggcgcatctcaacctaatcctcccggatttggttccatcagttcctctaccgctctgtttccaaccgggtcacagccagctcctcctacatttggaactgtgagctcatcctctcagcctccagtgtttgggcaacagccttcccagtcagcattcgggagcggcacaacacctaactctagttcagccttccagttcgggtctagtacgacgaatttcaatttcaccaacaatagcccctccggcgtctttacttttggggcaaacagctccacacccgctgcgtccgcccagcctagcggcagcggcggatttccgttcaatcagtcccctgccgcattcactgttgggagcaatggtaaaaacgtgtttagttcatctgggacaagcttctctggtcggaaaataaagactgcagttcgacggcgaaagtag

SEQ ID NO: 153023 - DNA, 4428 bp, Artificial Sequence
  derived and/or modified sequence
atggccagcggcgccggcggcgtgggcggcggcggcggcggcaagatcagaaccagaagatgccaccagggccccatcaagccctaccagcagggcagacagcagcaccagggcatcctgagcagagtgaccgagagcgtgaagaacatcgtgcccggctggctgcagagatacttcaacaagaacgaggacgtgtgcagctgcagcaccgacaccagcgaggtgcccagatggcccgagaacaaggaggaccacctggtgtacgccgacgaggagagcagcaacatcaccgacggcagaatcacccccgagcccgccgtgagcaacaccgaggagcccagcaccaccagcaccgccagcaactaccccgacgtgctgaccagacccagcctgcacagaagccacctgaacttcagcatgctggagagccccgccctgcactgccagcccagcaccagcagcgccttccccatcggcagcagcggcttcagcctggtgaaggagatcaaggacagcaccagccagcacgacgacgacaacatcagcaccaccagcggcttcagcagcagagccagcgacaaggacatcaccgtgagcaagaacaccagcctgccccccctgtggagccccgaggccgagagaagccacagcctgagccagcacaccgccaccagcagcaagaagcccgccttcaacctgagcgccttcggcaccctgagccccagcctgggcaacagcagcatcctgaagaccagccagctgggcgacagccccttctaccccggcaagaccacctacggcggcgccgccgccgccgtgagacagagcaagctgagaaacaccccctaccaggcccccgtgagaagacagatgaaggccaagcagctgagcgcccagagctacggcgtgaccagcagcaccgccagaagaatcctgcagagcctggagaagatgagcagccccctggccgacgccaagagaatccccagcatcgtgagcagccccctgaacagccccctggacagaagcggcatcgacatcaccgacttccaggccaagagagagaaggtggacagccagtacccccccgtgcagagactgatgacccccaagcccgtgagcatcgccaccaacagaagcgtgtacttcaagcccagcctgacccccagcggcgagttcagaaagaccaaccagagaatcgacaacaagtgcagcaccggctacgagaagaacatgacccccggccagaacagagagcagagagagagcggcttcagctaccccaacttcagcctgcccgccgccaacggcctgagcagcggcgtgggcggcggcggcggcaagatgagaagagagagaaccagattcgtggccagcaagcccctggaggaggaggagatggaggtgcccgtgctgcccaagatcagcctgcccatcaccagcagcagcctgcccaccttcaacttcagcagccccgagatcaccaccagcagccccagccccatcaacagcagccaggccctgaccaacaaggtgcagatgaccagccccagcagcaccggcagccccatgttcaagttcagcagccccatcgtgaagagcaccgaggccaacgtgctgccccccagcagcatcggcttcaccttcagcgtgcccgtggccaagaccgccgagctgagcggcagcagcagcaccctggagcccatcatcagcagcagcgcccaccacgtgaccaccgtgaacagcaccaactgcaagaagaccccccccgaggactgcgagggccccttcagacccgccgagatcctgaaggagggcagcgtgctggacatcctgaagagccccggcttcgccagccccaagatcgacagcgtggccgcccagcccaccgccaccagccccgtggtgtacaccagacccgccatcagcagcttcagcagcagcggcatcggcttcggcgagagcctgaaggccggcagcagctggcagtgcgacacctgcctgctgcagaacaaggtgaccgacaacaagtgcatcgcctgccaggccgccaagctgagccccagagacaccgccaagcagaccggcatcgagacccccaacaagagcggcaagaccaccctgagcgccagcggcaccggcttcggcgacaagttcaagcccgtgatcggcacctgggactgcgacacctgcctggtgcagaacaagcccgaggccatcaagtgcgtggcctgcgagacccccaagcccggcacctgcgtgaagagagccctgaccctgaccgtggtgagcgagagcgccgagaccatgaccgccagcagcagcagctgcaccgtgaccaccggcaccctgggcttcggcgacaagttcaagagacccatcggcagctgggagtgcagcgtgtgctgcgtgagcaacaacgccgaggacaacaagtgcgtgagctgcatgagcgagaagcccggcagcagcgtgcccgccagcagcagcagcaccgtgcccgtgagcctgcccagcggcggcagcctgggcctggagaagttcaagaagcccgagggcagctgggactgcgagctgtgcctggtgcagaacaaggccgacagcaccaagtgcctggcctgcgagagcgccaagcccggcaccaagagcggcttcaagggcttcgacaccagcagcagcagcagcaacagcgccgccagcagcagcttcaagttcggcgtgagcagcagcagcagcggccccagccagaccctgaccagcaccggcaacttcaagttcggcgaccagggcggcttcaagatcggcgtgagcagcgacagcggcagcatcaaccccatgagcgagggcttcaagttcagcaagcccatcggcgacttcaagttcggcgtgagcagcgagagcaagcccgaggaggtgaagaaggacagcaagaacgacaacttcaagttcggcctgagcagcggcctgagcaaccccgtgagcctgacccccttccagttcggcgtgagcaacctgggccaggaggagaagaaggaggagctgcccaagagcagcagcgccggcttcagcttcggcaccggcgtgatcaacagcacccccgcccccgccaacaccatcgtgaccagcgagaacaagagcagcttcaacctgggcaccatcgagaccaagagcgccagcgtggcccccttcacctgcaagaccagcgaggccaagaaggaggagatgcccgccaccaagggcggcttcagcttcggcaacgtggagcccgccagcctgcccagcgccagcgtgttcgtgctgggcagaaccgaggagaagcagcaggagcccgtgaccagcaccagcctggtgttcggcaagaaggccgacaacgaggagcccaagtgccagcccgtgttcagcttcggcaacagcgagcagaccaaggacgagaacagcagcaagagcaccttcagcttcagcatgaccaagcccagcgagaaggagagcgagcagcccgccaaggccaccttcgccttcggcgcccagaccagcaccaccgccgaccagggcgccgccaagcccgtgttcagcttcctgaacaacagcagcagcagcagcagcacccccgccaccagcgccggcggcggcatcttcggcagcagcaccagcagcagcaacccccccgtggccaccttcgtgttcggccagagcagcaaccccgtgagcagcagcgccttcggcaacaccgccgagagcagcaccagccagagcctgctgttcagccaggacagcaagctggccaccaccagcagcaccggcaccgccgtgacccccttcgtgttcggccccggcgccagcagcaacaacaccaccaccagcggcttcggcttcggcgccaccaccaccagcagcagcgccggcagcagcttcgtgttcggcaccggccccagcgcccccagcgccagccccgccttcggcgccaaccagacccccaccttcggccagagccagggcgccagccagcccaacccccccggcttcggcagcatcagcagcagcaccgccctgttccccaccggcagccagcccgccccccccaccttcggcaccgtgagcagcagcagccagccccccgtgttcggccagcagcccagccagagcgccttcggcagcggcaccacccccaacagcagcagcgccttccagttcggcagcagcaccaccaacttcaacttcaccaacaacagccccagcggcgtgttcaccttcggcgccaacagcagcacccccgccgccagcgcccagcccagcggcagcggcggcttccccttcaaccagagccccgccgccttcaccgtgggcagcaacggcaagaacgtgttcagcagcagcggcaccagcttcagcggcagaaagatcaagaccgccgtgagaagaagaaagtag

SEQ ID NO: 153024 - protein, 274 aa, Artificial Sequence
  derived and/or modified sequence
MASDSGNQGTLCTLEFAVQMTCQSCVDAVRKSLQGVAGVQDVEVHLEDQMVLVHTTLPSQEVQALLEGTGRQAVLKGMGSGQLQNLGAAVAILGGPGTVQGVVRFLQLTPERCLIEGTIDGLEPGLHGLHVHQYGDLTNNCNSCGNHFNPDGASHGGPQDSDRHRGDLGNVRADADGRAIFRMEDEQLKVWDVIGRSLIIDEGEDDLGRGGHPLSKITGNSGERLACGIIARSAGLFQNPKQICSCDGLTIWEERGRPIAGKGRKESAQPPAHL

SEQ ID NO: 153025 - DNA, 423 bp, Artificial Sequence
  derived and/or modified sequence
atggactgtaaatcccctaaacgtgcaaatatttgtccccatctcccgggtggaggactattttccacacctccatcccaggccgcttggcgcactctgcttacagcattatgctttccagggcctacttgcaccggtccgatgcgggagggaccccgtgcggtgtacaatcccccacgcgctcataggaacagcagcgacaattgcgtgatgaagcacctattgtgtgccggtgacaagaacggaacccggaggcacgctctaccatctcctcttgaggggtcatttcagccgggtagacagattccccctcctcagacgccctcaaccgacccccagaccctgcccctgtcttttaggtctctgctcagatgccaccagctgtgcgccgcaagtcttccgccttccttgaaactaccatag

SEQ ID NO: 153026 - DNA, 825 bp, Artificial Sequence
  derived and/or modified sequence
atggccagtgattccggaaaccaggggacactgtgcaccctcgaatttgccgttcagatgacatgtcaaagttgcgtcgatgctgtgcgtaaatctctgcagggcgtggccggcgtgcaagatgttgaggtacatctggaggaccagatggtgctcgtacacactactctcccttcccaggaggtgcaggccctgctggaaggcaccgggcgacaagcggtgctcaagggcatgggctccgggcagcttcagaacctaggagccgccgtcgccatcctgggaggccctggaaccgtccaaggcgtcgtacggttcctccagctgacgccagaacgctgcttaatcgaagggacaattgatggccttgaaccaggtctgcatggtctccatgttcaccagtacggtgatctcacaaacaactgcaattcttgcggaaatcactttaatccagacggagcgagccatggcgggccccaggacagtgatagacacagaggtgatttaggcaacgtaagagccgatgctgacggaagggccatattccgtatggaggatgagcaattaaaggtctgggacgtgatcggacggtcccttattatcgacgaaggcgaggatgacttagggcgcggcggccatccgttgtccaaaatcaccggaaattctggagagcggttggcgtgtggtattattgcgcggtctgccggtctttttcaaaatcccaaacagatctgcagttgcgatggactcactatatgggaagagaggggaaggcctatcgctggcaaaggccgtaaagagtccgcacagccacccgcgcacctgtag

SEQ ID NO: 153027 - DNA, 825 bp, Artificial Sequence
  derived and/or modified sequence
atggccagtgacagcggcaaccagggcaccctgtgcaccctggagtttgctgtgcagatgacctgccagagctgtgtggatgctgtgaggaagagcctgcagggcgtggccggcgtgcaggatgtggaggtgcacctggaggaccagatggtgctggtgcacaccaccctgcccagccaggaggtgcaggccctgctggagggcaccggccggcaggccgtgctgaagggcatgggcagcggccagctgcagaacctgggcgctgctgtggccatcctgggcggccctggcaccgtgcagggcgtggtgcgcttcctgcagctgaccccagagcgctgcctgattgagggcaccattgatggcctggagcccggcctgcacggcctgcacgtgcaccagtacggggacctgaccaacaactgcaacagctgtggcaaccacttcaacccagatggagccagccatggaggcccccaggacagcgacagacacagaggagacctgggcaatgtgcgggcagatgctgatggccgggccatcttcaggatggaggatgagcagctgaaggtgtgggatgtgattggccgcagcctcatcattgatgaaggagaagatgacctgggccggggcggccaccccctgagcaagatcaccggcaacagcggggagcggctggcctgtggcatcatcgcccggtctgctggcctcttccagaaccccaagcagatctgcagctgtgatggcctgaccatctgggaggagcggggccggcccatcgccggcaagggcaggaaggagagcgcccagcccccagcccacctgtag

SEQ ID NO: 153028 - DNA, 825 bp, Artificial Sequence
  derived and/or modified sequence
atggccagcgacagcggcaaccagggcaccctgtgcaccctggagttcgcagttcagatgacttgtcaatcttgtgtcgacgccgtgcgtaagtccctacagggtgtggccggtgtccaggatgtggaagtgcaccttgaagatcagatggtgctcgttcatacgaccctcccctctcaggaggtccaggctctgctcgaaggaacagggaggcaagccgtactcaaggggatgggaagcggccagctgcagaacctgggggccgccgtcgccatcctcgggggccctggtaccgtccagggcgtggtgcgttttcttcaactgacaccagaaaggtgcctgatcgaagggaccatcgatggcctggaacccggcctgcatggactgcacgtacaccaatatggagatctcacaaacaactgcaacagctgtggcaaccacttcaatcccgacggcgctagccatgggggcccccaggattctgaccgtcatcggggggacctggggaacgtgcgagcagatgctgatggaagggcaatcttccggatggaagatgagcaattgaaggtgtgggacgtgatcgggcgaagcctgatcatcgacgagggagaggacgacttgggccgcggaggacacccattgtctaaaattaccggcaattccggcgaaaggctggcatgcggaataatcgcaaggtccgccgggttattccaaaatcccaagcagatttgttcctgcgatggcttaacaatatgggaggagcgaggccgccctattgctggcaagggccgtaaggagagcgcacaacccccggcccatttgtag

SEQ ID NO: 153029 - DNA, 825 bp, Artificial Sequence
  derived and/or modified sequence
atggcctccgactctggaaaccaaggaaccctgtgtaccctggagtttgccgtccagatgacttgtcagagttgcgtcgatgcagtcaggaagagcctgcagggtgtcgctggcgtgcaggacgtggaggtccatctagaggaccaaatggtcctggtgcatacaactctgccctcacaggaggttcaggctctgctggaaggaactgggcgtcaggcggttctgaaaggcatgggctcaggccaattgcagaatcttggcgcagccgttgccattctgggagggcctggcacagttcagggggtagtccggttcttacagttgaccccagagcgatgtctcattgaagggacaatcgatgggctggaacctggcctacatggccttcacgtacatcaatacggcgacctgaccaacaattgcaacagttgtggaaatcatttcaatccggacggagcctctcatggtggccctcaggactcggatcggcaccgaggcgatctgggcaacgtgagggccgacgccgatggacgggcaatcttcagaatggaggacgagcagttgaaggtatgggatgtcattggcagatccctgattatcgacgagggcgaggacgatctgggccgaggcggtcatcccctatcaaaaattacaggcaacagcggggaacgcctggcatgtggaatcatagccaggtcagcgggactcttccagaaccctaaacagatttgttcgtgtgacggactcaccatttgggaagagagaggcaggcctatcgccggtaagggcaggaaggaaagcgcccaaccccctgcacacctgtag

SEQ ID NO: 153030 - DNA, 1430 bp, Artificial Sequence
  derived and/or modified sequence
cagcttggccacctggctgcacagcgacgccaccgtcagcttcgccagagggaaggactgcagaatccggccctcctgcggggggcgcttctgaggctctggggacgtcgtcctagtggggaagagcgacagcggacgcagcagccggtggtaaaaccgctggagctcaggctcgggcttcgggggctccatcatagagccggcggccgccaccgtccaggaacagaaagccgaggggttactaaggcaaccaggagcccgacggcccgagtgcgcctgcgcggccgccacccggtggctgacgaagcagggccttgcgtgcgcacgcactaggaggaggagttaagggtggctttagaggctcagtccccgcgacgccgcgctggttggtgctcctgcgccggaggagttctgcgtctcggggtggtgactgggtccagaatggcttcggattcggggaaccaggggaccctctgcacgttggagttcgcggtgcagatgacctgtcagagctgtgtggacgcggtgcgcaaatccctgcaaggggtggcaggtgtccaggatgtggaggtgcacttggaggaccagatggtcttggtacacaccactctacccagccaggaggtgcaggctctcctggaaggcacggggcggcaggcggtactcaagggcatgggcagcggccagttgcagaatctgggggcagcagtggccatcctgggggggcctggcaccgtgcagggggtggtgcgcttcctacagctgacccctgagcgctgcctcatcgagggaactattgacggcctggagcctgggctgcatggactccacgtccatcagtacggggaccttacaaacaactgcaacagctgtgggaatcactttaaccctgatggagcatctcatgggggcccccaggactctgaccggcaccgcggagacctgggcaatgtccgtgctgatgctgacggccgcgccatcttcagaatggaggatgagcagctgaaggtgtgggatgtgattggccgcagcctgattattgatgagggagaagatgacctgggccggggaggccatcccttatccaagatcacagggaactccggggagaggttggcctgtggcatcattgcacgctccgctggccttttccagaaccccaagcagatctgctcttgcgatggcctcaccatctgggaggagcgaggccggcccatcgctggcaagggccgaaaggagtcagcgcagccccctgcccacctttgagcaggacctcaccttggctctgttgctgtcctccagggcgagcactttccacttccagagggggccagagggactttgcctgcccagtctttggagagctcagtacagggcaggagctgctgtggtgttcccttggcaaatgaaagttttattttcgtttggga

SEQ ID NO: 153031 - DNA, 825 bp, Artificial Sequence
  derived and/or modified sequence
atggccagcgacagcggcaaccagggcaccctgtgcaccctggagttcgccgtgcagatgacctgccagagctgcgtggacgccgtgagaaagagcctgcagggcgtggccggcgtgcaggacgtggaggtgcacctggaggaccagatggtgctggtgcacaccaccctgcccagccaggaggtgcaggccctgctggagggcaccggcagacaggccgtgctgaagggcatgggcagcggccagctgcagaacctgggcgccgccgtggccatcctgggcggccccggcaccgtgcagggcgtggtgagattcctgcagctgacccccgagagatgcctgatcgagggcaccatcgacggcctggagcccggcctgcacggcctgcacgtgcaccagtacggcgacctgaccaacaactgcaacagctgcggcaaccacttcaaccccgacggcgccagccacggcggcccccaggacagcgacagacacagaggcgacctgggcaacgtgagagccgacgccgacggcagagccatcttcagaatggaggacgagcagctgaaggtgtgggacgtgatcggcagaagcctgatcatcgacgagggcgaggacgacctgggcagaggcggccaccccctgagcaagatcaccggcaacagcggcgagagactggcctgcggcatcatcgccagaagcgccggcctgttccagaaccccaagcagatctgcagctgcgacggcctgaccatctgggaggagagaggcagacccatcgccggcaagggcagaaaggagagcgcccagccccccgcccacctgtag

SEQ ID NO: 153032 - protein, 579 aa, Artificial Sequence
  derived and/or modified sequence
MEVNAGGVIAYISSSSSASSPASCHSEGSENSFQSSSSSVPSSPNSSNSDTNGNPKNGDLANIEGILKNDRIDCSMKTSKSSAPGMTKSHSGVTKFSGMVLLCKVCGDVASGFHYGVHACEGCKGFFRRSIQQNIQYKKCLKNENCSIMRMNRNRCQQCRFKKCLSVGMSRDAVRFGRIPKREKQRMLIEMQSAMKTMMNSQFSGHLQNDTLVEHHEQTALPAQEQLRPKPQLEQENIKSSSPPSSDFAKEEVIGMVTRAHKDTFMYNQEQQENSAESMQPQRGERIPKNMEQYNLNHDHCGNGLSSHFPCSESQQHLNGQFKGRNIMHYPNGHAICIANGHCMNFSNAYTQRVCDRVPIDGFSQNENKNSYLCNTGGRMHLVCPLSKSPYVDPHKSGHEIWEEFSMSFTPAVKEVVEFAKRIPGFRDLSQHDQVNLLKAGTFEVLMVRFASLFDAKERTVTFLSGKKYSVDDLHSMGAGDLLNSMFEFSEKLNALQLSDEEMSLFTAVVLVSADRSGIENVNSVEALQETLIRALRTLIMKNHPNEASIFTKLLLKLPDLRSLNNMHSEELLAFKVHP

SEQ ID NO: 153033 - protein, 408 aa, Artificial Sequence
  derived and/or modified sequence
MEVNAGGVIAYISSSSSASSPASCHSEGSENSFQSSSSSVPSSPNSSNSDTNGNPKNGDLANIEGILKNDRIDCSMKTSKSSAPGMTKSHSGVTKFSGMVLLCKVCGDVASGFHYGVHACEGCKGFFRRSIQQNIQYKKCLKNENCSIMRMNRNRCQQCRFKKCLSVGMSRDAVRFGRIPKREKQRMLIEMQSAMKTMMNSQFSGHLQNDTLVEHHEQTALPAQEQLRPKPQLEQENIKSSSPPSSDFAKEEVIGMVTRAHKDTFMYNQEQQENSAESMQPQRGERIPKNMEQYNLNHDHCGNGLSSHFPCSESQQHLNGQFKGRNIMHYPNGHAICIANGHCMNFSNAYTQRVCDRVPIDGFSQNENKNSYLCNTGGRMHLYSVHIQPKFHQKQQYHTISSLNHEVL

SEQ ID NO: 153034 - DNA, 5268 bp, Artificial Sequence
  derived and/or modified sequence
gtcacatggtcgcggctgccctccccgtcagccgccctcgccgccgcggtgcgctggctgcaggaagccgccgcgccgccgcttttgttgtcagggacccagcgaggagcgccgctcgccggccgccgccaccctctctcgctgcagcctgctgtgcgctgcacggcctggggcccgggagccccgcccgctctgcccatgagggggccccgcgaccaccgctgcttccagcccggggcggcgcggcgctgaggcggcggcggcggcgctgccccctctgcgggaagcgggcggccccggccgcctccgcgagggcaccatggaggtgaatgcaggaggtgtgattgcctatatcagttcttccagctcagcctcaagccctgcctcttgtcacagtgagggttctgagaatagtttccagtcctcctcctcttctgttccatcttctccaaatagctctaattctgataccaatggtaatcccaagaatggtgatctcgccaatattgaaggcatcttgaagaatgatcgaatagattgttctatgaaaacaagcaaatcgagtgcacctgggatgacaaaaagtcatagtggtgtgacaaaatttagtggcatggttctactgtgtaaagtctgtggggatgtggcgtcaggattccactatggagttcatgcttgcgaaggctgtaagggtttctttcggagaagtattcaacaaaacatccagtacaagaagtgcctgaagaatgaaaactgttctataatgagaatgaataggaacagatgtcagcaatgtcgcttcaaaaagtgtctgtctgttggaatgtcaagagatgctgttcggtttggtcgtattcctaagcgtgaaaaacagaggatgctaattgaaatgcaaagtgcaatgaagaccatgatgaacagccagttcagtggtcacttgcaaaatgacacattagtagaacatcatgaacagacagccttgccagcccaggaacagctgcgacccaagccccaactggagcaagaaaacatcaaaagctcttctcctccatcttctgattttgcaaaggaagaagtgattggcatggtgaccagagctcacaaggatacctttatgtataatcaagagcagcaagaaaactcagctgagagcatgcagccccagagaggagaacggattcccaagaacatggagcaatataatttaaatcatgatcattgcggcaatgggcttagcagccattttccctgtagtgagagccagcagcatctcaatggacagttcaaagggaggaatataatgcattacccaaatggtcatgccatttgtattgcaaatggacattgtatgaacttctccaatgcttatactcaaagagtatgtgatagagttccgatagatggattttctcagaatgagaacaagaatagttacctgtgcaacactggaggaagaatgcatctggtttgtccaatgagtaagtctccatatgtggatcctcataaatcaggacatgaaatctgggaagaattttcgatgagcttcactccagcagtgaaagaagtggtggaatttgcaaagcgtattcctgggttcagagatctctctcagcatgaccaggtcaaccttttaaaggctgggacttttgaggttttaatggtacggttcgcatcattatttgatgcaaaggaacgtactgtcacctttttaagtggaaagaaatatagtgtggatgatttacactcaatgggagcaggggatctgctaaactctatgtttgaatttagtgagaagctaaatgccctccaacttagtgatgaagagatgagtttgtttacagctgttgtcctggtatctgcagatcgatctggaatagaaaacgtcaactctgtggaggctttgcaggaaactctcattcgtgcactaaggaccttaataatgaaaaaccatccaaatgaggcctctatttttacaaaactgcttctaaagttgccagatcttcgatctttaaacaacatgcactctgaggagctcttggcctttaaagttcacccttaaggcctttgtttatttaaacatgaactgatggtaactgtacattttgtgctaaaatgcatatttatatgtgtataccatatgtggagatagaaaagacctttaagacaataaaagattgtaggctatctctgtaatcatgcaatagctgttcggattgagaactcttcagccatgattagacgttgactgcatctccctgatagaccaatcagctgtgtcgcacttaaactggagaagttacactgaagtataatcacactgaatgttagactttttcatctgccaaaaccaaaaaccattttgatctccctgtggttatcaatataacgcacaatcacaagtgtatgaggacttagaaattaatcctttgtggtaggagttctgttgaatgatggaaatcttattactaccacaagactatttgatctggtaattggagacttcgggatttaggagatctccatgtctgtatttactctaccactgctaaagtgtgtggtcctgggtagtttacttgcttgcggaaaatgagaattgatggtgtccccaatgccccacctcacagagttactaaaaaatgtctgtaaagcatatttacctcttgggagataggcactatgtaaataaggtaaaatttctgttattacaattattcataataatattcttttcttatttctaagcctttctgggaaatcatttcagtccacaccaaccatattattcagggttcctgccatatgtgtggggtatcctactgatacacacgtattcaaagtttatgggtacaacaaagacatagtacatgtacataatatgtatgtgaatatagttaaatatatttcttcacaatattttaaactgtgaagaactttatcatacaggaaacttaaaacaagaggtgtcaaaagacccaaattaggtgcattttacttgtttatgatggcataaccattgctttaaaatgtttagacagtagaatattgaatttatgctctatttttgtttatttaagcaacacttaatgtaaaagtgcaacaggcaattgaatccaaatttcaacgacaaaaaaaaaaaacatgtattttagagttcatctttggcaaaatctttggttcagggtactagttgtttaaaagttgattcatattcttaccttgtgctgagaaaggttgcattgctgccccttatacacatgctgcagcttgatgttaaagaatttttattctttctgaagaactaattaatgtttaaagcaactgtttaatatgatggcatgtgtgtgtgtgcgtgcgtgtgtatgttctgagtccacttcttttttcctaaataacactacagggattttgtcatattagatttaatttataatttgaaaaatcatctagtgtgtgacctacaggcttagaaatggtatagtcaaagacattttatccacatttctaatagtggacttgattaagtagataagatcagcatctgtttatggtagtaggagaaatagccaaagttgaggattttatgtatgttttcctgtttacctggaaaatagcaattaattggattttttggtaaagattgccttctgtataatgtttggattatataaaattgcaaaaatgataacagcccgctttactgtactaagcctgttactttcatgacgtgtgagcagaatgccttattttgtaatcttgtttaacttgttgctactgggacttgatttactgtggcactagttaagtaagttaaaaaaaagttaaaccctctcattattaaagaggaaaggcgatggtgatgtctgtagtacaatataaaccataattgtgatttaccttaagtaggtataactcttatgggatatacagtatagtttttgtgaatctttacatgatagcattatctttttataattttttttcctaagataaacaaatgcatagttttcttctatgggtgatagaaacagctttttgaagtaatgaaaacctcaaaagatcatgttgattcttaatttttgccttttgcataagcctctttataacatgtatctttaaaacaattaagtctttaggaatgtgtaaccagaactatgttagtattgcttataaaactttagttaggttcaatatatacatatatacatctctatataggtatatagatttgcattttgtcttgtaaaattttatttgaataaattcttcctgtaggtaatgggaaacaaaattaatagttcatatgtcactcatagcatttctatatttgaaagtagcccaatataaaacttttgattctaaaattaaaccagcagcctattacaagcacattctttgattgagtcattggttataaacttactaaatgcagagaaagcagccaatttaggaaacttctgagttggtgggacactgttgattaataatgtactgtatgaattaagtgatgctttaactttgattttacattttaaagttaaaatgtgggcattatgtcagcaaacttaagggcattatgtcagcaagctaaaacattttttttcctgtgcttttaatgtatctctttacatgatctgagagaggattcaagttgatagaaatagctgaggggaaaagggggaacatcttgggatgaagcttgtccttatggtgatggtttaattacagattaaaaaattagaaggaaatttcagtggattaagtgtatagctttcatatctacatttcaagaaattaccattgtaacttgataagagatgatttattttatgtaaacatctttgcaaagcaaggtgtagcagctcagctagatttattactgtgcacgaaagtaaatacctatctcaattattctttttcttttccaatataaagtttgctgaatgtacaagaagagtttatcacttaggatatagaatttttttaggggttgggggaggggatctgttaggaaactgttacctataaacaaagattgactggattcgatccaaaagataaaacttgaagctattctggaactaacatggaaaaatgaaatggctattgtttaaaaaaatgatagaaatacattgttgatgggatatgagttaagtttattttctacaaactgtaattgatgaggacatggataatatcttcatgtttctgagaagtaatctgtatgtggggggaggggataataaatatttctaaccaacaaaaaaaaaa

SEQ ID NO: 153035 - DNA, 1740 bp, Artificial Sequence
  derived and/or modified sequence
atggaggtgaatgcgggcggggtgattgcttacatatcctcgtcatccagcgcgtccagtcccgccagctgtcacagcgaggggagtgaaaactcctttcaatcctcctccagttcagtgcccagctctcccaattcctcgaattcagacactaacggcaatccaaagaacggtgacttggctaacatcgagggaatccttaagaatgacaggatcgactgctccatgaagacatcgaagtcctctgctccaggcatgacgaagtcacacagtggtgtgacgaaatttagcggaatggttctcctttgtaaagtttgcggtgacgtcgcatccggctttcattacggcgttcatgcatgcgaaggatgtaagggctttttcaggaggtctatccagcagaacatccaatacaagaagtgcttgaagaacgagaactgctccattatgcgaatgaaccggaatagatgtcagcaatgtaggtttaagaagtgtctctcggtaggaatgagtagagatgccgtccggtttggacgtattcccaagagagaaaagcagagaatgctgatcgagatgcagtcagctatgaaaacaatgatgaactcgcaattcagtggccacctacaaaacgatactctggtggagcatcacgagcagacagcccttccggctcaggagcagttgcgccccaaaccccagttagagcaagaaaacattaagtcaagctcccccccctctagcgactttgccaaggaggaggtgatcggtatggtgacgagggctcataaggatacctttatgtacaaccaggaacagcaggaaaactccgccgaatctatgcagcctcagaggggggagcgtatccccaagaatatggagcaatataacttgaaccatgaccactgcggcaacggactgagttctcacttcccttgcagcgagtcccagcagcacctgaacgggcagttcaaaggacggaacattatgcactatccaaatggccacgcgatatgtatagcaaatggtcactgcatgaacttctctaatgcctatacccaacgcgtgtgtgacagggtaccaatcgatggctttagtcagaatgagaataagaactcttacctctgcaacactggtgggagaatgcatctcgtgtgtcctctgagtaagtctccctatgtcgacccacacaagtccgggcacgagatctgggaggagttctcaatgtcttttacgccagcggtaaaagaggttgtcgagtttgccaagcggatccctggattcagagacctatcgcagcatgaccaggtaaatctgctgaaggcaggcacatttgaagtgctcatggtgcggtttgcttccctttttgatgccaaagaaagaacagtgacatttctctccggaaagaagtactctgtggacgaccttcacagtatgggcgccggagacctgttgaattctatgtttgaattcagcgagaaactcaacgctctacagctttctgacgaggagatgtctctgttcaccgccgtggtcttggtgtctgccgatcgcagcggtatcgagaacgtcaatagtgtggaagctcttcaagagacacttatccgggcattgcggaccctgataatgaagaaccatccaaatgaggccagcatttttactaagttgcttctgaagctgcctgacttacgatcactgaacaacatgcatagcgaggaacttcttgccttcaaggtccatccatag

SEQ ID NO: 153036 - DNA, 1740 bp, Artificial Sequence
  derived and/or modified sequence
atggaggtcaacgctggaggcgtgatcgcttatataagctctagctctagcgcctccagtcccgcgagctgtcactcagagggaagcgaaaatagctttcagtcttcttcaagcagtgtgccctcttcaccaaacagtagcaactcagacacaaacggcaatcccaaaaatggggatctcgctaacattgagggcatcctcaagaatgataggatcgattgcagcatgaaaacatcaaagtcttccgccccagggatgaccaagtcccattcaggtgtgacgaaattctcaggcatggtgctcctctgcaaggtgtgtggggatgtcgcaagcggattccactacggggttcatgcttgcgaaggatgcaaaggtttttttagaaggagcattcaacagaacattcaatacaagaagtgcctaaagaacgagaactgtagtatcatgagaatgaacaggaacaggtgtcagcagtgcaggtttaaaaagtgcctgtcagtcggaatgagcagggatgctgttcgattcggtaggatcccaaagcgagagaagcaaaggatgttgatcgagatgcagtcagctatgaaaacaatgatgaatagccaattctctgggcatcttcaaaatgatacactggtggaacatcacgagcaaaccgctttgccagcccaggagcagctgcgtcctaaaccgcagcttgaacaggaaaatattaaatcttcaagtcccccctcatcggatttcgctaaagaagaggtcatcggcatggtcactagagctcataaggacacatttatgtacaatcaggagcagcaggagaacagcgccgagtcaatgcagccgcagcggggagagcgcattccaaagaacatggaacagtacaatcttaatcacgaccattgcggcaatggcttgtcatcccacttcccatgctccgaaagccagcagcatctgaacgggcaattcaagggcaggaatattatgcattatcccaacggacacgccatctgcattgctaatggacactgtatgaatttctccaatgcctacacccagcgcgtctgcgaccgagtcccaattgacggtttttctcaaaacgagaataagaatagttacttatgtaataccggcgggcggatgcatctggtctgtcctctgagtaaatccccctacgtagatccacacaagagtggccacgagatttgggaggagttctccatgagctttactccagctgtgaaagaggttgtggagttcgcaaagaggatccctgggttccgagatttgtcgcaacacgatcaagtaaatctgctgaaagcaggcaccttcgaggtgttgatggtgagatttgcctcgctgtttgatgctaaggagcggaccgtaacctttctttctggaaaaaagtactctgttgatgatcttcactcgatgggggccggcgatctgctcaatagtatgttcgaattctcggagaaactgaatgccctgcaactctctgatgaggaaatgtcattgttcaccgctgtggtgctcgttagcgccgacagaagcggcattgaaaacgtgaactcagtagaagctctgcaggaaaccctgatccgggctctacggactttaattatgaagaaccatccaaacgaggctagcatcttcaccaagttgcttcttaaattgccagatctgagaagcctgaataatatgcacagcgaggagctcttggcctttaaggtacacccatag

SEQ ID NO: 153037 - DNA, 4386 bp, Artificial Sequence
  derived and/or modified sequence
gtcacatggtcgcggctgccctccccgtcagccgccctcgccgccgcggtgcgctggctgcaggaagccgccgcgccgccgcttttgttgtcagggacccagcgaggagcgccgctcgccggccgccgccaccctctctcgctgcagcctgctgtgcgctgcacggcctggggcccgggagccccgcccgctctgcccatgagggggccccgcgaccaccgctgcttccagcccggggcggcgcggcgctgaggcggcggcggcggcgctgccccctctgcgggaagcgggcggccccggccgcctccgcgagggcaccatggaggtgaatgcaggaggtgtgattgcctatatcagttcttccagctcagcctcaagccctgcctcttgtcacagtgagggttctgagaatagtttccagtcctcctcctcttctgttccatcttctccaaatagctctaattctgataccaatggtaatcccaagaatggtgatctcgccaatattgaaggcatcttgaagaatgatcgaatagattgttctatgaaaacaagcaaatcgagtgcacctgggatgacaaaaagtcatagtggtgtgacaaaatttagtggcatggttctactgtgtaaagtctgtggggatgtggcgtcaggattccactatggagttcatgcttgcgaaggctgtaagggtttctttcggagaagtattcaacaaaacatccagtacaagaagtgcctgaagaatgaaaactgttctataatgagaatgaataggaacagatgtcagcaatgtcgcttcaaaaagtgtctgtctgttggaatgtcaagagatgctgttcggtttggtcgtattcctaagcgtgaaaaacagaggatgctaattgaaatgcaaagtgcaatgaagaccatgatgaacagccagttcagtggtcacttgcaaaatgacacattagtagaacatcatgaacagacagccttgccagcccaggaacagctgcgacccaagccccaactggagcaagaaaacatcaaaagctcttctcctccatcttctgattttgcaaaggaagaagtgattggcatggtgaccagagctcacaaggatacctttatgtataatcaagagcagcaagaaaactcagctgagagcatgcagccccagagaggagaacggattcccaagaacatggagcaatataatttaaatcatgatcattgcggcaatgggcttagcagccattttccctgtagtgagagccagcagcatctcaatggacagttcaaagggaggaatataatgcattacccaaatggtcatgccatttgtattgcaaatggacattgtatgaacttctccaatgcttatactcaaagagtatgtgatagagttccgatagatggattttctcagaatgagaacaagaatagttacctgtgcaacactggaggaagaatgcatctggtttgtccattgagtaagtctccatatgtggatcctcataaatcaggacatgaaatctgggaagaattttcgatgagcttcactccagcagtgaaagaagtggtggaatttgcaaagcgtattcctgggttcagagatctctctcagcatgaccaggtcaaccttttaaaggctgggacttttgaggttttaatggtacggttcgcatcattatttgatgcaaaggaacgtactgtcacctttttaagtggaaagaaatatagtgtggatgatttacactcaatgggagcaggggatctgctaaactctatgtttgaatttagtgagaagctaaatgccctccaacttagtgatgaagagatgagtttgtttacagctgttgtcctggtatctgcagatcgatctggaatagaaaacgtcaactctgtggaggctttgcaggaaactctcattcgtgcactaaggaccttaataatgaaaaaccatccaaatgaggcctctatttttacaaaactgcttctaaagttgccagatcttcgatctttaaacaacatgcactctgaggagctcttggcctttaaagttcacccttaaggcctttgtttatttaaacatgaactgatggtaactgtacattttgtgctaaaatgcatatttatatgtgtataccatatgtggagatagaaaagacctttaagacaataaaagattgtaggctatctctgtaatcatgcaatagctgttcggattgagaactcttcagccatgattagacgttgactgcatctccctgatagaccaatcagctgtgtcgcacttaaactggagaagttacactgaagtataatcacactgaatgttagactttttcatctgccaaaaccaaaaaccattttgatctccctgtggttatcaatataacgcacaatcacaagtgtatgaggacttagaaattaatcctttgtggtaggagttctgttgaatgatggaaatcttattactaccacaagactatttgatctggtaattggagacttcgggatttaggagatctccatgtctgtatttactctaccactgctaaagtgtgtggtcctgggtagtttacttgcttgcggaaaatgagaattgatggtgtccccaatgccccacctcacagagttactaaaaaatgtctgtaaagcatatttacctcttgggagataggcactatgtaaataaggtaaaatttctgttattacaattattcataataatattcttttcttatttctaagcctttctgggaaatcatttcagtccacaccaaccatattattcagggttcctgccatatgtgtggggtatcctactgatacacacgtattcaaagtttatgggtacaacaaagacatagtacatgtacataatatgtatgtgaatatagttaaatatatttcttcacaatattttaaactgtgaagaactttatcatacaggaaacttaaaacaagaggtgtcaaaagacccaaattaggtgcattttacttgtttatgatggcataaccattgctttaaaatgtttagacagtagaatattgaatttatgctctatttttgtttatttaagcaacacttaatgtaaaagtgcaacaggcaattgaatccaaatttcaacgacaaaaaaaaaaaacatgtattttagagttcatctttggcaaaatctttggttcagggtactagttgtttaaaagttgattcatattcttaccttgtgctgagaaaggttgcattgctgccccttatacacatgctgcagcttgatgttaaagaatttttattctttctgaagaactaattaatgtttaaagcaactgtttaatatgatggcatgtgtgtgtgtgcgtgcgtgtgtatgttctgagtccacttcttttttcctaaataacactacagggattttgtcatattagatttaatttataatttgaaaaatcatctagtgtgtgacctacaggcttagaaatggtatagtcaaagacattttatccacatttctaatagtggacttgattaagtagataagatcagcatctgtttatggtagtaggagaaatagccaaagttgaggattttatgtatgttttcctgtttacctggaaaatagcaattaattggattttttggtaaagattgccttctgtataatgtttggattatataaaattgcaaaaatgataacagcccgctttactgtactaagcctgttactttcatgacgtgtgagcagaatgccttattttgtaatcttgtttaacttgttgctactgggacttgatttactgtggcactagttaagtaagttaaaaaaaagttaaaccctctcattattaaagaggaaaggcgatggtgatgtctgtagtacaatataaaccataattgtgatttaccttaagtaggtataactcttatgggatatacagtatagtttttgtgaatctttacatgatagcattatctttttataattttttttcctaagataaacaaatgcatagttttcttctatgggtgatagaaacagctttttgaagtaatgaaaacctcaaaagatcatgttgattcttaatttttgccttttgcataagcctctttataacatgtatctttaaaacaattaagtctttaggaatgtgtaaccagaactatgttagtattgcttataaaactttagttaggttcaatatatacatatatacatctctatataggtatatagatttgcattttgtcttgtaaaattttatttgaataaattcttcctgtaggtaatgggaaacaaaattaatagttcatatgtcactcatagcatttctatatttgaaagtagcccaatataaaacttttgattctaaaattaaaccagcagcctattacaagca

SEQ ID NO: 153038 - DNA, 4375 bp, Artificial Sequence
  derived and/or modified sequence
tcgccggccgccgccaccctctctcgctgcagcctgctgtgcgctgcacggcctggggcccgggagccccgcccgctctgcccatgagggggccccgcgaccaccgctgcttccagcccggggcggcgcggcgctgaggcggcggcggcggcgctgccccctctgcgggaagcgggcggccccggccgcctccgcgagggcaccatggaggtgaatgcaggaggtgtgattgcctatatcagttcttccagctcagcctcaagccctgcctcttgtcacagtgagggttctgagaatagtttccagtcctcctcctcttctgttccatcttctccaaatagctctaattctgataccaatggtaatcccaagaatggtgatctcgccaatattgaaggcatcttgaagaatgatcgaatagattgttctatgaaaacaagcaaatcgagtgcacctgggatgacaaaaagtcatagtggtgtgacaaaatttagtggcatggttctactgtgtaaagtctgtggggatgtggcgtcaggattccactatggagttcatgcttgcgaaggctgtaagggtttctttcggagaagtattcaacaaaacatccagtacaagaagtgcctgaagaatgaaaactgttctataatgagaatgaataggaacagatgtcagcaatgtcgcttcaaaaagtgtctgtctgttggaatgtcaagagatgctgttcggtttggtcgtattcctaagcgtgaaaaacagaggatgctaattgaaatgcaaagtgcaatgaagaccatgatgaacagccagttcagtggtcacttgcaaaatgacacattagtagaacatcatgaacagacagccttgccagcccaggaacagctgcgacccaagccccaactggagcaagaaaacatcaaaagctcttctcctccatcttctgattttgcaaaggaagaagtgattggcatggtgaccagagctcacaaggatacctttatgtataatcaagagcagcaagaaaactcagctgagagcatgcagccccagagaggagaacggattcccaagaacatggagcaatataatttaaatcatgatcattgcggcaatgggcttagcagccattttccctgtagtgagagccagcagcatctcaatggacagttcaaagggaggaatataatgcattacccaaatggtcatgccatttgtattgcaaatggacattgtatgaacttctccaatgcttatactcaaagagtatgtgatagagttccgatagatggattttctcagaatgagaacaagaatagttacctgtgcaacactggaggaagaatgcatctgtacagtgttcatattcagccaaaatttcaccaaaaacagcagtaccacaccatttccagtttaaaccatgaagtcctttgatagtgcttggtattttctactgacaggtttgtccattgagtaagtctccatatgtggatcctcataaatcaggacatgaaatctgggaagaattttcgatgagcttcactccagcagtgaaagaagtggtggaatttgcaaagcgtattcctgggttcagagatctctctcagcatgaccaggtcaaccttttaaaggctgggacttttgaggttttaatggtacggttcgcatcattatttgatgcaaaggaacgtactgtcacctttttaagtggaaagaaatatagtgtggatgatttacactcaatgggagcaggggatctgctaaactctatgtttgaatttagtgagaagctaaatgccctccaacttagtgatgaagagatgagtttgtttacagctgttgtcctggtatctgcagatcgatctggaatagaaaacgtcaactctgtggaggctttgcaggaaactctcattcgtgcactaaggaccttaataatgaaaaaccatccaaatgaggcctctatttttacaaaactgcttctaaagttgccagatcttcgatctttaaacaacatgcactctgaggagctcttggcctttaaagttcacccttaaggcctttgtttatttaaacatgaactgatggtaactgtacattttgtgctaaaatgcatatttatatgtgtataccatatgtggagatagaaaagacctttaagacaataaaagattgtaggctatctctgtaatcatgcaatagctgttcggattgagaactcttcagccatgattagacgttgactgcatctccctgatagaccaatcagctgtgtcgcacttaaactggagaagttacactgaagtataatcacactgaatgttagactttttcatctgccaaaaccaaaaaccattttgatctccctgtggttatcaatataacgcacaatcacaagtgtatgaggacttagaaattaatcctttgtggtaggagttctgttgaatgatggaaatcttattactaccacaagactatttgatctggtaattggagacttcgggatttaggagatctccatgtctgtatttactctaccactgctaaagtgtgtggtcctgggtagtttacttgcttgcggaaaatgagaattgatggtgtccccaatgccccacctcacagagttactaaaaaatgtctgtaaagcatatttacctcttgggagataggcactatgtaaataaggtaaaatttctgttattacaattattcataataatattcttttcttatttctaagcctttctgggaaatcatttcagtccacaccaaccatattattcagggttcctgccatatgtgtggggtatcctactgatacacacgtattcaaagtttatgggtacaacaaagacatagtacatgtacataatatgtatgtgaatatagttaaatatatttcttcacaatattttaaactgtgaagaactttatcatacaggaaacttaaaacaagaggtgtcaaaagacccaaattaggtgcattttacttgtttatgatggcataaccattgctttaaaatgtttagacagtagaatattgaatttatgctctatttttgtttatttaagcaacacttaatgtaaaagtgcaacaggcaattgaatccaaatttcaacgacaaaaaaaaaaaacatgtattttagagttcatctttggcaaaatctttggttcagggtactagttgtttaaaagttgattcatattcttaccttgtgctgagaaaggttgcattgctgccccttatacacatgctgcagcttgatgttaaagaatttttattctttctgaagaactaattaatgtttaaagcaactgtttaatatgatggcatgtgtgtgtgtgcgtgcgtgtgtatgttctgagtccacttcttttttcctaaataacactacagggattttgtcatattagatttaatttataatttgaaaaatcatctagtgtgtgacctacaggcttagaaatggtatagtcaaagacattttatccacatttctaatagtggacttgattaagtagataagatcagcatctgtttatggtagtaggagaaatagccaaagttgaggattttatgtatgttttcctgtttacctggaaaatagcaattaattggattttttggtaaagattgccttctgtataatgtttggattatataaaattgcaaaaatgataacagcccgctttactgtactaagcctgttactttcatgacgtgtgagcagaatgccttattttgtaatcttgtttaacttgttgctactgggacttgatttactgtggcactagttaagtaagttaaaaaaaagttaaaccctctcattattaaagaggaaaggcgatggtgatgtctgtagtacaatataaaccataattgtgatttaccttaagtaggtataactcttatgggatatacagtatagtttttgtgaatctttacatgatagcattatctttttataattttttttcctaagataaacaaatgcatagttttcttctatgggtgatagaaacagctttttgaagtaatgaaaacctcaaaagatcatgttgattcttaatttttgccttttgcataagcctctttataacatgtatctttaaaacaattaagtctttaggaatgtgtaaccagaactatgttagtattgcttataaaactttagttaggttcaatatatacatatatacatctctatataggtatatagatttgcattttgtcttgtaaaattttatttgaataaattcttcctgtaggtaatgggaaacaaaattaatagttcatatgtcactcatagcatttctatatttgaaagtagcccaatataaaacttttgattctaaaattaaaccagcagcctattacaa

SEQ ID NO: 153039 - DNA, 1877 bp, Artificial Sequence
  derived and/or modified sequence
ggtgcgctggctgcaggaagccgccgcgccgccgcttttgttgtcagggacccagcgaggagcgccgctcggcggcggcggcggcgctgccccctctgcgggaagcgggcggccccggccgcctccgcgagggcaccatggaggtgaatgcaggaggtgtgattgcctatatcagttcttccagctcagcctcaagccctgcctcttgtcacagtgagggttctgagaatagtttccagtcctcctcctcttctgttccatcttctccaaatagctctaattctgataccaatggtaatcccaagaatggtgatctcgccaatattgaaggcatcttgaagaatgatcgaatagattgttctatgaaaacaagcaaatcgagtgcacctgggatgacaaaaagtcatagtggtgtgacaaaatttagtggcatggttctactgtgtaaagtctgtggggatgtggcgtcaggattccactatggagttcatgcttgcgaaggctgtaagggtttctttcggagaagtattcaacaaaacatccagtacaagaagtgcctgaagaatgaaaactgttctataatgagaatgaataggaacagatgtcagcaatgtcgcttcaaaaagtgtctgtctgttggaatgtcaagagatgctgttcggtttggtcgtattcctaagcgtgaaaaacagaggatgctaattgaaatgcaaagtgcaatgaagaccatgatgaacagccagttcagtggtcacttgcaaaatgacacattagtagaacatcatgaacagacagccttgccagcccaggaacagctgcgacccaagccccaactggagcaagaaaacatcaaaagctcttctcctccatcttctgattttgcaaaggaagaagtgattggcatggtgaccagagctcacaaggatacctttatgtataatcaagagcagcaagaaaactcagctgagagcatgcagccccagagaggagaacggattcccaagaacatggagcaatataatttaaatcatgatcattgcggcaatgggcttagcagccattttccctgtagtgagagccagcagcatctcaatggacagttcaaagggaggaatataatgcattacccaaatggtcatgccatttgtattgcaaatggacattgtatgaacttctccaatgcttatactcaaagagtatgtgatagagttccgatagatggattttctcagaatgagaacaagaatagttacctgtgcaacactggaggaagaatgcatctggtttgtccattgagtaagtctccatatgtggatcctcataaatcaggacatgaaatctgggaagaattttcgatgagcttcactccagcagtgaaagaagtggtggaatttgcaaagcgtattcctgggttcagagatctctctcagcatgaccaggtcaaccttttaaaggctgggacttttgaggttttaatggtacggttcgcatcattatttgatgcaaaggaacgtactgtcacctttttaagtggaaagaaatatagtgtggatgatttacactcaatgggagcaggggatctgctaaactctatgtttgaatttagtgagaagctaaatgccctccaacttagtgatgaagagatgagtttgtttacagctgttgtcctggtatctgcagatcgatctggaatagaaaacgtcaactctgtggaggctttgcaggaaactctcattcgtgcactaaggaccttaataatgaaaaaccatccaaatgaggcctctatttttacaaaactgcttctaaagttgccagatcttcgatctttaaacaacatgcactctgaggagctcttggcctttaaagttcacccttaa

SEQ ID NO: 153040 - DNA, 1740 bp, Artificial Sequence
  derived and/or modified sequence
atggaggtgaatgctgggggcgtgattgcctacatcagcagcagcagcagcgccagcagccctgccagctgccacagcgagggcagcgagaacagcttccagagcagcagcagctctgtgcccagcagccccaacagcagcaacagcgacaccaacggcaaccccaagaatggagacctggccaacatcgagggcatcctgaagaatgacagaattgactgcagcatgaagaccagcaagagcagcgcccctggcatgaccaagagccacagcggcgtgaccaagttcagcggcatggtgctgctgtgcaaggtgtgtggagatgtggccagcggcttccactatggagtgcacgcctgtgagggctgcaagggcttcttccgccgcagcatccagcagaacatccagtacaagaagtgcctgaagaatgaaaactgcagcatcatgaggatgaacagaaaccgctgccagcagtgccgcttcaagaagtgcctgtctgtgggcatgagcagagatgctgtgcgcttcggccgcatccccaagcgggagaagcagaggatgctgattgagatgcagagcgccatgaagaccatgatgaacagccagttcagcggccacctgcagaatgacaccctggtggagcaccacgagcagacagccctgcctgcccaggagcagctgcggcccaagccccagctggagcaggagaacatcaagagcagcagcccccccagcagtgactttgccaaggaggaggtgattggcatggtgacccgggcccacaaggacaccttcatgtacaaccaggagcagcaggagaacagcgctgagagcatgcagccccagagaggagagcgcatccccaagaacatggagcagtacaacctgaaccacgaccactgtggaaatggcctgagcagccacttcccctgcagcgagagccagcagcacctgaatggccagttcaagggcaggaacatcatgcactaccccaacggccacgccatctgcatcgccaacggccactgcatgaacttcagcaatgcctacacccagagggtgtgtgacagagtgcccattgatggcttcagccagaatgaaaacaagaacagctacctgtgcaacacaggaggccgcatgcacctggtgtgccccctgagcaagagcccctacgtggacccccacaagagcggccacgagatctgggaggagttctccatgtccttcaccccagctgtgaaggaggtggtggagtttgccaagagaattcctggcttccgggacctgagccagcacgaccaggtgaacctgctgaaggccggcacctttgaggtgctgatggtgcgctttgccagcctgtttgatgccaaggagaggacagtgaccttcctgagcggcaagaagtacagcgtggatgacctgcacagcatgggcgctggggacctgctgaacagcatgtttgagttcagcgagaagctgaatgccctgcagctgagtgatgaggagatgagcctcttcaccgctgtggtgctggtgtctgctgacagaagtggcattgaaaatgtgaacagcgtggaggccctgcaggagaccctcatccgggccctgcggaccctcatcatgaagaaccaccccaatgaggccagcatcttcaccaagctgctgctgaagctgcctgacctgcggagcctgaacaacatgcacagcgaggagctgctggccttcaaggtgcacccctag

SEQ ID NO: 153041 - DNA, 1740 bp, Artificial Sequence
  derived and/or modified sequence
atggaggtgaacgccggcggcgtgatcgcctacatcagcagcagctcctcagcttctagtccggcctcatgccattctgagggaagcgagaattcatttcagtcttcctcatcctccgttccctctagcccaaatagctccaatagcgataccaatggaaatcccaaaaatggggatctggctaacatcgaagggattcttaaaaacgaccggatcgattgttccatgaaaacaagcaaatcctctgcacctgggatgaccaaatctcactccggggtgactaagttttccggtatggttttgctatgcaaagtgtgcggagatgtggcgagcggctttcactacggggttcatgcttgcgagggttgtaaaggatttttccgccgcagtatccaacagaatattcaatataagaagtgcctgaaaaacgaaaattgttcaatcatgcgcatgaaccggaatagatgccagcagtgtcggttcaagaagtgtctgagtgtgggaatgtctcgggacgccgtccggtttggaaggattcccaagcgggagaagcagcgcatgctgatcgagatgcaatctgcgatgaagactatgatgaacagccagttctcaggccatctccagaatgatactctggtagaacatcacgagcagacagcccttcccgcccaggagcaactaaggccaaagcctcaactggaacaggaaaacatcaaatcatcttcaccccctagttctgattttgcgaaagaagaagtgatcggcatggtcactcgagcacacaaagacacgtttatgtataaccaggagcagcaagagaattcagctgaaagcatgcaacctcagcggggcgaaaggatcccaaagaatatggaacagtacaacctgaaccacgaccattgtggaaatggcctcagctcccattttccttgctctgaaagccaacagcacttgaacggccagttcaaaggtcgcaatataatgcactatcctaatgggcacgctatctgtatagctaatggtcattgcatgaatttctccaatgcctacacccagcgcgtgtgtgaccgagtaccaattgatggcttcagccagaacgagaataagaatagctatctgtgtaatacaggcggccgcatgcatctcgtctgtccgctaagtaaaagcccatacgtcgatcctcacaagagtggtcatgaaatctgggaagaattcagcatgtcattcactcccgcagttaaggaagtggtagaattcgcaaaaaggattcccggctttagggacttgtcgcagcatgatcaggtgaatctgctgaaggctggcacatttgaggtgctgatggtcaggtttgcaagcctattcgacgcaaaagagcggacagtcacctttctgtcgggtaagaaatattccgtggatgatcttcattcaatgggcgccggagacctgctgaattccatgtttgaattctcagaaaagctgaacgcactccagttgtctgacgaagagatgagccttttcacagctgtggttttagtgagcgccgatagatccggcatcgagaacgtcaatagcgttgaggccttgcaggaaaccttgattagggctcttcgaaccctgattatgaagaaccatcccaacgaggcctccatattcactaagttgctgctcaaattgccagatctgagaagcctgaacaatatgcacagcgaggagttgttagctttcaaggtgcacccatag

SEQ ID NO: 153042 - DNA, 1740 bp, Artificial Sequence
  derived and/or modified sequence
atggaggtgaacgccggcggcgtgatcgcctacatcagcagcagcagctccgcatcaagtcctgcttcctgtcactccgagggttctgaaaactcattccagtcatccagcagttcggtacctagtagcccgaactctagcaactccgacaccaatggaaaccctaagaatggagaccttgctaatattgaaggcatcttaaaaaacgataggatcgactgcagcatgaagacctcgaaatcgtccgcgcctggtatgacaaaatctcactctggggtaaccaaattttcagggatggtcttgctgtgtaaagtgtgtggcgacgtggccagcgggtttcactatggagtgcatgcttgcgaaggatgcaaaggtttcttcagaaggtcaattcagcagaatatacaatacaagaaatgtcttaaaaatgaaaactgtagtatcatgagaatgaacagaaaccggtgccagcagtgtcgcttcaagaagtgtcttagtgtcggcatgagtcgagacgcggtccgattcggaagaattcccaaacgcgaaaaacaacgcatgctgattgagatgcagagcgcgatgaagacaatgatgaattcacaattttccgggcatctgcagaacgacaccctagtggagcaccatgagcaaacggcccttccagcccaggagcagcttcgacctaagcctcaactggagcaagagaatattaaatcctctagtcccccctctagcgatttcgccaaggaagaggtgattgggatggtgacccgcgcgcacaaggacacattcatgtataaccaggagcagcaagagaattcagccgagagtatgcagcctcagcgaggagaacggatccccaagaacatggaacaatataatctcaatcatgaccactgcgggaatggacttagttcacacttcccctgctctgaatcgcagcagcatttaaacggccagtttaaaggccgcaacattatgcactaccccaacggtcatgctatctgcatcgccaatgggcattgcatgaacttctcaaatgcctacacccagcgcgtgtgtgatcgcgtgcctattgacggattttcccaaaatgaaaacaagaacagttacctgtgtaacaccggggggcgaatgcacctggtgtgtcccttgtccaagtccccctacgtggaccctcataagtcaggacatgagatctgggaggagttttctatgtccttcaccccggcagtcaaggaagttgtcgagtttgccaaacgcatccccggcttccgggatctgtcacagcatgatcaggtgaaccttctcaaagctggaaccttcgaggtcctgatggttcgttttgccagcctgtttgacgccaaagaaagaaccgtcacatttctgtcagggaaaaagtattcagtggacgatttgcattcaatgggtgctggtgatctcctaaactcaatgtttgaattctcggagaagcttaatgccctgcagctcagcgacgaagaaatgtctctgtttactgcagttgtactggtcagcgccgacaggtctgggattgagaacgtgaactcggttgaggccctccaagagactctaataagggcactgagaactctaatcatgaagaatcaccccaatgaggccagtatctttactaaactgcttctgaagttgcctgaccttagatcgctgaacaatatgcatagcgaggagctgctcgcctttaaggtgcacccgtag

SEQ ID NO: 153043 - DNA, 1740 bp, Artificial Sequence
  derived and/or modified sequence
atggaggttaacgctggaggtgtgattgcctacatctcctccagctcatccgccagcagtccggcttcatgccatagtgaggggagtgagaattcctttcagagcagctcctcatccgtgcccagcagtccaaactcctcgaattccgacactaacggcaatccaaaaaacggggacttggctaacatcgagggaatactcaagaatgacaggatcgattgttccatgaagacgtcgaagagcagcgctcccggtatgactaagtcccactctggagtgacaaagttttctggtatggtgctcctgtgcaaggtgtgcggcgatgttgcttccgggtttcattatggggtgcacgcttgtgagggatgcaaaggcttcttccgacggagtattcagcagaacatccagtataagaaatgtctgaaaaacgagaactgtagtatcatgagaatgaatcggaatcggtgccaacaatgtcgttttaaaaagtgcttgagtgtcggcatgagtcgagatgccgtgcggttcgggagaataccaaaaagggagaagcagaggatgttaatcgaaatgcaaagcgccatgaaaacaatgatgaattcacagttctctggacacctgcagaatgacaccttagtggaacatcacgaacagacggctttaccggctcaggaacagctgaggccaaagcctcaactggaacaggaaaatatcaaatccagctcccctccgtcttccgactttgcaaaagaagaagttatcgggatggtgacccgcgctcacaaggatacctttatgtataatcaggagcaacaggaaaactccgccgaatcgatgcaaccgcagaggggggagcgaattccaaaaaatatggaacagtacaacctgaaccacgatcattgcggaaacggtctctcgtcccactttccttgttctgagtcacagcagcacttaaacggccagttcaaaggaagaaatattatgcactatccgaatggccacgccatttgtattgccaatggccactgcatgaacttctccaatgcttatacacaaagagtttgcgatcgggtgccaattgatggattctcacaaaatgagaacaaaaactcgtatctctgcaacactggaggaagaatgcacctggtctgccccctctccaaatccccttacgtggaccctcacaagtcgggccacgagatctgggaagagttctcgatgagttttacgcctgccgtgaaggaggtggtcgagtttgcgaagcgcataccagggtttcgcgacctaagtcagcacgatcaagtgaatcttcttaaagctggtaccttcgaagtgctcatggtgcgtttcgcttcactcttcgatgccaaggaacgtaccgttaccttcctgtccgggaaaaaatacagcgtggacgatctgcactctatgggggcaggagacctgctcaatagtatgttcgaattttcggagaaactcaatgctttacaactcagtgatgaagagatgtctctattcacagcagtggtgctggtttcagccgaccgaagtgggatcgagaatgtcaattccgtcgaggccctacaagagaccctcatccgggctctgcggactctgataatgaaaaaccacccaaacgaggctagcatttttacaaaactgttgctgaaactccccgatctccggagtttgaataacatgcattcagaagagttgttggccttcaaggtgcatccgtag

SEQ ID NO: 153044 - DNA, 1740 bp, Artificial Sequence
  derived and/or modified sequence
atggaagtgaatgccggaggggtaatcgcctacatcagtagttcctctagcgccagctcaccagcatcttgccatagcgaggggtccgagaacagttttcagtctagtagctcctctgtcccatcatccccaaatagcagcaacagtgatactaacggcaacccaaaaaacggtgatctggcgaacattgagggcatcctgaagaacgaccgcatcgattgctctatgaaaacatccaaatcatctgctcccggaatgaccaagtcacacagcggggtgaccaagttcagcggcatggtcctgctgtgcaaagtttgtggagacgtcgcgagtgggtttcactatggggttcacgcctgcgaggggtgcaagggtttcttcagaaggagtatccaacagaatattcagtataaaaaatgcttgaagaatgagaattgtagcatcatgagaatgaaccggaatagatgccagcaatgtaggtttaaaaaatgcctttcggtgggcatgtccagggatgctgtgcggttcgggagaattcccaagagggaaaagcagcggatgctcatcgagatgcagagcgccatgaaaacgatgatgaactcgcaattcagtggtcatctgcagaatgacacgcttgtggagcaccacgaacagactgccctgcccgctcaagagcagctgcgcccaaagcctcagcttgagcaggaaaatatcaaatctagctcgccgcctagctcggacttcgctaaggaagaagtgattggaatggttacacgcgctcacaaagacacattcatgtataaccaggaacaacaggaaaactccgctgagtctatgcaacctcaaagaggagaacgtatcccaaaaaatatggagcagtacaatctgaatcacgaccattgcgggaatggactgtcatcccacttcccgtgctccgagagtcagcagcacctcaacgggcaatttaaagggagaaacatcatgcactacccaaacgggcatgcaatttgtattgcgaatggccactgtatgaacttctccaatgcatacacccagcgcgtttgcgatagggtcccgatcgacggatttagccagaacgaaaacaagaattcgtatctgtgtaacaccggtggcagaatgcatttggtgtgccccctcagcaagtccccatatgtcgatccgcacaaatcaggacacgagatatgggaagaattctccatgagcttcacccccgcagtgaaagaggtcgtggaatttgctaaacgcatcccaggttttcgtgacctgtcccaacatgatcaagtgaatcttctgaaggctgggacttttgaagtgctgatggtgaggtttgcttctctgtttgacgcaaaggagcgcacggttacctttctgagtggcaagaaatactccgtcgacgacctccactccatgggcgctggggacctcctgaattccatgttcgagttttcagaaaaactgaatgcgcttcagcttagtgatgaggagatgtcactgttcactgccgtggtgctggttagcgccgacaggtctgggattgaaaatgtgaactcagttgaagcacttcaggaaacattaatccgtgcccttcgcaccttgataatgaaaaaccatccgaatgaagcatccattttcactaagttgttattgaagttgcccgatcttcggtcccttaataatatgcactctgaggaactcctagcctttaaggtccatccctag

SEQ ID NO: 153045 - DNA, 1740 bp, Artificial Sequence
  derived and/or modified sequence
atggaggtgaacgccggcggcgtgatcgcctacatcagcagcagcagcagcgccagcagccccgccagctgccacagcgagggcagcgagaacagcttccagagcagcagcagcagcgtgcccagcagccccaacagcagcaacagcgacaccaacggcaaccccaagaacggcgacctggccaacatcgagggcatcctgaagaacgacagaatcgactgcagcatgaagaccagcaagagcagcgcccccggcatgaccaagagccacagcggcgtgaccaagttcagcggcatggtgctgctgtgcaaggtgtgcggcgacgtggccagcggcttccactacggcgtgcacgcctgcgagggctgcaagggcttcttcagaagaagcatccagcagaacatccagtacaagaagtgcctgaagaacgagaactgcagcatcatgagaatgaacagaaacagatgccagcagtgcagattcaagaagtgcctgagcgtgggcatgagcagagacgccgtgagattcggcagaatccccaagagagagaagcagagaatgctgatcgagatgcagagcgccatgaagaccatgatgaacagccagttcagcggccacctgcagaacgacaccctggtggagcaccacgagcagaccgccctgcccgcccaggagcagctgagacccaagccccagctggagcaggagaacatcaagagcagcagcccccccagcagcgacttcgccaaggaggaggtgatcggcatggtgaccagagcccacaaggacaccttcatgtacaaccaggagcagcaggagaacagcgccgagagcatgcagccccagagaggcgagagaatccccaagaacatggagcagtacaacctgaaccacgaccactgcggcaacggcctgagcagccacttcccctgcagcgagagccagcagcacctgaacggccagttcaagggcagaaacatcatgcactaccccaacggccacgccatctgcatcgccaacggccactgcatgaacttcagcaacgcctacacccagagagtgtgcgacagagtgcccatcgacggcttcagccagaacgagaacaagaacagctacctgtgcaacaccggcggcagaatgcacctggtgtgccccctgagcaagagcccctacgtggacccccacaagagcggccacgagatctgggaggagttcagcatgagcttcacccccgccgtgaaggaggtggtggagttcgccaagagaatccccggcttcagagacctgagccagcacgaccaggtgaacctgctgaaggccggcaccttcgaggtgctgatggtgagattcgccagcctgttcgacgccaaggagagaaccgtgaccttcctgagcggcaagaagtacagcgtggacgacctgcacagcatgggcgccggcgacctgctgaacagcatgttcgagttcagcgagaagctgaacgccctgcagctgagcgacgaggagatgagcctgttcaccgccgtggtgctggtgagcgccgacagaagcggcatcgagaacgtgaacagcgtggaggccctgcaggagaccctgatcagagccctgagaaccctgatcatgaagaaccaccccaacgaggccagcatcttcaccaagctgctgctgaagctgcccgacctgagaagcctgaacaacatgcacagcgaggagctgctggccttcaaggtgcacccctag

SEQ ID NO: 153046 - protein, 149 aa, Artificial Sequence
  derived and/or modified sequence
MMTKHKKCFIIVGVLITTNIITLIVKLTRDSQSLCPYDWIGFQNKCYYFSKEEGDWNSSKYNCSTQHADLTIIDNIEEMNFLRRYKCSSDHWIGLKMAKNRTGQWVDGATFTKSFGMRGSEGCAYLSDDGAATARCYTERKWICRKRIH

SEQ ID NO: 153047 - DNA, 450 bp, Artificial Sequence
  derived and/or modified sequence
atgatgactaagcataaaaagtgctttattattgtcggggtactgattaccacaaacatcatcaccttgattgtgaaactgacccgtgattcacaatcactatgtccttacgattggatcggctttcagaataaatgttattacttttccaaagaagaaggagattggaattcatccaaatataactgttccactcaacacgccgatctgacaataatcgataatatcgaagagatgaatttcctcagacggtacaagtgctcaagcgaccattggatcggtctcaagatggcaaagaatcgaaccggacagtgggttgacggggccacttttacaaagagtttcgggatgcgcggatccgaaggctgcgcttacctgtccgatgacggcgctgctacagcgcgctgctatacagaaaggaaatggatctgccggaagcgcatacattag

SEQ ID NO: 153048 - DNA, 450 bp, Artificial Sequence
  derived and/or modified sequence
atgatgaccaagcacaagaagtgcttcatcatcgtgggcgtgctgatcaccaccaacatcatcaccctcatcgtgaagctgacccgggacagccagagcctgtgcccctatgactggattggcttccagaacaagtgctactacttcagcaaggaggagggggactggaacagcagcaagtacaactgcagcacccagcacgccgacctgaccatcatcgacaacatcgaggagatgaacttcctgcggcgctacaagtgcagcagtgaccactggattggcctgaagatggccaagaacagaacaggccagtgggtggatggagccaccttcaccaagagctttggcatgaggggcagcgagggctgtgcctacctgagtgatgatggagctgccacagcccgctgctacacagagaggaagtggatctgcaggaagaggatccactag

SEQ ID NO: 153049 - DNA, 450 bp, Artificial Sequence
  derived and/or modified sequence
atgatgaccaagcacaagaagtgcttcatcatcgtgggcgtgctgatcactaccaatataataacgctaatcgtcaagctgacaagagattcccaatctctgtgcccctatgactggattggattccagaacaagtgttactacttttcgaaggaagaaggcgattggaactctagcaagtataattgctcaactcagcacgccgatctgacgatcattgacaatatcgaggagatgaacttcctccgtcgctacaagtgttcctcagaccattggattggactgaagatggcgaagaaccggactgggcagtgggtggacggtgctacattcaccaagagtttcgggatgcgcgggtctgaaggctgtgcctacctatccgacgacggggccgctactgccaggtgctacaccgagaggaagtggatctgccgtaaacggatacattag

SEQ ID NO: 153050 - DNA, 450 bp, Artificial Sequence
  derived and/or modified sequence
atgatgaccaaacacaagaagtgtttcatcattgtcggcgtgttgattaccactaatataattactctcatcgtgaaactgacacgggacagccagagcctgtgcccctacgactggatcggattccagaacaaatgttactatttctccaaggaagaaggagattggaactctagtaagtacaattgctccacacagcacgctgatcttactattatcgacaatatagaggagatgaacttcttgcgcagatacaaatgtagttctgaccactggattggcctgaagatggccaaaaatcggacgggtcagtgggtcgacggtgcaacttttactaaatcctttggtatgcgcggtagcgaaggatgcgcctatctctccgatgatggagctgcaacagcccgatgttacacagaaagaaagtggatctgcagaaagcgaattcactag

SEQ ID NO: 153051 - DNA, 1700 bp, Artificial Sequence
  derived and/or modified sequence
ttttcctcttcaagtttctctctcagaacaaatgcagtgttaatcccgaagccgcttgcgggacactggcttcttctcctcagtttcctccctaatatatttgttgaggggtaatacaaaatcactgggaaactgattagagcagatttgaagacaaaattgtggcctggtaacttagcaaaagcataatggtgtcatcttgtatgctgatgataacgttctgggcactttgttactttcgttttcttttttccctctgtgtgtctttgtgtgtgtttgtgtgtgtgctcacacccacacgtgtgactttgcacgcatttgtctttgagagagagataatagtttttgtttttctttcagtagccaaagtttaaaccattgctttttctttgattctatcgcttttaaggtgatctttcttaacacaggataagaaagcagtaatgtcctaaagaatgctgttgaattaattagtatcagcctctcctacagttctggaaggatacgtggttaagtaccactcctggatgaatcagaaaaacagccacttgagcaatttcgtgttctgtggttcagatgagaatcccagttgagaaagtaagaaaatatgtgtttattcttcagctttaaattgttatatcacaaacttccttcctccttggcaagctttcttttttgacgagaagaaaattgtaataaacaacagtatgactaatagatagtcacatggttacttccagtttgcaaaatgctatttatactttgagttactcttcaaaagtggtatacctctagtttggagctgtgctgtaaaaacaagagtaacatttttatattaaagttaaataaagttacaactttgaagagagtttctgcaagacatgacacaaagctgctagcagaaaatcaaaacgctgattaaaagaagcacggtatgatgaccaaacataaaaagtgttttataattgttggtgttttaataacaactaatattattactctgatagttaaactaactcgagattctcagagtttatgcccctatgattggattggtttccaaaacaaatgctattatttctctaaagaagaaggagattggaattcaagtaaatacaactgttccactcaacatgccgacctaactataattgacaacatagaagaaatgaattttcttaggcggtataaatgcagttctgatcactggattggactgaagatggcaaaaaatcgaacaggacaatgggtagatggagctacatttaccaaatcgtttggcatgagagggagtgaaggatgtgcctacctcagcgatgatggtgcagcaacagctagatgttacaccgaaagaaaatggatttgcaggaaaagaatacactaagttaatgtctaagataatggggaaaatagaaaataacattattaagtgtaaaaccagcaaagtacttttttaattaaacaaagttcgagttttgtacctgtctggttaattctgcttacgtgtcaggctacacataaaagccacttcaaagattggcaaaaaatggttacaggtattctgctgagtttttttctttctttctttctctctctctctttctttctttctttctttctttctttttttaactgtaaaccagaaaacaattgtggggatcaaggacagacatagcacttagacaggactttcatgaccc

SEQ ID NO: 153052 - DNA, 450 bp, Artificial Sequence
  derived and/or modified sequence
atgatgaccaagcacaagaagtgcttcatcatcgtgggcgtgctgatcaccaccaacatcatcaccctgatcgtgaagctgaccagagacagccagagcctgtgcccctacgactggatcggcttccagaacaagtgctactacttcagcaaggaggagggcgactggaacagcagcaagtacaactgcagcacccagcacgccgacctgaccatcatcgacaacatcgaggagatgaacttcctgagaagatacaagtgcagcagcgaccactggatcggcctgaagatggccaagaacagaaccggccagtgggtggacggcgccaccttcaccaagagcttcggcatgagaggcagcgagggctgcgcctacctgagcgacgacggcgccgccaccgccagatgctacaccgagagaaagtggatctgcagaaagagaatccactag

SEQ ID NO: 153053 - protein, 234 aa, Artificial Sequence [sequence omitted]

SEQ ID NO: 153054 - DNA, 705 bp, Artificial Sequence
  derived and/or modified sequence
atgaagatctgcagcctgaccctgctgagcttcctgctgctggccgcccaggtgctgctggtggagggcaagaagaaggtgaagaacggcctgcacagcaaggtggtgagcgagcagaaggacaccctgggcaacacccagatcaagcagaagagcagacccggcaacaagggcaagttcgtgaccaaggaccaggccaactgcagatgggccgccaccgagcaggaggagggcatcagcctgaaggtggagtgcacccagctggaccacgagttcagctgcgtgttcgccggcaaccccaccagctgcctgaagctgaaggacgagagagtgtactggaagcaggtggccagaaacctgagaagccagaaggacatctgcagatacagcaagaccgccgtgaagaccagagtgtgcagaaaggacttccccgagagcagcctgaagctggtgagcagcaccctgttcggcaacaccaagcccagaaaggagaagaccgagatgagccccagagagcacatcaagggcaaggagaccacccccagcagcctggccgtgacccagaccatggccaccaaggcccccgagtgcgtggaggaccccgacatggccaaccagagaaagaccgccctggagttctgcggcgagacctggagcagcctgtgcaccttcttcctgagcatcgtgcaggacaccagctgctag

SEQ ID NO: 153055 - DNA, 705 bp, Artificial Sequence
  derived and/or modified sequence
atgaaaatctgctcactcaccttgctgagcttcttgctgctggctgcccaggtgctcctggtcgaaggaaagaagaaggttaagaacggcttacatagtaaggtggtttcagaacagaaggataccttgggcaacacccagatcaagcagaaatctcggcccgggaataagggaaagttcgtcacaaaggatcaggccaattgtcgctgggctgcaacagagcaagaggagggcatctctctaaaggtagaatgtactcaactggatcacgagttctcatgcgtctttgccggtaaccccacctcctgcctaaaactgaaggatgagcgggtctactggaaacaggtggcacggaacctgcggagccaaaaggacatatgccggtatagcaaaacggctgtcaagacacgtgtttgccgcaaggatttcccagaatcatccctgaaactcgtctcctcaactctttttgggaacaccaaaccaaggaaagagaaaaccgaaatgtcacctagggaacacatcaaaggcaaggagaccactccgagtagcctggcggtcacacagactatggccactaaggctcccgaatgtgtggaagacccggatatggcaaatcagagaaaaacagctctggaattttgcggcgagacctggtcgtccctgtgtacattcttcctgtcgattgtacaagacacatcttgctag

SEQ ID NO: 153056 - DNA, 705 bp, Artificial Sequence
  derived and/or modified sequence
atgaaaatctgctccctcacccttctctcattccttctgctcgccgctcaggtgctattggtggaaggaaaaaagaaggtgaagaatgggttgcactcaaaagtagtgtcagagcaaaaagacacgctgggaaacacacagattaagcagaagtcgagacctggtaataagggcaaattcgttactaaggatcaagccaactgtcggtgggctgcaacggaacaggaagagggaatcagcttaaaagtggaatgcacgcagttggatcacgagttcagttgtgtcttcgccggaaatcccacttcatgcctgaaactgaaagacgagagagtgtactggaaacaggtcgccaggaatctgcggtctcagaaggatatatgtagatatagtaagacagcagtgaaaactagagtctgcagaaaagatttccctgagtcgtccctgaaacttgtgagcagtacgcttttcggtaacactaagcccagaaaagagaagaccgaaatgtccccacgggaacacattaagggcaaggagactaccccaagttctttggcggtgacacaaaccatggcaacgaaagcccccgagtgcgtagaggatcctgacatggcaaaccagcgtaagacagcactggaattctgcggagaaacctggagtagcttatgtactttctttctgtccatcgtacaagatactagctgctag

SEQ ID NO: 153057 - DNA, 1179 bp, Artificial Sequence
  derived and/or modified sequence
gaatagtctaccccccttgcactctacctgacacagctgcagcctgcaattcactcgcactgcctgggattgcactggatccgtgtgctcagaacaaggtgaacgcccagctgcagccatgaagatctgtagcctcaccctgctctccttcctcctactggctgctcaggtgctcctggtggaggggaaaaaaaaagtgaagaatggacttcacagcaaagtggtctcagaacaaaaggacactctgggcaacacccagattaagcagaaaagcaggcccgggaacaaaggcaagtttgtcaccaaagaccaagccaactgcagatgggctgctactgagcaggaggagggcatctctctcaaggttgagtgcactcaattggaccatgaattttcctgtgtctttgctggcaatccaacctcatgcctaaagctcaaggatgagagagtctattggaaacaagttgcccggaatctgcgctcacagaaagacatctgtagatattccaagacagctgtgaaaaccagagtgtgcagaaaggattttccagaatccagtcttaagctagtcagctccactctatttgggaacacaaagcccaggaaggagaaaacagagatgtcccccagggagcacatcaaaggcaaagagaccaccccctctagcctagcagtgacccagaccatggccaccaaagctcccgagtgtgtggaggacccagatatggcaaaccagaggaagactgccctggagttctgtggagagacttggagctctctctgcacattcttcctcagcatagtgcaggacacgtcatgctaatgaggtcaaaagagaacgggttcccttaagagatgtcatgtcgtaagtccctctgtatactttaaagctctctacagtccccccaaaatatgaacttttgtgcttagtgagtgcaacgaaatatttaaacaagttttgtattttttgcttttgtgttttggaatttgccttatttttcttggatgcgatgttcagaggctgtttcctgcagcatgtatttccatggcccacacagctatgtgtttgagcagcgaagagtctttgagctgaatgagccagagtgataatttcagtgcaacgaactttctgctgaattaatggtaataaaactctgggtgtttttcagaaatacattc

SEQ ID NO: 153058 - DNA, 1359 bp, Artificial Sequence
  derived and/or modified sequence
gaatcattgcactccctactagagcggatgtgatgagggaaaaggagaactcagcactttccctgcaggaaccggctccctcggaggggcgtggctgggaggagctgtgagtaacgtgccacagtgttgtaaaaacccagtgagtgttataaaaacccagtcagcctggctcctgttgaatagtctaccccccttgcactctacctgacacagctgcagcctgcaattcactcgcactgcctgggattgcactggatccgtgtgctcagaacaaggtgaacgcccagctgcagccatgaagatctgtagcctcaccctgctctccttcctcctactggctgctcaggtgctcctggtggaggggaaaaaaaaagtgaagaatggacttcacagcaaagtggtctcagaacaaaaggacactctgggcaacacccagattaagcagaaaagcaggcccgggaacaaaggcaagtttgtcaccaaagaccaagccaactgcagatgggctgctactgagcaggaggagggcatctctctcaaggttgagtgcactcaattggaccatgaattttcctgtgtctttgctggcaatccaacctcatgcctaaagctcaaggatgagagagtctattggaaacaagttgcccggaatctgcgctcacagaaagacatctgtagatattccaagacagctgtgaaaaccagagtgtgcagaaaggattttccagaatccagtcttaagctagtcagctccactctatttgggaacacaaagcccaggaaggagaaaacagagatgtcccccagggagcacatcaaaggcaaagagaccaccccctctagcctagcagtgacccagaccatggccaccaaagctcccgagtgtgtggaggacccagatatggcaaaccagaggaagactgccctggagttctgtggagagacttggagctctctctgcacattcttcctcagcatagtgcaggacacgtcatgctaatgaggtcaaaagagaacgggttcccttaagagatgtcatgtcgtaagtccctctgtatactttaaagctctctacagtccccccaaaatatgaacttttgtgcttagtgagtgcaacgaaatatttaaacaagttttgtattttttgcttttgtgttttggaatttgccttatttttcttggatgcgatgttcagaggctgtttcctgcagcatgtatttccatggcccacacagctatgtgtttgagcagcgaagagtctttgagctgaatgagccagagtgataatttcagtgcaacgaactttctgctgaattaatggtaataaaactctgggtgtttttcagaaatacattcaaa

SEQ ID NO: 153059 - DNA, 705 bp, Artificial Sequence
  derived and/or modified sequence
atgaagatctgcagcctgaccctgctgtccttcctgctgctggccgcccaggtgctgctggtggagggcaagaagaaggtgaagaatggcctgcacagcaaggtggtgtctgagcagaaggacaccctgggcaacacccagatcaagcagaagagccggcccggcaacaagggcaagtttgtgaccaaggaccaggccaactgccgctgggccgccacagagcaggaggagggcatcagcctgaaggtggagtgcacccagctggaccacgagttcagctgtgtgtttgctggcaaccccaccagctgcctgaagctgaaggatgagcgggtgtactggaagcaggtggccaggaacctgcggagccagaaggacatctgccgctacagcaagacagctgtgaagaccagggtgtgcaggaaggacttccctgagagcagcctgaagctggtgagcagcaccctgtttggaaacaccaagcccaggaaggagaagacagagatgagcccccgggagcacatcaagggcaaggagaccacccccagcagcctggccgtgacccagaccatggccaccaaggccccagaatgtgtggaggaccctgacatggccaaccagaggaagacagccctggagttctgtggggagacctggagcagcctgtgcaccttcttcctgagcatcgtgcaggacaccagctgctag

SEQ ID NO: 153060 - DNA, 705 bp, Artificial Sequence
  derived and/or modified sequence
atgaagatctgcagcctgaccctgctgagcttcctgctgctggccgcccaagtgttactggtggaaggtaaaaagaaggtgaaaaacggtcttcactcgaaggtggtgagcgagcaaaaggacaccttggggaatacccagattaaacagaaatcccggccaggaaataagggtaaattcgtgaccaaggaccaggccaattgcagatgggcagctaccgagcaagaggaagggatttccctgaaggtggaatgcacccagcttgaccacgagttttcatgcgtgtttgctggtaaccccacctcatgcctcaaactcaaggacgaacgcgtctactggaaacaggtcgctcgcaacctgagatcccagaaggatatctgtcgctatagcaaaacagccgtgaaaactagagtgtgccgcaaggatttccccgaatctagcctgaaactagtgtcgtcaacgttgtttggcaataccaaaccaagaaaggagaaaacggaaatgtctccacgggagcatatcaaggggaaggagaccaccccatcttcattggcggttactcagaccatggccaccaaagctcccgaatgcgtcgaggaccccgatatggcaaaccagcggaagaccgctctcgaattctgcggcgagacttggagtagtctgtgtacatttttcctctcaatcgtgcaggatacaagctgctag

SEQ ID NO: 153061 - DNA, 705 bp, Artificial Sequence
  derived and/or modified sequence
atgaagatctgcagcctgaccctgctgagcttcctgctgctggccgcccaggtgctgctggtggagggaaagaagaaggtcaaaaatgggctgcacagcaaggtcgtctcggagcagaaagacacactcggcaatacgcagattaagcaaaagtcccgaccaggtaacaagggaaagtttgtaacgaaggaccaagcaaattgccggtgggccgctacagagcaggaggaagggatctcccttaaggtggaatgtacccagctggatcacgagttttcatgtgtcttcgccggcaacccaacctcatgtctaaagttgaaggacgagcgcgtttactggaagcaggtggcgaggaacctgcgatctcaaaaggacatatgcaggtactcgaaaaccgccgtgaaaacaagagtgtgcagaaaagactttcctgagagctctctgaaacttgtgtccagtaccctcttcgggaacactaagccccgaaaggaaaagacagaaatgagtccccgcgagcacattaagggtaaggagaccactccaagctctctcgccgtgactcagacaatggccactaaagcgccagagtgcgtggaagatccagatatggcaaaccagaggaaaaccgcgttagaattctgtggtgaaacctggagctccttgtgcacattctttttatcaatcgtgcaggataccagttgttag

SEQ ID NO: 153062 - DNA, 705 bp, Artificial Sequence
  derived and/or modified sequence
atgaagatctgtagcttaacgctgctttccttccttctactggcggcacaggtgctgctggtggagggtaagaaaaaggtcaaaaatgggctgcacagcaaggtagtaagcgaacagaaggacactctgggcaatacccagataaaacaaaagagtcggcctggaaataagggaaaattcgtgacaaaagaccaagccaattgtcgatgggctgccacagagcaggaagaaggaatctcactaaaagttgagtgtactcaacttgatcacgagttttcctgcgtgttcgctggcaatccgacctcttgcttgaagctgaaagacgagcgggtctattggaaacaggtcgccagaaatctccgctctcagaaggacatctgtcggtattcaaagacggcggtgaaaaccagagtatgccggaaagacttcccagaatcctcactgaagctggtgtccagcactctgtttggtaacacaaagccacggaaagaaaaaaccgagatgagccctagagagcacattaaaggaaaggaaacaacaccaagcagcctggccgtaacacagaccatggcaaccaaggcccctgaatgcgtggaagatccagacatggccaaccagaggaagacagccctggaattctgtggcgagacttggagctcactttgtaccttcttcttgagcattgtccaagatacatcttgctag

SEQ ID NO: 153063 - DNA, 705 bp, Artificial Sequence
  derived and/or modified sequence
atgaagatttgttccttaacactgctaagtttcctcctcttagcggcacaagtgttattagtggagggcaagaaaaaggtcaaaaatggtctgcattccaaagtggtttctgaacagaaggacacactggggaatactcagattaaacaaaaaagtcgccctgggaacaaaggaaaatttgtgaccaaagaccaggcaaattgccgctgggcagctactgaacaggaggagggcataagccttaaagttgagtgtacccagctcgaccacgagttctcttgcgtgttcgctggcaaccctacatcctgtctcaaacttaaagatgagcgggtttactggaaacaggtcgccaggaacctccgcagccaaaaagacatctgccgatattcaaaaaccgcagtaaagacgagagtttgtcggaaggatttccccgaaagctccttgaaattggtgtcttctacattgtttgggaacaccaaaccccgaaaggaaaagactgaaatgagccctagggaacacataaagggcaaggaaactacaccatcatctctggcggtcactcagactatggccactaaagccccagaatgcgtggaggaccctgatatggcaaatcagcggaaaacagcattagaattctgcggcgaaacatggtcatccctctgtacatttttcctctctattgtacaggacacatcatgctag

SEQ ID NO: 153064 - protein, 657 aa, Artificial Sequence
  derived and/or modified sequence
MSPTPPLFSLPEARTRFTKSTREALNNKNIKPLLSTFSQVPGSENEKKCTLDQAFRGILEEEIINHSSCENVLAIISLAIGGVTEGICTASTPFVLLGDVLDCLPLDQCDTIFTFVEKNVATWKSNTFYSAGKNYLLRMCNDLLRRLSKSQNTVFCGRIQLFLARLFPLSEKSGLNLQSQFNLENVTVFNTNEQESTLGQKHTEDREEGMDVEEGEMGDEEAPTTCSIPIDYNLYRKFWSLQDYFRNPVQCYEKISWKTFLKYSEEVLAVFKSYKLDDTQASRKKMEELKTGGEHVYFAKFLTSEKLMDLQLSDSNFRRHILLQYLILFQYLKGQVKFKSSNYVLTDEQSLWIEDTTKSVYQLLSENPPDGERFSKMVEHILNTEENWNSWKNEGCPSFVKERTSDTKPTRIIRKRTAPEDFLGKGPTKKILMGNEELTRLWNLCPDNMEACKSETREHMPTLEEFFEEAIEQADPENMVENEYKAVNNSNYGWRALRLLARRSPHFFQPTNQQFKSLPEYLENMVIKLAKELPPPSEEIKTGEDEDEEDNDALLKENESPDVRRDKPVTGEQIEVFANKLGEQWKILAPYLEMKDSEIRQIECDSEDMKMRAKQLLVAWQDQEGVHATPENLINALNKSGLSDLAESLTNDNETNS

SEQ ID NO: 153065 - DNA, 1974 bp, Artificial Sequence
  derived and/or modified sequence
atgagccccaccccccccctgttcagcctgcccgaggccagaaccagattcaccaagagcaccagagaggccctgaacaacaagaacatcaagcccctgctgagcaccttcagccaggtgcccggcagcgagaacgagaagaagtgcaccctggaccaggccttcagaggcatcctggaggaggagatcatcaaccacagcagctgcgagaacgtgctggccatcatcagcctggccatcggcggcgtgaccgagggcatctgcaccgccagcacccccttcgtgctgctgggcgacgtgctggactgcctgcccctggaccagtgcgacaccatcttcaccttcgtggagaagaacgtggccacctggaagagcaacaccttctacagcgccggcaagaactacctgctgagaatgtgcaacgacctgctgagaagactgagcaagagccagaacaccgtgttctgcggcagaatccagctgttcctggccagactgttccccctgagcgagaagagcggcctgaacctgcagagccagttcaacctggagaacgtgaccgtgttcaacaccaacgagcaggagagcaccctgggccagaagcacaccgaggacagagaggagggcatggacgtggaggagggcgagatgggcgacgaggaggcccccaccacctgcagcatccccatcgactacaacctgtacagaaagttctggagcctgcaggactacttcagaaaccccgtgcagtgctacgagaagatcagctggaagaccttcctgaagtacagcgaggaggtgctggccgtgttcaagagctacaagctggacgacacccaggccagcagaaagaagatggaggagctgaagaccggcggcgagcacgtgtacttcgccaagttcctgaccagcgagaagctgatggacctgcagctgagcgacagcaacttcagaagacacatcctgctgcagtacctgatcctgttccagtacctgaagggccaggtgaagttcaagagcagcaactacgtgctgaccgacgagcagagcctgtggatcgaggacaccaccaagagcgtgtaccagctgctgagcgagaacccccccgacggcgagagattcagcaagatggtggagcacatcctgaacaccgaggagaactggaacagctggaagaacgagggctgccccagcttcgtgaaggagagaaccagcgacaccaagcccaccagaatcatcagaaagagaaccgcccccgaggacttcctgggcaagggccccaccaagaagatcctgatgggcaacgaggagctgaccagactgtggaacctgtgccccgacaacatggaggcctgcaagagcgagaccagagagcacatgcccaccctggaggagttcttcgaggaggccatcgagcaggccgaccccgagaacatggtggagaacgagtacaaggccgtgaacaacagcaactacggctggagagccctgagactgctggccagaagaagcccccacttcttccagcccaccaaccagcagttcaagagcctgcccgagtacctggagaacatggtgatcaagctggccaaggagctgcccccccccagcgaggagatcaagaccggcgaggacgaggacgaggaggacaacgacgccctgctgaaggagaacgagagccccgacgtgagaagagacaagcccgtgaccggcgagcagatcgaggtgttcgccaacaagctgggcgagcagtggaagatcctggccccctacctggagatgaaggacagcgagatcagacagatcgagtgcgacagcgaggacatgaagatgagagccaagcagctgctggtggcctggcaggaccaggagggcgtgcacgccacccccgagaacctgatcaacgccctgaacaagagcggcctgagcgacctggccgagagcctgaccaacgacaacgagaccaacagctag

SEQ ID NO: 153066 - DNA, 1974 bp, Artificial Sequence
  derived and/or modified sequence
atgtcccccacgcctcccctgttctcgctccccgaggctcgaactagatttactaaaagcacgcgcgaggcactgaataataagaatatcaaaccactgctctccaccttttcccaggtcccaggtagcgaaaacgaaaagaagtgcacactggaccaagcatttcggggcatcctggaggaagagatcatcaatcacagttcttgcgaaaacgttctcgctataatttcactggccatcggtggggtcaccgagggaatctgtaccgcaagtacgccttttgtactgctgggggatgtactagactgtctgcccctggatcagtgtgacaccattttcacctttgttgagaaaaacgttgccacctggaaatctaatacattctacagcgcaggcaagaactacctgctcaggatgtgcaatgacctgctaagacgactgagtaagtcccaaaacacagtgttttgcggaagaattcagctctttctggcaaggctgttcccactaagcgagaagagcggcttgaacttgcagagtcaattcaacctggaaaacgtgaccgtgttcaatacaaacgagcaggaaagtactttgggccagaagcacactgaagatcgcgaggagggcatggatgtggaagaaggtgaaatgggtgacgaggaggctcccactacctgcagtatccccattgattacaatttatatcgcaaattctggtccttgcaggactactttcgcaatcctgtccagtgttacgagaagatttcgtggaagactttcctgaaatatagcgaagaagtgttggccgtgttcaaatcctacaaactggatgacactcaggcaagccgaaagaagatggaggaactgaagactggcggcgagcatgtctacttcgccaaatttttgacaagcgaaaagctgatggacctgcagctgtctgactcaaatttcaggcgccacattttgctgcagtatctcatcctcttccagtacttgaagggccaggtcaaatttaaaagctccaattatgtgttaacagacgagcaaagcctgtggatcgaagatacaactaagagtgtgtaccagctgcttagcgaaaacccaccagacggcgagcggttcagtaagatggtggaacatatcctgaatactgaagaaaactggaattcctggaagaatgaaggatgtccttcctttgtcaaggagaggacaagtgacactaagccgacccggatcattcggaaacgcacagcgccagaagacttccttgggaaggggcctacaaaaaaaatcctgatggggaatgaagagctgacccggctgtggaatctttgcccggataatatggaagcctgcaaatccgaaactcgcgagcacatgccgacccttgaggaattttttgaggaagccattgagcaggccgatcccgagaacatggtggagaacgaatacaaggccgtcaataactccaattacgggtggcgggccctcagactgttagctcgtcgctccccacacttctttcagcctaccaaccaacagttcaaatccttgcctgaatatcttgagaacatggtgatcaagttagcaaaggaacttcctccccccagtgaggaaatcaagacgggcgaggacgaagacgaggaagataacgatgccctgctcaaagaaaacgagtcacctgatgtccgtagagacaagcccgttaccggggaacaaatagaagtgttcgcaaataagttgggggagcagtggaaaatcctggcaccctatcttgaaatgaaggacagtgagattaggcagatcgaatgtgacagtgaagatatgaagatgcgcgccaaacagctgctcgtggcatggcaagatcaggaaggcgtgcacgcaacaccggagaacctgatcaatgctttgaacaagagcggactttccgacttggcagaatctttaactaatgacaatgaaacgaattcatag

SEQ ID NO: 153067 - DNA, 1974 bp, Artificial Sequence
  derived and/or modified sequence
atgagccccaccccacccctcttcagcctgcctgaggcccggacccgcttcaccaagagcacccgggaggccctgaacaacaagaacatcaagcccctgctgagcaccttcagccaggtgcccggctctgaaaatgagaagaagtgcaccctggaccaggccttccggggcatcctggaggaggagatcatcaaccacagcagctgtgaaaatgtgctggccatcatcagcctggccatcggcggcgtgacagagggcatctgcacagccagcaccccatttgtgctgctgggagatgtgctggactgcctgcccctggaccagtgtgacaccatcttcacctttgtggagaagaatgtggccacctggaagagcaacaccttctacagcgctgggaagaactacctgctgaggatgtgcaatgacctgctgcggcggctgagcaagagccagaacacagtgttctgtggccgcatccagctgttcctggcccggctcttccccctgtctgagaagagcggcctgaacctgcagagccagttcaacctggagaatgtgacagtgttcaacaccaatgagcaggagagcaccctgggccagaagcacacagaggaccgggaggagggcatggatgtggaggagggggagatgggagatgaggaggcccccaccacctgcagcatccccatcgactacaacctgtacaggaagttctggagcctgcaggactacttcaggaaccctgtgcagtgctatgagaagatctcctggaagaccttcctgaagtacagcgaggaggtgctggccgtgttcaagagctacaagctggatgacacccaggccagcaggaagaagatggaggagctgaagacaggaggagaacatgtgtactttgccaagttcctgaccagcgagaagctgatggacctgcagctgagtgacagcaacttccgccgccacatcctgctgcagtacctgatcctcttccagtacctgaagggccaggtgaagttcaagagcagcaactacgtgctgacagatgagcagagcctgtggattgaggacaccaccaagtctgtgtaccagctgctgtctgagaaccccccagatggagagcgcttcagcaagatggtggagcacatcctgaacacagaggagaactggaacagctggaagaatgaaggctgccccagctttgtgaaggagaggaccagtgacaccaagcccacccgcatcatcaggaagaggacagcccctgaggacttcctgggcaagggccccaccaagaagatcctgatgggaaatgaggagctgacccggctgtggaacctgtgcccagacaacatggaggcctgcaagtctgagacccgggagcacatgcccaccctggaggagttctttgaggaggccatcgagcaggccgaccctgagaacatggtggagaatgagtacaaggctgtgaacaacagcaactacggctggagggccctgcggctgctggcccggcgcagcccccacttcttccagcccaccaaccagcagttcaagagcctgcctgagtacctggagaacatggtgatcaagctggccaaggagctgcccccaccttctgaggagatcaagacaggagaagatgaagatgaagaagataatgatgccctgctgaaggaaaatgaatctccagatgtgcggcgggacaagcctgtgactggagagcagatcgaggtgtttgccaacaagctgggggagcagtggaagatcctggccccctacctggagatgaaggacagcgagatccggcagattgaatgtgacagcgaggacatgaagatgagggccaagcagctgctggtggcctggcaggaccaggagggcgtgcacgccaccccagaaaatctcatcaatgccctgaacaagagcggcctgagtgacctggccgagagcctgaccaatgacaatgagaccaacagctag

SEQ ID NO: 153068 - DNA, 1974 bp, Artificial Sequence
  derived and/or modified sequence
atgagccccaccccccccctgttcagcctgcccgaggcccggaccaggttcactaaatccacacgggaagctttaaataacaagaacattaaaccccttctatctacattctcccaggtacctgggtccgagaacgagaagaagtgcactctcgaccaggctttcaggggcatcctggaagaagaaatcatcaaccactcaagttgcgaaaatgtcttggctataatcagtctcgctatcggcggggtaacagaaggaatctgcacagctagcacgcccttcgttctacttggggatgtactggattgcctccccctggaccaatgcgacacgatcttcacctttgtcgaaaagaacgttgctacttggaaatccaacacgttctacagcgccggcaaaaactatctactacgaatgtgtaatgacctgttacgtagactgagcaaaagtcagaacacagtcttctgtggaaggatccagctgtttcttgccaggctgtttcccctgtcagagaaaagcggcttgaacctccaatctcagtttaacttggagaatgttacagttttcaatactaatgagcaggagtcaaccttagggcagaaacacacagaggatcgggaagaagggatggatgtcgaagagggagaaatgggagacgaggaagctcccaccacttgctcaataccaattgattacaatctgtaccgcaaattttggagtttacaagactacttcaggaatcccgttcagtgctatgaaaagattagttggaagacatttctgaagtattcagaggaagttctggctgtgttcaaatcctacaagcttgatgatacgcaagcctcacgaaagaagatggaggagctgaaaactggtggagagcatgtctactttgcgaagttcctcacgagcgagaaactcatggatctccaactgtcagatagcaacttccgccgtcatatcctgttgcagtatctgatcctcttccagtacctgaaggggcaagtcaagtttaaaagtagcaattatgtattaactgacgaacagagcctgtggattgaagacacaacaaagagcgtttatcagttgctgtcggaaaatcccccagacggcgagcgttttagtaaaatggtggagcacatcctgaacaccgaagagaactggaattcttggaagaatgagggctgcccctcgttcgttaaagagcgcacgtcagataccaaaccaacaaggatcatccggaagcgcactgctcctgaagacttcttaggaaaagggcccactaagaagatccttatggggaacgaagaactgacgcggctttggaacctgtgccccgataacatggaagcgtgtaaaagcgaaaccagggagcacatgcctacgttagaggaattcttcgaggaggccatcgagcaggccgaccccgagaacatggtcgaaaacgaatacaaggccgtgaacaatagcaattatggctggcgggcattacggctgctcgcccggcgctcaccgcatttttttcaacctactaatcagcagttcaagtctctgcctgagtacctcgaaaacatggtaatcaagctcgccaaggaactcccaccaccgagcgaggaaattaagaccggcgaagatgaggatgaggaggataacgatgctctgttgaaggaaaatgagagccctgatgtccggcgcgacaaaccggtgactggagagcagattgaagtgttcgccaacaagcttggtgaacaatggaagattcttgccccctaccttgagatgaaggattctgagattcggcagatcgaatgcgacagcgaggacatgaaaatgcgagccaaacagctgctcgttgcttggcaggatcaggagggcgttcatgccactcctgagaatctgatcaacgcactgaataagtctggtctttcggatcttgccgaatcccttactaacgataacgagacaaatagctag

SEQ ID NO: 153069 - DNA, 1974 bp, Artificial Sequence
  derived and/or modified sequence
atgagccccaccccaccactgttctccctccccgaggcccgaactagatttaccaagtccacccgcgaggcgttgaataacaagaacattaaacccttgcttagcaccttttcacaggtgcctggctctgagaacgaaaagaaatgtaccctggatcaggcattccggggtattcttgaagaggaaataataaaccactcaagctgcgaaaacgttctcgccatcatcagcctggctatcggcggagtgacagaggggatctgcactgcctccacaccctttgtccttttaggggacgtgctggactgcctgcccctcgaccagtgcgacactattttcacatttgttgagaaaaacgtagctacttggaaaagcaatactttttattccgcagggaagaattacctcctgaggatgtgcaacgatttactaaggcgtcttagcaagtctcagaatacagtgttttgcggtcgtatacagctctttttggctagactgtttcctcttagtgaaaaatccggcctgaaccttcagtcacagttcaatttagaaaacgtcaccgtttttaatacaaatgagcaagagtctaccctaggccagaagcatactgaggacagagaggaggggatggatgttgaagagggcgaaatgggggatgaggaggccccaacaacttgcagcatcccaatcgattataacctgtaccgcaagttctggagtttgcaggattattttagaaacccggtccagtgttacgaaaaaatctcctggaagaccttcttgaaatatagtgaagaggttctggcagtgttcaaaagttacaaactcgacgacacccaagcatcccgtaagaagatggaggaactgaaaactggaggcgagcatgtgtacttcgccaagttcctcacgtctgagaagctcatggacctgcagctgagtgattcgaattttcgcaggcatatcttactgcagtacttgatactgtttcagtatcttaagggacaagtcaaattcaagtcatcaaactatgtcctaacagacgagcagtccctgtggatcgaggatactactaagtctgtgtaccagcttctttccgagaatccgccagacggggagagattctcaaagatggttgagcacatcttgaataccgaggaaaattggaacagttggaagaacgagggatgcccctccttcgtgaaagaaaggacgtccgatactaagccgacccgcattatccgcaagcgcactgccccagaggattttctggggaaaggaccaaccaagaagatccttatggggaacgaggagttaactcgcctgtggaatctgtgcccggacaacatggaagcttgcaaatccgagacaagggaacatatgcctacattagaggaattctttgaagaggccatcgaacaggccgatcccgaaaacatggtggagaatgaatataaggccgtgaataactccaattatgggtggcgggctctgagactgctggctcggaggagtcctcatttctttcagcccacaaaccagcagttcaagtcactccctgaataccttgagaacatggttatcaaactcgcaaaagagctgccccctccatcagaggaaatcaagactggcgaagatgaagacgaggaggataacgacgccctgctgaaggaaaacgaaagtccagacgttcggagagacaaacctgttactggagagcagattgaggtattcgcaaacaagctcggagagcagtggaaaattcttgccccatacttagagatgaaggacagtgagattaggcagattgagtgtgatagcgaggatatgaaaatgagggccaagcagttgctggttgcctggcaggaccaagagggtgtgcacgctacacctgaaaacctgataaacgccctgaataaaagcggactttccgatttagcggagtcactgaccaacgacaatgaaaccaacagctag

SEQ ID NO: 153070 - DNA, 2113 bp, Artificial Sequence
  derived and/or modified sequence
aggcgccgcagcgcagtggcgggcacgcgcagccgagaagatgtctccgacgccgccgctcttcagtttgcccgaagcgcggacgcggtttacgaagtctaccagagaggccttgaacaacaaaaacatcaagccattgttaagtaccttcagccaggtacctggcagtgaaaatgaaaaaaaatgtacccttgaccaagctttcagaggtattctagaagaagaaattataaatcattcatcatgtgaaaacgttttagctattatttctcttgctattgggggagtaactgaaggtatttgtaccgcatctacaccttttgtattgttgggagatgttttggattgtcttcctttggatcagtgtgacacaatattcacttttgtggaaaaaaatgttgctacttggaaatcaaatacattctattctgctgggaaaaattacttactacgtatgtgcaatgatctcctaagaagattgtctaaatcccagaatacagtcttctgtggacggattcagctctttttggccaggcttttccctctgtctgagaaatcaggtcttaacttgcagagtcagtttaatctggaaaatgtcactgttttcaatacaaatgagcaggaaagcaccctgggtcagaagcacactgaagatagagaagaaggaatggatgtagaagaaggcgaaatgggagacgaggaagctccaacaacgtgctctattccaattgattacaacctgtatcgaaaattctggtcacttcaggattacttcaggaaccctgtgcaatgctatgagaagatttcatggaaaacttttctcaagtattctgaagaagttttagctgtttttaagagttataaattagatgatactcaggcctcaagaaaaaagatggaagaattgaaaacaggaggagaacatgtatattttgcaaaatttttaacaagtgaaaagctgatggatttacaactgagtgacagtaactttcgtcgacacatcctgttgcagtatctcattttattccaatatctcaaggggcaggtcaaattcaaaagttcaaactatgttttaactgatgagcaatcactttggattgaagatactacaaaatcagtttatcaactactatctgaaaacccccccgatggagaaagattttcaaagatggtagagcatatattaaacactgaagaaaactggaactcgtggaaaaatgaaggttgcccaagttttgtgaaagaaagaacatcagataccaaacctacgagaataattcggaagagaacagcacccgaggacttcctagggaaaggacccaccaaaaaaattctgatgggaaatgaggagttaacaaggctttggaatctttgccctgataatatggaagcctgtaaatcagagacaagggaacacatgcccactttggaggaattctttgaagaagccattgaacaggcagaccctgaaaatatggtggaaaatgaatataaggctgtgaacaattcaaattatggttggagagccctgagactattagcacggagaagccctcacttcttccagccaaccaaccagcagtttaaaagtttaccagaatatcttgaaaatatggtaataaagctagccaaggaattaccgcctccttctgaagaaataaaaacaggtgaggatgaagatgaggaagataatgatgctctactgaaggaaaatgaaagtcctgatgttcggcgagacaaacctgtaacaggagaacaaatagaggtatttgccaacaagctgggtgaacaatggaagattctggctccctacttggaaatgaaagactcagaaattaggcagattgagtgtgacagtgaagacatgaagatgagagctaagcagctcctggttgcctggcaagatcaagagggagttcatgcaacacctgagaatctgattaatgcactgaataagtctggattaagtgaccttgcagaaagtctaactaatgacaatgagacaaatagttagcttcttttttttttctttttattaaaactgtgatagattttgttaccaagcagcatttgataagaggtccactggttttggtaaacaataaacattttt

SEQ ID NO: 153071 - protein, 933 aa, Artificial Sequence
  derived and/or modified sequence
MADLSLLQEDLQEDADGSLDFVSQDEMLTPLGRLDKYAASENIFNRQMVARSLLDTLREVCDDERDCIAVLERISRLADDSEPTVRAELMEQVPHIALFCQENRPSIPYAFSKFLLPIVVRYLADQNNQVRKTSQAALLALLEQELIERFDVETKVCPVLIELTAPDSNDDVKTEAVAIMCKMAPMVGKDITERLILPRFCEMCCDCRMFHVRKVCAANFGDICSVVGQQATEEMLLPRFFQLCSDNVWGVRKACAECFMAVSCATCQEIRRTKLSALFINLISDPSRWVRQAAFQSLGPFISTFANPSSSGQYFKEESKSSEEMSVENKNRTRDQEAPEDVQVRPEDTPSDLSVSNSSVILENTMEDHAAEASGKPLGEISVPLDSSLLCTLSSESHQEAASNENDKKPGNYKSMLRPEVGTTSQDSALLDQELYNSFHFWRTPLPEIDLDIELEQNSGGKPSPEGPEEESEGPVPSSPNITMATRKELEEMIENLEPHIDDPDVKAQVEVLSAALRASSLDAHEETISIEKRSDLQDELDINELPNCKINQEDSVPLISDAVENMDSTLHYIHSDSDLSNNSSFSPDEERRTKVQDVVPQALLDQYLSMTDPSRAQTVDTEIAKHCAYSLPGVALTLGRQNWHCLRETYETLASDMQWKVRRTLAFSIHELAVILGDQLTAADLVPIFNGFLKDLDEVRIGVLKHLHDFLKLLHIDKRREYLYQLQEFLVTDNSRNWRFRAELAEQLILLLELYSPRDVYDYLRPIALNLCADKVSSVRWISYKLVSEMVKKLHAATPPTFGVDLINELVENFGRCPKWSGRQAFVFVCQTVIEDDCLPMDQFAVHLMPHLLTLANDRVPNVRVLLAKTLRQTLLEKDYFLASASCHQEAVEQTIMALQMDRDSDVKYFASIHPASTKISEDAMSTASSTY

SEQ ID NO: 153072 - DNA, 2802 bp, Artificial Sequence
  derived and/or modified sequence
atggctgatctgtctctgctccaggaggacttacaggaagacgctgacggctcactcgactttgtctcacaggatgaaatgctcacccccctcgggagactggataaatacgctgcgtccgagaatattttcaatagacagatggtagcccgatccctgttggatacacttagagaggtgtgcgacgatgagagagactgcattgccgtactcgaacgcatttctagattagctgacgattccgaacctacagtgagggctgagctgatggaacaagtgccacacatcgctttattttgccaggaaaatagaccaagtatcccctatgccttcagcaaatttcttctcccgatcgtggttagatatctggccgatcagaacaatcaggtgagaaagacaagtcaggcagcattgttggccttgctggaacaggagctaattgaacgattcgacgtggagaccaaggtgtgccctgtgctcatcgagctaacagctccagatagtaacgacgacgtgaagacagaagcagtggccataatgtgcaagatggcccctatggtgggcaaagatataactgagagactaattcttccccgcttctgtgaaatgtgttgtgattgccgcatgttccacgtgaggaaggtttgcgccgctaactttggagacatctgttctgtcgtcgggcagcaggccaccgaggaaatgctgctgccgcgcttttttcagctgtgttccgataatgtatggggagttaggaaggcgtgtgctgagtgcttcatggctgtctcctgcgccacatgccaggagataagaaggaccaagctcagtgccctatttatcaacctgatatcggatcctagtcggtgggtgcgtcaagccgcctttcaaagtctgggcccatttattagtacttttgccaacccctcttcctctgggcaatacttcaaggaagagagtaaaagttcggaagagatgtccgttgagaataaaaatcgcacgcgggatcaagaagctcccgaagacgtgcaggtacggccagaagatactcctagcgatctctcagtgtctaattcctccgtgattctcgaaaataccatggaagatcacgctgctgaagcatctggaaaaccgctcggcgagatctctgtgcccttggatagcagcttgctgtgcactctgagcagtgagagccatcaagaggccgcttccaacgagaatgacaaaaaacccgggaactataaatctatgttaaggcccgaggtgggtacaactagccaggactctgcgctactggaccaggagctgtacaattcctttcacttctggcgaacacctttgcccgaaatcgatctggatatcgaactagaacagaattccggagggaaaccgtcgcctgaagggcccgaggaagagtcggagggtcccgtgccatcaagccccaatattactatggctacgcgcaaagagctagaggagatgatcgagaacctggagccccacatcgatgaccctgacgtaaaagcgcaggtggaagtcctgtcagctgctctcagagcctcgtctcttgacgctcatgaagaaacaattagcatcgagaaacgcagtgatctccaagacgagctcgatatcaacgagctcccaaactgtaagatcaatcaggaggatagcgtcccactgattagcgatgctgtcgagaacatggactccactctgcactacatacatagcgactccgacttgtccaacaattccagcttttctcccgatgaagagaggcggaccaaggtgcaggacgtagttccgcaggccctgctggatcagtacttatcaatgaccgatccatctcgtgcacagaccgtcgataccgagatcgccaagcactgtgcttattcgctccccggcgtggctctgacgctcgggcgtcagaattggcactgcttgagagagacctacgagacactggcttcagatatgcagtggaaggtcagacgtactctggccttttcaatacacgagttggctgtgatcctcggtgaccagttgactgccgccgacttagtccctatttttaatggctttctgaaagacctcgatgaagttcggattggagtgctgaaacacctgcacgatttccttaagctattgcacattgataaacggcgtgaatatctgtatcagctgcaggagtttttggtcaccgataattcccgcaactggaggttcagggccgaactggccgaacagcttattctcctgcttgagctgtactctcctcgcgatgtttacgattacctacggcccattgccctcaacttatgcgccgataaggtgagcagtgtgagatggatcagttacaaactggtttccgagatggtcaagaagctgcacgcggcgaccccacccacatttggtgtggacctcatcaacgagttggtggagaacttcggacgctgccccaaatggagcggcagacaagccttcgtgtttgtttgtcaaacggtcatcgaagacgattgcctccctatggaccagttcgcggtgcatctcatgccacacttactcacgctggccaacgaccgtgtgcccaacgtccgggtcctgctggctaagacccttcgtcagactttgctagaaaaggattactttctggcctctgcgtcctgtcatcaggaagccgtagagcagaccataatggctttacagatggatagagactcagacgtcaaatatttcgcatccatacatcctgcaagtacaaaaatcagcgaagatgccatgagcacagcgagctcgacctactag

SEQ ID NO: 153073 - DNA, 2802 bp, Artificial Sequence
  derived and/or modified sequence
atggctgacctgagcctgctgcaggaggacctgcaggaggatgctgatggcagcctggactttgtgtcccaggatgagatgctgacccccctgggccgcctggacaagtatgctgccagcgagaacatcttcaaccggcagatggtggcccggagcctgctggacaccctgcgggaggtgtgtgatgatgagcgggactgcatcgctgtgctggagcgcatcagccggctggctgatgattctgagcccaccgtgcgggcagagctgatggagcaggtgccccacatcgccctcttctgccaggagaaccggcccagcatcccctatgccttcagcaagttcctgctgcccatcgtggtgcgctacctggccgaccagaacaaccaggtgaggaagaccagccaggccgccctgctggccctgctggagcaggagctgattgaaagatttgatgtggagaccaaggtgtgccctgtgctgattgagctgacagccccagacagcaatgatgatgtgaagacagaggccgtggccatcatgtgcaagatggcccccatggtgggcaaggacatcacagagcggctcatcctgccccgcttctgtgagatgtgctgtgactgcaggatgtttcatgtgaggaaggtgtgtgccgccaactttggagacatctgcagcgtggtgggccagcaggccacagaggagatgctgctgccccgcttcttccagctgtgcagcgacaacgtgtggggcgtgaggaaggcctgtgccgagtgcttcatggctgtgtcctgtgccacctgccaggagatccggaggaccaagctgagcgccctcttcatcaacctgatcagtgaccccagccgctgggtgcggcaggccgccttccagagcctgggccccttcatcagcacctttgccaaccccagcagcagcggccagtacttcaaggaggagagcaagagcagcgaggagatgtctgtggagaacaagaacagaacccgggaccaggaggccccagaagatgtgcaggtgcggcctgaggacacccccagcgacctgtctgtgagcaacagcagcgtcatcctggagaacaccatggaggaccacgccgctgaggccagcggcaagcccctgggggagatctctgtgcccctggacagcagcctgctgtgcaccctgagcagcgagagccaccaggaggccgccagcaatgaaaatgacaagaagccaggcaactacaagtccatgctgcggcctgaggtgggcaccaccagccaggacagcgccctgctggaccaggagctgtacaacagcttccacttctggaggacccccctgcctgagattgacctggacatcgagctggagcagaacagcggcggcaagcccagccctgagggccctgaggaggagagcgagggccctgtgcccagcagccccaacatcaccatggccaccaggaaggagctggaggagatgattgagaacctggagccccacattgatgatcctgatgtgaaggcccaggtggaggtgctgtctgctgccctgcgggccagcagcctggatgcccacgaggagaccatcagcattgagaagagaagtgacctgcaggatgagctggacatcaatgagctgcccaactgcaagatcaaccaggaggacagcgtgcccctcatcagtgatgctgtggagaacatggacagcaccctgcactacatccacagcgacagcgacctgagcaacaacagcagcttctccccagatgaggagaggaggaccaaggtgcaggatgtggtgccccaggccctgctggaccagtacctgtccatgacagaccccagccgggcccagacagtggacacagagatcgccaagcactgtgcctacagcctgcccggggtggccctgaccctgggccggcagaactggcactgcctgcgggagacctatgagaccctggccagtgacatgcagtggaaggtgcggaggaccctggccttcagcatccacgagctggccgtcatcctgggggaccagctgacagctgctgacctggtgcccatcttcaacggcttcctgaaggacctggatgaggtgcgcatcggcgtgctgaagcacctgcatgacttcctgaagctgctgcacatcgacaagaggcgggagtacctgtaccagctgcaggagttcctggtgacagacaacagcaggaactggaggttccgggcagagctggccgagcagctgatcctgctgctggagctgtacagccccagagatgtgtatgactacctgcggcccatcgccctgaacctgtgtgccgacaaggtgtcctctgtgcgctggatctcctacaagctggtgtctgagatggtgaagaagctgcatgctgccaccccacccacctttggagtggacctgatcaatgagctggtggagaactttggccgctgccccaagtggagcggccggcaggcctttgtgtttgtgtgccagacagtgattgaagatgactgcctgcccatggaccagtttgctgtgcacctgatgccccacctgctgaccctggccaatgacagagtgcccaacgtgcgggtgctgctggccaagaccctgcggcagaccctgctggagaaggactacttcctggccagcgccagctgccaccaggaggccgtggagcagaccatcatggccctgcagatggaccgggacagtgatgtgaagtactttgccagcatccacccagccagcaccaagatcagtgaagatgccatgagcacagccagcagcacctactag

SEQ ID NO: 153074 - DNA, 2802 bp, Artificial Sequence
  derived and/or modified sequence
atggccgacctgagcctgctgcaggaggacctgcaggaggacgccgatggcagtctcgatttcgtttcccaggacgaaatgttgacccctctcgggagattggataaatacgcagcctccgaaaatatcttcaatcgccagatggttgcccggagcctcctcgacactttgagggaagtatgtgacgacgagagagactgtatcgcagtgttggagaggatctcgaggttggccgacgacagcgagcccacggttcgggccgaactcatggagcaagtaccacatattgcactgttttgtcaggagaataggccgtctatcccttacgcattttccaagtttctgttacctatcgtcgtgcgctacctggccgaccagaacaaccaggtccgaaaaacctctcaagcggcgctactggccctgttggagcaggaactgatcgagcggtttgacgtggaaacaaaagtatgccccgtgctcatagagcttacagcacccgattctaatgatgatgttaaaactgaagctgttgcaataatgtgtaagatggctcctatggtcggcaaggacattacagagagactgattctgccacgtttttgtgaaatgtgttgcgattgccgcatgttccacgtgcgcaaggtgtgtgcagctaacttcggggacatttgctcagtcgtgggacagcaggctaccgaggagatgctgctgccacgattttttcagctgtgtagcgataatgtgtggggtgtgcgaaaagcctgcgctgaatgcttcatggccgtcagttgcgccacctgtcaagagatacgtcgcacaaagctgtctgctctgttcatcaacttgatctcagatccctctcgctgggtgcgacaggctgcttttcagagcctggggccttttattagcaccttcgctaatccatcctcctccgggcagtatttcaaggaggagtcaaaatccagcgaggagatgagcgtcgaaaataaaaaccgcactagggatcaggaggctccggaggacgttcaagtaagacctgaggacactcctagcgacctgtcggtttctaattccagtgtaattctggaaaatacgatggaggatcacgcagccgaggcttcaggaaaacccctgggcgagatcagcgtgcctctggattcatctctcttgtgtactctaagctcagagagccaccaggaggctgctagcaacgagaatgacaagaaaccaggaaattataagtccatgttacggcctgaagtcgggacaacttcacaggactcagcactcctcgaccaggagctgtataacagctttcatttctggaggaccccactccctgagatagatctggacatcgagctggagcagaattctggcggaaaaccatccccagaaggtcctgaggaagagtcagagggacctgtgcctagctctccaaatattaccatggccaccagaaaggagctcgaggagatgatcgagaatctcgaaccacacatcgatgatcctgacgtcaaggcccaggtcgaagtgttaagtgctgctctgcgagccagtagtctcgatgcacacgaggagaccattagcattgagaaaaggtccgacctccaggacgaactagacatcaacgagctgccaaactgtaaaattaaccaagaagactctgtgcctctcatcagcgacgccgtcgaaaatatggacagcaccctccattacatacactcggattctgatctgtcaaataacagttctttttctcccgatgaggaacgccggacaaaggtgcaggacgtggtgcctcaggctctgctcgaccagtatctgtctatgactgacccaagtagggcccaaacagtcgataccgagatcgccaagcattgtgcctatagcctccctggcgtggcactgaccctcggcagacagaattggcattgtctaagggaaacttacgagacactggccagtgatatgcaatggaaagtgcggcgtaccttagcgttctccatccatgagttagcagtcatcctgggagaccaactcaccgcagcagatctggtgcccatattcaacggttttctgaaggacctggacgaggttagaattggcgtgctgaagcatctccacgactttctaaaactgctgcacattgacaaacgacgtgagtacctgtaccagctgcaggagttcctggtgacggataactcccgaaactggcgcttccgcgccgaacttgctgagcaactcattctcctcctggaattgtatagcccaagagatgtgtacgactatctccggcctatagctttgaatctatgtgcagacaaggtttcttctgtgagatggatctcttataagttagtcagcgagatggtcaaaaaactccatgctgccaccccgcccaccttcggggtggatctgataaatgagctggtggagaactttggtaggtgcccaaagtggtcgggtcgtcaagccttcgtgtttgtatgccagaccgtaattgaggatgattgtctccctatggatcagttcgctgtgcatcttatgccacatcttctgactctagctaatgatcgggtcccaaatgtgagagttctactggccaagacacttaggcagaccctcttggaaaaagattactttctcgcctccgcaagctgccaccaggaagccgtggaacagaccattatggcacttcaaatggacagggatagtgatgtgaaatacttcgccagcatccacccagcaagtacaaagatttccgaggacgccatgagcacagcgagtagcacctattag

SEQ ID NO: 153075 - DNA, 2802 bp, Artificial Sequence
  derived and/or modified sequence
atggccgatctgtctttgttacaggaggaccttcaggaggacgctgatggctccctggatttcgtgagtcaagatgagatgctcactcccctggggagactggataagtacgctgctagtgagaacatatttaaccgacagatggtggcgcgatccctcttggatactctgagggaagtttgcgatgacgagcgggactgtatcgccgttcttgaacgtatcagccggttggccgatgattcggagcccaccgttagggccgaactgatggaacaagtgcctcacatcgcgctgttttgtcaagagaatcgcccatccataccgtacgcattctcaaagttcctgctgccaattgtcgtgcgttacctggccgaccagaacaaccaggtcagaaaaacaagccaagcagcactcctggccttgctagagcaggagctcattgagcgctttgatgtcgagacaaaagtctgtcccgttctgatagaattgaccgcgccagattccaacgatgacgtcaagactgaagccgttgccattatgtgtaagatggctcccatggtcggaaaggacattacggagcggctcattttaccaagattctgtgaaatgtgctgtgactgtaggatgttccatgtccgcaaggtctgcgcggctaattttggcgatatttgtagcgtggtgggccagcaggctaccgaagagatgcttctgcccagattctttcagctctgcagtgataacgtgtggggcgtgagaaaggcctgtgctgaatgctttatggcagtgagttgcgccacatgtcaggagataaggcgcactaaactttcggccttgttcataaatttgatatccgatccaagccggtgggtgcgccaggccgcttttcagtcactggggccattcatcagcacattcgccaatcctagcagcagcggacaatacttcaaagaggaaagtaagagttccgaagagatgtcagtggagaacaagaaccgaactcgagaccaggaagctccagaggatgtgcaggttagaccagaggatactccttccgacttatcagtctccaactcatccgtgatcctagaaaacactatggaggaccacgccgctgaggcatccggcaagcccctcggggaaatttctgtgccactcgactcttctctgctctgtacactttctagcgaaagccatcaagaagcagcttctaatgaaaacgacaagaaacccggaaactataagagcatgctgaggccggaggttggcacgacctcccaggattccgcactgctggaccaggaactgtacaatagcttccacttttggcgtaccccgctcccggaaattgacttagacatcgagctcgaacaaaactctgggggtaagccttcacctgagggaccagaggaggaatcagaagggcctgtgccgtcaagtccaaatatcactatggccaccagaaaagaactggaggagatgatcgaaaacctagagccgcatatcgacgaccccgacgtcaaggcacaagttgaggtcttgagtgccgcactgcgtgcctcatctctggatgcccatgaggagaccatctcaattgagaaacggagcgatttgcaagacgaattggacatcaatgagctgcccaactgcaagattaatcaggaagacagtgtacctctcattagcgatgcagtcgaaaatatggattctaccctgcactatatccactccgactcagacctgagtaataactcctcttttagtcccgacgaagagcgtaggaccaaagtgcaagatgtggtgcctcaggctcttttagatcaatatctgtctatgaccgatccctccagagcgcagaccgtggacaccgagatagccaaacactgtgcctactctcttcctggtgttgcactcacactgggcaggcagaactggcattgtctcagggagacgtatgagacactcgcttccgatatgcaatggaaggttcgcagaaccttggcattcagcatacacgagcttgccgtcatcctgggcgaccagcttactgccgcagacctggtgcccatcttcaatggctttctgaaggatctagacgaggtgaggatcggagtactcaaacatctgcatgatttcctgaagcttctgcatattgacaaacgtagggagtatctgtaccagctccaagagttcctcgtcaccgacaacagcaggaattggaggtttcgagccgagttagctgagcagctcatactacttctcgagctgtactccccgagggatgtgtacgactatctgcggccaattgcattaaacctgtgcgccgataaagtcagttccgttcggtggatcagctacaagctcgtttcggagatggtgaagaaactccacgctgctactccacctacgtttggggtggacctgatcaacgagctggtggagaacttcggcaggtgccccaagtggtccggcagacaggccttcgtctttgtttgtcagaccgtgatcgaggatgactgtctgccaatggaccagtttgcagtgcatctgatgcctcatctgttaactctggccaacgacagagtaccaaacgtaagagtgctgctcgccaaaaccctgaggcagacattgttagaaaaggactacttcctcgcctcggcttcatgccatcaggaggcagtggagcaaaccatcatggccttacaaatggaccgcgatagcgatgtgaagtacttcgcatctatccaccccgcttcaaccaaaatctcagaagacgctatgagcactgcctctagtacctattag

SEQ ID NO: 153076 - DNA, 3885 bp, Artificial Sequence
  derived and/or modified sequence
gcgcgcgtccaccggctccccggctcgcgccgctccatgtagccccggctccccgggcggccgcggaggagggggcgaccacaagatggcggacctctcgctgcttcaggaggacctgcaggaggacgcagacggatccctggactttgtctcacaagatgaaatgttgacgcccctggggagattggacaagtatgctgcaagtgagaacatatttaacagacaaatggtggcccggagtttgctcgataccttgagggaagtctgcgatgatgaaagagattgtattgctgttttggaaagaattagcagattggccgatgattcagaaccaactgtgagagcggagctgatggaacaggtgcctcacatcgcactgttttgtcaagaaaaccggccttcaataccatatgctttttcaaaattcttactacctattgtggttagataccttgcagatcagaataatcaggtgaggaaaacaagtcaggcagctttgctggctctgttggagcaggagctcattgaacgatttgatgtggagaccaaagtgtgccctgtcctcatagagctgacagccccagatagcaatgatgatgtgaaaacagaagctgtggctataatgtgcaaaatggctcccatggttgggaaggatattacagagcgtcttatcctccctaggttttgtgagatgtgctgcgattgcagaatgtttcacgttcgaaaggtctgtgctgccaattttggagatatttgcagtgtagttggccagcaagctactgaagaaatgttgctgcccagatttttccagctttgttctgataatgtatggggagtccgaaaggcttgtgctgaatgcttcatggcggtttcatgtgcaacatgtcaagaaatccgacggaccaaattatcagcactttttattaatttgatcagtgatccttcacgttgggttcgccaagcagcttttcagtctctgggacctttcatatctacttttgctaatccatctagctcaggccagtattttaaagaagaaagcaaaagttcagaagagatgtcagtagaaaacaaaaataggaccagagatcaagaagccccagaggatgtacaagtcaggccagaggatactccttcagatctcagtgttagtaattccagtgtcatactggaaaacacgatggaagaccatgctgctgaggcatccgggaagcctctaggtgaaattagtgttccactggacagctctttactttgtactttgtcctcagaatctcaccaggaagcagctagtaatgagaatgataaaaaacctggtaactacaaatctatgttacgaccagaggttggcaccacttcacaagattcagctctcttagatcaggaattgtataactccttccatttctggaggactcctcttcctgaaatagatctagacatagagcttgaacagaactctgggggaaaacccagcccagagggaccagaggaagaatctgagggccctgtgcccagttctccaaacatcaccatggccaccagaaaggaactggaagaaatgatagaaaatctagagccccacattgatgatccagatgttaaagcacaagtggaagtgctgtccgctgcactacgtgcttccagcctggatgcacatgaagagaccatcagtatagaaaagagaagtgatttgcaagatgaactggatataaatgagctaccaaattgtaaaataaatcaagaagattctgtgcctttaatcagcgatgctgttgagaatatggactccactcttcactatattcacagcgattcagacttgagcaacaatagcagttttagccctgatgaggaaaggagaactaaagtacaagatgttgtacctcaggcgttgttagatcagtatttatctatgactgacccttctcgtgcacagacggttgacactgaaattgctaagcactgtgcatatagcctccctggtgtggccttgacactcggaagacagaattggcactgcctgagagagacgtatgagactctggcctcagacatgcagtggaaagttcgacgaactctagcattctccatccacgagcttgcagttattcttggagatcaattgacagctgcagatctggttccaatttttaatggatttttaaaagacctcgatgaagtcaggataggtgttcttaaacacttgcatgattttctgaagcttcttcatattgacaaaagaagagaatatctttatcaacttcaggagtttttggtgacagataatagtagaaattggcggtttcgagctgaactggctgaacagctgattttacttctagagttatatagtcccagagatgtttatgactatttacgtcccattgctctgaatctgtgtgcagacaaagtttcttctgttcgttggatttcctacaagttggtcagcgagatggtgaagaagctgcacgcggcaacaccaccaacgttcggagtggacctcatcaatgagcttgtggagaactttggcagatgtcccaagtggtctggtcggcaagcctttgtctttgtctgccagactgtcattgaggatgactgccttcccatggaccagtttgctgtgcatctcatgccgcatctgctaaccttagcaaatgacagggttcctaacgtgcgagtgctgcttgcaaagacattaagacaaactctactagaaaaagactatttcttggcctctgccagctgccaccaggaggctgtggagcagaccatcatggctcttcagatggaccgtgacagcgatgtcaagtattttgcaagcatccaccctgccagtaccaaaatctccgaagatgccatgagcacagcgtcctcaacctactagaaggcttgaatctcggtgtctttcctgcttccatgagagccgaggttcagtgggcattcgccacgcatgtgacctgggatagctttcgggggaggagagaccttcctctcctgcggacttcattgcaggtgcaagttgcctacacccaataccagggatttcaagagtcaagagaaagtacagtaaacactattatcttatcttgactttaaggggaaataatttctcagaggattataattgtcaccgaagccttaaatccttctgtcttcctgactgaatgaaacttgaattggcagagcattttccttatggaagggatgagattcccagagacctgcattgctttctcctggttttatttaacaatcgacaaatgaaattcttacagcctgaaggcagacgtgtgcccagatgtgaaagagaccttcagtatcagccctaactcttctctcccaggaaggacttgctgggctctgtggccagctgtccagcccagccctgtgtgtgaatcgtttgtgacgtgtgcaaatgggaaaggaggggtttttacatctcctaaaggacctgatgccaacacaagtaggattgacttaaactcttaagcgcagcatattgctgtacacatttacagaatggttgctgagtgtctgtgtctgattttttcatgctggtcatgacctgaaggaaatttattagacgtataatgtatgtctggtgtttttaacttgatcatgatcagctctgaggtgcaacttcttcacatactgtacatacctgtgaccactcttgggagtgctgcagtctttaatcatgctgtttaaactgttgtggcacaagttctcttgtccaaataaaatttattaataagatctatagagagagatatatacacttttgattgttttctagatgtctaccaataaatgcaatttgtgacctgtattaatgatttaaagtggggaaactagattaaaatatttgtcttttaactagtt

SEQ ID NO: 153077 - DNA, 2802 bp, Artificial Sequence
  derived and/or modified sequence
atggccgacctgagcctgctgcaggaggacctgcaggaggacgccgacggcagcctggacttcgtgagccaggacgagatgctgacccccctgggcagactggacaagtacgccgccagcgagaacatcttcaacagacagatggtggccagaagcctgctggacaccctgagagaggtgtgcgacgacgagagagactgcatcgccgtgctggagagaatcagcagactggccgacgacagcgagcccaccgtgagagccgagctgatggagcaggtgccccacatcgccctgttctgccaggagaacagacccagcatcccctacgccttcagcaagttcctgctgcccatcgtggtgagatacctggccgaccagaacaaccaggtgagaaagaccagccaggccgccctgctggccctgctggagcaggagctgatcgagagattcgacgtggagaccaaggtgtgccccgtgctgatcgagctgaccgcccccgacagcaacgacgacgtgaagaccgaggccgtggccatcatgtgcaagatggcccccatggtgggcaaggacatcaccgagagactgatcctgcccagattctgcgagatgtgctgcgactgcagaatgttccacgtgagaaaggtgtgcgccgccaacttcggcgacatctgcagcgtggtgggccagcaggccaccgaggagatgctgctgcccagattcttccagctgtgcagcgacaacgtgtggggcgtgagaaaggcctgcgccgagtgcttcatggccgtgagctgcgccacctgccaggagatcagaagaaccaagctgagcgccctgttcatcaacctgatcagcgaccccagcagatgggtgagacaggccgccttccagagcctgggccccttcatcagcaccttcgccaaccccagcagcagcggccagtacttcaaggaggagagcaagagcagcgaggagatgagcgtggagaacaagaacagaaccagagaccaggaggcccccgaggacgtgcaggtgagacccgaggacacccccagcgacctgagcgtgagcaacagcagcgtgatcctggagaacaccatggaggaccacgccgccgaggccagcggcaagcccctgggcgagatcagcgtgcccctggacagcagcctgctgtgcaccctgagcagcgagagccaccaggaggccgccagcaacgagaacgacaagaagcccggcaactacaagagcatgctgagacccgaggtgggcaccaccagccaggacagcgccctgctggaccaggagctgtacaacagcttccacttctggagaacccccctgcccgagatcgacctggacatcgagctggagcagaacagcggcggcaagcccagccccgagggccccgaggaggagagcgagggccccgtgcccagcagccccaacatcaccatggccaccagaaaggagctggaggagatgatcgagaacctggagccccacatcgacgaccccgacgtgaaggcccaggtggaggtgctgagcgccgccctgagagccagcagcctggacgcccacgaggagaccatcagcatcgagaagagaagcgacctgcaggacgagctggacatcaacgagctgcccaactgcaagatcaaccaggaggacagcgtgcccctgatcagcgacgccgtggagaacatggacagcaccctgcactacatccacagcgacagcgacctgagcaacaacagcagcttcagccccgacgaggagagaagaaccaaggtgcaggacgtggtgccccaggccctgctggaccagtacctgagcatgaccgaccccagcagagcccagaccgtggacaccgagatcgccaagcactgcgcctacagcctgcccggcgtggccctgaccctgggcagacagaactggcactgcctgagagagacctacgagaccctggccagcgacatgcagtggaaggtgagaagaaccctggccttcagcatccacgagctggccgtgatcctgggcgaccagctgaccgccgccgacctggtgcccatcttcaacggcttcctgaaggacctggacgaggtgagaatcggcgtgctgaagcacctgcacgacttcctgaagctgctgcacatcgacaagagaagagagtacctgtaccagctgcaggagttcctggtgaccgacaacagcagaaactggagattcagagccgagctggccgagcagctgatcctgctgctggagctgtacagccccagagacgtgtacgactacctgagacccatcgccctgaacctgtgcgccgacaaggtgagcagcgtgagatggatcagctacaagctggtgagcgagatggtgaagaagctgcacgccgccaccccccccaccttcggcgtggacctgatcaacgagctggtggagaacttcggcagatgccccaagtggagcggcagacaggccttcgtgttcgtgtgccagaccgtgatcgaggacgactgcctgcccatggaccagttcgccgtgcacctgatgccccacctgctgaccctggccaacgacagagtgcccaacgtgagagtgctgctggccaagaccctgagacagaccctgctggagaaggactacttcctggccagcgccagctgccaccaggaggccgtggagcagaccatcatggccctgcagatggacagagacagcgacgtgaagtacttcgccagcatccaccccgccagcaccaagatcagcgaggacgccatgagcaccgccagcagcacctactag

SEQ ID NO: 153078 - protein, 1099 aa, Artificial Sequence
  derived and/or modified sequence
MPHFTVTKVEDPEEGAAASISQEPSLADIKARIQDSDEPDLSQNSITGEHSQLLDDGHKKARNAYLNNSNYEEGDEYFDKNLALFEEEMDTRPKVSSLLNRMANYTNLTQGAKEHEEAENITEGKKKPTKTPQMGTFMGVYLPCLQNIFGVILFLRLTWVVGTAGVLQAFAIVLICCCCTMLTAISMSAIATNGVVPAGGSYFMISRALGPEFGGAVGLCFYLGTTFAAAMYILGAIEIFLVYIVPRAAIFHSDDALKESAAMLNNMRVYGTAFLVLMVLVVFIGVRYVNKFASLFLACVIVSILAIYAGAIKSSFAPPHFPVCMLGNRTLSSRHIDVCSKTKEINNMTVPSKLWGFFCNSSQFFNATCDEYFVHNNVTSIQGIPGLASGIITENLWSNYLPKGEIIEKPSAKSSDVLGSLNHEYVLVDITTSFTLLVGIFFPSVTGIMAGSNRSGDLKDAQKSIPIGTILAILTTSFVYLSNVVLFGACIEGVVLRDKFGDAVKGNLVVGTLSWPSPWVIVIGSFFSTCGAGLQSLTGAPRLLQAIAKDNIIPFLRVFGHSKANGEPTWALLLTAAIAELGILIASLDLVAPILSMFFLMCYLFVNLACALQTLLRTPNWRPRFRYYHWALSFMGMSICLALMFISSWYYAIVAMVIAGMIYKYIEYQGAEKEWGDGIRGLSLSAARFALLRLEEGPPHTKNWRPQLLVLLKLDEDLHVKHPRLLTFASQLKAGKGLTIVGSVIVGNFLENYGEALAAEQTIKHLMEAEKVKGFCQLVVAAKLREGISHLIQSCGLGGMKHNTVVMGWPNGWRQSEDARAWKTFIGTVRVTTAAHLALLVAKNISFFPSNVEQFSEGNIDVWWIVHDGGMLMLLPFLLKQHKVWRKCSIRIFTVAQLEDNSIQMKKDLATFLYHLRIEAEVEVVEMHDSDISAYTYERTLMMEQRSQMLRHMRLSKTERDREAQLVKDRNSMLRLTSIGSDEDEETETYQEKVHMTWTKDKYMASRGQKAKSMEGFQDLLNMRPDQSNVRRMHTAVKLNEVIVNKSHEAKLVLLNMPGPPRNPEGDENYMEFLEVLTEGLERVLLVRGGGSEVITIYS

SEQ ID NO: 153079 - DNA, 3300 bp, Artificial Sequence
  derived and/or modified sequence
atgcctcacttcacagtgaccaaagtggaagaccctgaagagggcgctgctgcctcaatttctcaggaaccctcattagcagacataaaagcccgaatccaggatagcgacgagcctgacttaagtcagaactctattactggggaacattcccagctgctggatgatggtcataagaaagcgaggaatgcgtacctaaacaattcaaactatgaggaaggcgatgaatacttcgataaaaacctggccctgttcgaagaagaaatggacacacgtcccaaggtcagcagcctgctcaatagaatggccaactacaccaacctgacccagggagccaaagaacacgaagaggcagaaaacatcaccgaaggcaaaaagaagccgacaaaaaccccccagatgggcactttcatgggagtttatctgccctgccttcagaacatattcggtgtgattctctttcttagacttacttgggtagtcgggaccgcaggcgtcctgcaggcattcgccatagtgcttatctgttgctgctgcacgatgcttactgccatttccatgtccgcgatcgccactaatggcgtggtgccggcaggtggcagctatttcatgatcagcagggctctgggacccgagttcggcggcgctgtggggctgtgcttctatttggggactacgttcgctgccgctatgtatatcttaggagctatcgagatatttttggtctacatagtacccagggccgcgatttttcattctgacgatgctctgaaggagtccgctgctatgcttaacaatatgcgcgtgtacggaaccgcctttctagtgttgatggtgttggtggtcttcatcggagtccgctacgtaaacaagttcgcttccctctttttggcctgcgtcattgtatccatccttgcgatatatgccggcgccattaaatcctcctttgctccaccccactttccggtctgtatgctgggcaacaggaccctgagcagtcgccacattgacgtctgttcaaaaacgaaggaaattaacaacatgaccgtgccatcgaaactgtggggtttcttctgtaactcttcacagttttttaatgcgacctgcgatgagtattttgtgcataacaacgtcacgagcattcagggcattcccggcctggcttctggtatcataacagagaacctgtggtctaactaccttcctaagggtgagattatagaaaagccgtcggcaaagtccagcgatgtgctcggctcacttaatcatgagtatgtgcttgtggatatcactacatccttcacgctgctcgttggaatcttcttcccctctgttaccggtatcatggccggatccaaccgctctggagatttaaaagatgcacagaagtccataccgatcgggacaatactcgcaatcttaactactagcttcgtgtatttgtctaacgtcgtgctgttcggtgcctgtatcgaaggagtcgtgctgagagacaagtttggcgacgcagtcaagggcaatcttgtcgtgggaactctgtcatggccctcgccttgggtgatcgttatcggcagcttttttagcacatgcggagccgggcttcagtccctcactggagcccctcggctgttgcaggcaatcgcgaaagataatattattccattcctgcgtgtcttcggacattccaaagcgaatggggagcctacctgggcactactgttaacagccgccattgcagagctggggatcctgatcgcgtcccttgaccttgttgcccccatacttagcatgtttttcctcatgtgttacctcttcgtcaatctggcttgcgccctgcagacactgcttcgtacccccaattggcgacctaggttccggtactatcactgggctctgtcatttatgggcatgagcatctgccttgccttgatgttcatatcaagctggtactacgccatcgtcgccatggtcatcgcaggcatgatatacaaatacattgaataccaaggagcagagaaagaatggggggatgggatcagaggcctgtctctctccgctgctcggttcgccctcctgagattggaggagggtccacctcacacgaaaaactggcgtcctcagttgctagtccttctgaaactcgacgaggacctgcacgtgaaacacccaagacttcttaccttcgcatctcagctcaaggctgggaaagggttgaccatcgtcggatccgttattgtcggaaactttttggagaattacggcgaagctttggccgccgagcagactattaaacatttaatggaggctgagaaggttaaaggcttctgtcaactggttgtggctgccaagctgagagaagggataagccatctgattcagtcctgtggcctgggcggaatgaaacataataccgtagtgatgggttggcctaacgggtggcgtcagtccgaggatgctagggcctggaagaccttcattggcacggtgcgagtgaccaccgccgcacacctcgcgctccttgtggcaaaaaacatttctttcttcccatcaaatgtagaacagttcagcgaagggaatatagacgtgtggtggatcgtccacgacggggggatgttgatgctcctccccttcttgctaaagcagcataaggtgtggagaaagtgttccatacgcatttttaccgtggcccagctcgaagacaattccatccagatgaaaaaagatctcgccacattcctctaccatctgcgcattgaagccgaggtggaggtggtagagatgcacgactccgacatcagtgcctacacctatgagcggaccctaatgatggaacaacgttcacagatgcttcgtcatatgagacttagcaagactgagagggaccgagaagcacaactggtgaaagacagaaatagtatgctgcggctcacaagtattggctccgacgaggacgaggagaccgaaacttatcaggaaaaggtgcacatgacgtggacaaaggataagtacatggcatcacgagggcagaaggccaagagtatggaggggtttcaggatttgcttaatatgcggcccgaccagagcaacgttcgtaggatgcatactgccgttaaattgaacgaggtcatcgtaaacaagtcacacgaggccaaattggttttactcaacatgccgggcccacccagaaacccagaaggtgatgagaactacatggagtttctagaagtcctcacagagggactggaaagggttctgctcgtccgaggtggcggcagcgaagtgatcacaatctactcatag

SEQ ID NO: 153080 - DNA, 3300 bp, Artificial Sequence
  derived and/or modified sequence
atgccccacttcaccgtgaccaaggtggaggaccctgaggagggcgctgctgccagcatcagccaggagcccagcctggccgacatcaaggcccgcatccaggacagtgatgagccagacctgagccagaacagcatcactggagagcacagccagctgctggatgatggccacaagaaggccagaaatgcctacctgaacaacagcaactatgaggagggagatgagtactttgacaagaacctggccctgtttgaggaggagatggacacccggcccaaggtgagcagcctgctgaacaggatggccaactacaccaacctgacccagggcgccaaggagcacgaggaggccgagaacatcacagagggcaagaagaagcccaccaagaccccccagatgggcaccttcatgggcgtgtacctgccctgcctgcagaacatctttggagtcatcctcttcctgcggctgacctgggtggtgggcacagctggggtgctgcaggcctttgccatcgtgctgatctgctgctgctgcaccatgctgacagccatctccatgtctgccatcgccaccaatggagtggtgcctgctgggggcagctacttcatgatcagccgggccctgggccctgagtttggaggagctgtgggcctgtgcttctacctgggcaccacctttgctgctgccatgtacatcctgggcgccatcgagatcttcctggtgtacatcgtgccccgggccgccatcttccacagtgatgatgccctgaaggagagcgctgccatgctgaacaacatgagggtgtatggaacagccttcctggtgctgatggtgctggtggtgttcatcggcgtgcgctacgtgaacaagtttgccagcctcttcctggcctgtgtgattgtgtccatcctggccatctatgctggggccatcaagagcagctttgccccaccccacttccctgtgtgcatgctgggcaacagaaccctgagcagccgccacattgatgtgtgcagcaagaccaaggagatcaacaacatgacagtgcccagcaagctgtggggcttcttctgcaacagcagccagttcttcaatgccacctgtgatgagtactttgtgcacaacaacgtgaccagcatccagggcatccctggcctggccagcggcatcatcacagagaacctgtggagcaactacctgcccaagggggagatcatcgagaagcccagcgccaagagcagtgatgtgctgggcagcctgaaccatgaatatgtgctggtggacatcaccaccagcttcaccctgctggtgggcatcttcttccccagcgtgacaggcatcatggccggcagcaacagaagtggggacctgaaggatgcccagaagagcatccccatcggcaccatcctggccatcctgaccaccagctttgtgtacctgagcaatgtggtgctgtttggagcctgcattgaaggagtggtgctgcgggacaagtttggagatgctgtgaagggcaacctggtggtgggcaccctgtcctggcccagcccctgggtgattgtgattggcagcttcttcagcacctgtggggccggcctgcagagcctgaccggggccccccggctgctgcaggccatcgccaaggacaacatcatccccttcctgcgggtgtttggccacagcaaggccaatggagagcccacctgggccctgctgctgacagctgccatcgccgagctgggcatcctgattgccagcctggacctggtggcccccatcctgtccatgttcttcctgatgtgctacctgtttgtgaacctggcctgtgccctgcagaccctgctgcggacccccaactggaggccccgcttccgctactaccactgggccctgtccttcatgggcatgagcatctgcctggccctgatgttcatcagctcctggtactatgccatcgtggccatggtgattgctggcatgatctacaagtacatcgagtaccagggcgctgagaaggagtggggagatggcatccggggcctgagcctgtctgctgccaggtttgccctgctgcggctggaggagggccccccccacaccaagaactggaggccccagctgctggtgctgctgaagctggatgaggacctgcacgtgaagcacccccggctgctgacctttgccagccagctgaaggccggcaagggcctgaccatcgtgggctctgtgattgtgggcaacttcctggagaactatggagaggccctggccgctgagcagaccatcaagcacctgatggaggccgagaaggtgaagggcttctgccagctggtggtggccgccaagctgcgggagggcatcagccacctgatccagagctgtggcctgggcggcatgaagcacaacacagtggtgatgggctggcccaacggctggaggcagagtgaagatgcccgggcctggaagaccttcatcggcaccgtgcgggtgaccacagctgcccacctggccctgctggtggccaagaacatctccttcttccccagcaatgtggagcagttcagcgagggcaacattgatgtgtggtggatcgtgcatgatggcggcatgctgatgctgctgcccttcctgctgaagcagcacaaggtgtggaggaaatgttccatccgcatcttcaccgtggcccagctggaggacaacagcatccagatgaagaaggacctggccaccttcctgtaccacctgcgcatcgaggccgaggtggaggtggtggagatgcatgacagcgacatcagcgcctacacctatgaaagaaccctgatgatggagcagaggagccagatgctgcggcacatgaggctgagcaagacagagcgggaccgggaggcccagctggtgaaggacaggaacagcatgctgcggctgaccagcattggaagtgatgaagatgaggagacagagacctaccaggagaaggtgcacatgacctggaccaaggacaagtacatggccagccggggccagaaggccaagtccatggagggcttccaggacctgctgaacatgaggccagaccagagcaatgtgcggaggatgcacacagctgtgaagctgaatgaggtgattgtgaacaagagccatgaggccaagctggtgctgctgaacatgcctggcccccccaggaacccagaaggagatgagaactacatggagttcctggaggtgctgacagagggcctggagcgggtgctgctggtgcggggcggcggcagcgaggtgatcaccatctacagctag

SEQ ID NO: 153081 - DNA, 3300 bp, Artificial Sequence
  derived and/or modified sequence
atgccccacttcaccgtgaccaaggtggaggaccccgaggagggcgcagccgcttcaatttctcaggagcccagcctagccgacatcaaggcacggattcaagatagcgacgaacctgatctcagccagaacagtatcacaggcgaacatagtcaattacttgatgacgggcacaagaaagctcgcaacgcctacttaaacaacagcaattatgaagaaggtgatgaatacttcgacaagaatctggccctgtttgaggaggagatggacacacggccaaaggtatcttctctgctgaatcggatggccaattatactaatctgacccagggcgccaaggaacacgaggaggctgagaatataactgagggcaagaaaaaaccaaccaaaaccccacaaatgggtacatttatgggagtgtacctcccttgtttacaaaacatttttggcgtgatcctgtttctcagactgacttgggtggtaggaacagcgggcgtgctgcaggcgtttgctatcgtgctcatctgctgctgttgtacaatgctcaccgccatctctatgtctgctattgccactaacggcgttgtgccagccgggggctcatacttcatgatctcccgggctttgggcccagaatttggcggtgcggtaggactgtgtttctacctgggcactacattcgccgctgcaatgtacattctgggagctatcgagattttcctagtgtacatagtgccaagagcagcaatcttccatagtgacgacgccctcaaagagagcgctgccatgctgaataatatgagagtttacggcaccgcattcctggtactaatggttctggtagtcttcataggggtacgctatgtgaacaagtttgctagtctttttttagcttgtgtgatagtgtctatcctggcgatttacgccggggccattaaaagcagtttcgcaccaccccacttcccagtctgtatgctaggaaatagaactctgtcctctcgacatatagacgtatgttcaaaaaccaaagagattaacaatatgacggtgccctccaagctgtggggctttttttgcaactcctcgcagttcttcaacgcaacctgcgacgagtacttcgtccacaataacgtgacctccattcagggtatcccgggtttagcaagcggcatcattaccgagaatctatggtcgaattatctgccaaagggcgagataatagaaaagccatcagccaaaagttccgacgtgttaggtagtctgaatcacgaatacgtgctagtggacatcacaacaagcttcaccctactggtcggcatcttctttcccagtgtgaccgggataatggctggatcaaacagaagtggggacctgaaagatgctcagaagtctattccaatcgggacgattctggcaatcctcacaacctcattcgtgtatctgtccaatgtcgtgctgttcggggcttgtattgagggagtcgtgcttagagataaatttggggatgccgttaaggggaatcttgtggtaggaaccctatcctggccctcaccctgggtgatcgtcattgggagtttcttttccacttgtggggcggggctgcagtctctgacaggcgccccaagactgcttcaagctattgcgaaagacaatattatcccattcctccgcgtgttcggccatagcaaagcaaacggcgaacccacctgggcgctgctgctcactgctgccatagcagagctaggaatattgattgcatccctggacctcgtcgcccctattttatccatgttcttcctgatgtgttacttgtttgtcaatctggcctgcgcactccaaaccctcctgcgaactcctaactggcgaccccgcttccgttactatcattgggcccttagcttcatggggatgagtatctgtctggctctgatgtttatctcttcctggtactacgccatcgtcgccatggtcattgccgggatgatctacaagtacattgagtatcagggagccgagaaggagtggggtgatggaattcggggcctctcactgagcgctgctagatttgctctcttgaggctcgaggaaggtcccccacacactaaaaattggcgcccccagctgctagtcctgctgaagctggacgaggacctccacgtgaagcatccgcgcctcttgacttttgcttcacagctgaaagctggcaaaggactgaccatagtagggtcagtaattgtgggaaacttcctcgagaattacggagaagccctcgcagccgagcagacaataaaacatttgatggaagcagagaaggtcaaaggcttttgccaactggtagtcgcggccaaactcagggagggaatcagccatcttatacagtcttgtggacttggcgggatgaagcacaataccgtcgttatgggatggcctaatggctggaggcagtctgaggatgcacgggcttggaagacctttattggtactgtgagggtcaccactgcagcacacctggccctcctggtagctaaaaatatttcattcttcccaagtaatgtggaacaatttagcgagggaaatatcgatgtttggtggattgttcacgacggcggcatgctcatgttgttaccctttctcctgaagcagcataaagtgtggcgcaagtgctcaatccgtatctttacagtagcacagttagaggacaactcaattcagatgaagaaagatctagctacattcttatatcatctgagaattgaagccgaggtggaagttgtggagatgcacgactcagacatttccgcctatacctacgagcggacccttatgatggagcagcgctctcaaatgctccggcacatgaggttaagtaagactgaacgagatcgggaagctcaactggtcaaggatcggaactcaatgttgcgccttacttctattggatctgacgaggatgaggagaccgaaacttaccaggaaaaggttcacatgacgtggactaaagacaagtacatggcatctagaggacagaaggccaaatctatggaggggttccaagaccttctcaatatgcgcccggaccagagtaacgtcaggaggatgcatacggccgtgaaactgaatgaggtgatcgtcaacaaatctcatgaggcaaagctggtgctgctcaacatgcccggcccccctcggaacccagaaggcgacgagaattacatggaatttctggaggtgctcacagagggccttgaacgcgttttgcttgttcggggcggcggatcggaggttattacaatttactcttag

SEQ ID NO: 153082 - DNA, 3300 bp, Artificial Sequence
  derived and/or modified sequence
atgccacattttacggtgaccaaagtcgaagacccggaagagggcgcagccgcaagcattagtcaggagcccagcctggccgatatcaaggccagaatccaggatagcgacgagcccgatctttcccagaacagtattactggagaacactcacagttgcttgatgacggccacaagaaagctcgaaatgcttatctgaataactctaattatgaggagggagacgaatatttcgataaaaacttggctttgtttgaggaagagatggatacccgaccgaaagtctcttcactgctgaataggatggccaactacaccaatctgacgcagggcgctaaagagcatgaggaggccgagaacatcaccgagggaaagaaaaagcctaccaaaacaccccagatggggacatttatgggcgtgtacctgccttgcctccagaatatattcggcgtcattctattccttcggcttacatgggtggtcggcaccgcaggcgtgctgcaagcgtttgctatcgtgctgatctgttgctgctgcacgatgctgacggctatatctatgtctgctatcgccacgaacggtgtcgtgccagccggagggtcttatttcatgatttctcgcgctctcggaccagaattcggaggagcagtgggactctgtttctatctcggcacgacgttcgcagccgctatgtatatcctgggagcaattgaaattttcctggtttatatagtgccccgagccgcaatttttcacagtgatgatgcattgaaggagtcagcagccatgcttaataatatgcgcgtgtacggaacggctttcctagtgttaatggtgctagtggtgttcattggcgtgcggtatgtcaacaagtttgcatcactctttctcgcctgtgtgatcgtatctatactcgccatttatgcaggagcgataaagagtagttttgccccacctcatttcccagtgtgtatgttgggcaaccgcactctgagttcccgtcacatcgatgtgtgcagcaagaccaaagagattaacaatatgaccgtcccctctaagctttggggatttttctgtaatagttcccagttctttaacgccacatgtgatgaatacttcgtgcataacaacgtcactagtatccagggcatccctggcctggcaagtgggataatcaccgagaacttatggagcaattacttgcccaagggcgaaatcatagagaagccttcggcaaaaagctcggatgtgctcgggagtctaaaccatgaatatgtgttggtggacattaccacatccttcacactcctggtggggattttttttccctcggtcactgggattatggccggttctaatcgctcaggtgatctgaaagacgcccagaaatcaatcccgattggcaccatactggcaatcctaaccacatctttcgtgtacctttccaatgtggtattgtttggtgcctgtatagagggagttgtactgcgagacaagttcggagacgcagtaaaaggtaatctggtcgtcggtactctctcatggcctagtccctgggtgatcgtgatcggtagtttcttcagtacttgcggagctggcctccaaagcctcaccggcgcacctaggctgcttcaagctatcgctaaagacaacattatccctttcctgagggttttcgggcattctaaagccaacggagaaccgacctgggccttgcttttgaccgccgctattgctgaactcggtatacttatcgctagcctcgatctagtcgctccaatactcagtatgttctttctaatgtgctacttgtttgtgaacctcgcttgcgccctccagacactgctcagaactcccaattggcggcctcggttccgttactatcactgggctctttcattcatggggatgtcaatttgccttgcacttatgttcatttcatcatggtactacgctatcgtggcaatggtaatcgcaggtatgatctacaagtacattgagtatcagggggcagaaaaagagtggggtgacggaatcaggggtctcagcttgtcagcagctagatttgcattgctgcgcctggaggagggaccaccccatactaaaaactggcgcccacagctgctggttctgttgaaacttgacgaggacctgcacgtgaagcacccaaggcttcttaccttcgcaagtcagcttaaggcaggtaaggggctaacaatagtgggctctgtaatcgtcggaaatttcctggaaaactacggcgaggctcttgccgctgaacaaacaatcaagcacctgatggaggctgaaaaagtgaagggtttctgtcagttggtcgtcgcagccaaattgagagaaggtatttctcacctgatacagagctgcggtctgggtgggatgaagcataacaccgtggtcatggggtggcccaatggctggaggcagagcgaagacgcacgggcttggaaaaccttcatcggcaccgtgcgagtgactaccgccgctcatctggcactgctagtcgcgaaaaacatatctttttttcctagtaacgtagagcaattttccgaaggcaacatcgacgtgtggtggattgtccacgatggaggtatgctcatgttgctgccctttcttctcaagcagcataaggtgtggcgaaaatgcagcattcgaatctttactgtagcgcagctcgaagacaattctatccaaatgaaaaaagacttagcaacgttcctgtaccatttacgcatcgaggctgaagtggaggtggtcgagatgcacgatagtgacatatccgcctatacatacgagcgcaccctgatgatggagcagcgatcccaaatgcttagacacatgcggctatccaaaactgagagggacagagaagcacaactcgtgaaggacagaaattcaatgttgcgacttacatcgatcggaagcgatgaagatgaagaaaccgagacataccaggagaaggttcatatgacctggactaaagataaatacatggcaagccgcggacagaaggcaaaatctatggaaggctttcaggatctcctgaatatgcggccagatcagtccaacgtacgtcggatgcacaccgctgtcaaattgaatgaagtcattgttaataagtcacatgaggcgaaactcgttctcctgaatatgcctgggcctcccaggaaccccgaaggcgatgagaactacatggaatttttagaggtgctcaccgaaggcctggaacgcgtacttctcgtgcgcggaggaggaagtgaggtcattacaatctactcatag

SEQ ID NO: 153083 - DNA, 3817 bp, Artificial Sequence
  derived and/or modified sequence
ggatcacagtctgaaacgacagcaaggaagaggtaggcagggaaaactaactggaaggaagtttaaatacagaaagagcaaagtattatctaactataacaatgccacattttactgtgactaaggtagaggacccagaggagggggcagcggcttcgatctctcaagagcctagtttagcagacataaaagcccggattcaggattcagatgaaccagacctgagtcagaactccatcacaggggaacacagccaactgttagacgacggacataagaaagctcgaaatgcttatctcaataattccaattatgaagaaggagatgaatattttgataaaaatttggcactctttgaggaagaaatggacaccagaccgaaggtgtcttccctcctcaaccgcatggccaattacactaatctgactcaaggagcaaaggaacatgaagaggcagaaaacatcactgaagggaaaaagaagcccaccaagaccccccaaatgggtaccttcatgggtgtctacctcccatgtctacaaaatatttttggagtgatcctttttttacgccttacatgggtggtgggcacagctggagttcttcaggcttttgcaattgtccttatctgctgctgctgtacaatgttgactgctatctccatgagtgccattgccactaatggagtggtgccagctgggggctcatactttatgatttcccgggcactgggcccagagtttggtggggctgttggcctctgcttttatcttggtaccacatttgcagcagccatgtacatccttggtgccattgaaatctttctggtctatatcgtcccccgagctgccatctttcacagtgatgacgcactcaaggaatcagcagccatgctaaataacatgcgtgtctacggcacagctttcttggtccttatggtattagtggtatttatcggcgtacgctatgtgaacaagtttgcctcacttttcctggcctgtgtcattgtgtccatcttggccatctatgctggagccatcaagtcttcttttgctcctccacacttcccggtctgcatgctgggtaaccgcaccctttcatcaagacacattgacgtttgctctaagaccaaggaaattaacaacatgacagtcccatcaaagttatggggattcttctgtaactcgagtcaatttttcaatgccacctgtgatgaatactttgttcacaataacgtcacttcaatccagggcattcctggattggctagtggtataattacagagaatctttggagtaattacctacccaagggagagatcatcgaaaagccttcagccaaatcttctgatgtcttaggcagcttaaaccatgaatatgttcttgttgacatcaccacctccttcacgcttctggtgggaatcttctttccctctgttacaggtatcatggctggatcaaacagatctggagatctgaaagatgctcagaagtctattccgattggtactatccttgccatcctgaccacctcctttgtttatttaagcaatgttgtcctttttggtgcatgtattgaaggggttgttctcagagacaagttcggtgatgctgtgaaaggtaatttggtggtaggcaccttatcttggccatccccatgggtgattgttattggctccttcttttcaacatgtggggctggacttcagagcctcacaggtgcaccgaggctgctacaagctattgccaaggataacatcataccgtttctgagggtttttggccacagcaaagccaatggggaacctacctgggctttacttctaactgctgccattgcagagcttggaatactcattgcctccctggatcttgtggccccaattctttccatgttttttctcatgtgttacctctttgtaaacttggcatgtgccttgcaaacattacttcgaacacccaactggagaccccgattccgctactaccattgggccctttctttcatgggaatgagtatctgtctggctctgatgttcatttcttcctggtattatgccattgtagccatggtaatagctggtatgatctacaagtacattgaataccaaggagctgagaaagaatggggtgatggtatccgtgggctgtccctcagtgcagcccggtttgctttgcttcgattggaggaaggacctccacacactaaaaactggaggcctcagttgcttgtattactgaaactagatgaagacttacatgtcaagcatcctcgcctcctcacctttgcctcacagctcaaagcaggaaaaggtctcactattgtgggctctgtcatcgtggggaacttcctagagaactacggtgaagctttagctgctgagcagaccataaagcacctaatggaggcagagaaggtaaaaggattctgccagctggtggtggccgccaagctgagagagggcatttcccacctcatccagtcatgtggccttgggggcatgaagcacaacacggtggtgatgggctggcctaatggctggcgtcaaagcgaagatgcccgcgcttggaagacttttattggcacagttcgagtgacaactgctgcccatcttgcactgctggtggctaaaaacatctccttctttcccagcaatgtggagcaattttctgagggcaacattgatgtgtggtggattgtgcatgatggggggatgcttatgctactaccattcctactgaaacagcacaaggtgtggcgaaagtgcagcatacggatcttcacagtagcccaattagaagacaacagtatccaaatgaagaaggacctagccaccttcctatatcacttacgcattgaggcggaggtagaagtggtggagatgcatgacagtgatatatcagcatatacttacgagcgcactttgatgatggaacaaaggtcccagatgctccggcacatgcggctatccaaaacagagcgagacagagaggcacaattggtgaaagaccgaaactcaatgctacgattgaccagcattggctctgatgaggacgaagagacagaaacctatcaggagaaggtgcacatgacttggacaaaagacaagtacatggcatcccggggacaaaaagcgaagtcaatggaaggattccaggacctgcttaacatgcgtccggaccagtccaatgtgaggcggatgcatacagcagtgaaactcaacgaggttatagttaacaagtcccatgaagcaaagctggttttattgaatatgccagggccaccccgaaaccctgagggtgatgaaaactacatggagttcctagaggtgcttaccgagggactagagcgagtcctacttgtccggggtggtggcagtgaagtgatcaccatttattcataacctactctgaatgaccgtgcttgacctgttttcttaaaaggcctacgtcctccatggaagtgccagctcattactaccactcccactcaactagaagcctgtgttctgtacacatcatactgaactcttgatgagctgagcctcaagtacctgtgtaaaagagctcccatctgatctgcagtcattacagaaaaagcaaatattccctcaacatcagaacaatgctcaagtctttcaagccacgtctgagcagtcaaaggcaaattagaattaacaagctgagccaataaatgaattggtaaaagggatgctagaaattcaactgaagaaaaaaagcaagtcaagtacgtattcagcattaaagatgaatctcagaagtcatggttcaatgttgacactgtgaggataacaactag

SEQ ID NO: 153084 - DNA, 3300 bp, Artificial Sequence
  derived and/or modified sequence
atgccccacttcaccgtgaccaaggtggaggaccccgaggagggcgccgccgccagcatcagccaggagcccagcctggccgacatcaaggccagaatccaggacagcgacgagcccgacctgagccagaacagcatcaccggcgagcacagccagctgctggacgacggccacaagaaggccagaaacgcctacctgaacaacagcaactacgaggagggcgacgagtacttcgacaagaacctggccctgttcgaggaggagatggacaccagacccaaggtgagcagcctgctgaacagaatggccaactacaccaacctgacccagggcgccaaggagcacgaggaggccgagaacatcaccgagggcaagaagaagcccaccaagaccccccagatgggcaccttcatgggcgtgtacctgccctgcctgcagaacatcttcggcgtgatcctgttcctgagactgacctgggtggtgggcaccgccggcgtgctgcaggccttcgccatcgtgctgatctgctgctgctgcaccatgctgaccgccatcagcatgagcgccatcgccaccaacggcgtggtgcccgccggcggcagctacttcatgatcagcagagccctgggccccgagttcggcggcgccgtgggcctgtgcttctacctgggcaccaccttcgccgccgccatgtacatcctgggcgccatcgagatcttcctggtgtacatcgtgcccagagccgccatcttccacagcgacgacgccctgaaggagagcgccgccatgctgaacaacatgagagtgtacggcaccgccttcctggtgctgatggtgctggtggtgttcatcggcgtgagatacgtgaacaagttcgccagcctgttcctggcctgcgtgatcgtgagcatcctggccatctacgccggcgccatcaagagcagcttcgcccccccccacttccccgtgtgcatgctgggcaacagaaccctgagcagcagacacatcgacgtgtgcagcaagaccaaggagatcaacaacatgaccgtgcccagcaagctgtggggcttcttctgcaacagcagccagttcttcaacgccacctgcgacgagtacttcgtgcacaacaacgtgaccagcatccagggcatccccggcctggccagcggcatcatcaccgagaacctgtggagcaactacctgcccaagggcgagatcatcgagaagcccagcgccaagagcagcgacgtgctgggcagcctgaaccacgagtacgtgctggtggacatcaccaccagcttcaccctgctggtgggcatcttcttccccagcgtgaccggcatcatggccggcagcaacagaagcggcgacctgaaggacgcccagaagagcatccccatcggcaccatcctggccatcctgaccaccagcttcgtgtacctgagcaacgtggtgctgttcggcgcctgcatcgagggcgtggtgctgagagacaagttcggcgacgccgtgaagggcaacctggtggtgggcaccctgagctggcccagcccctgggtgatcgtgatcggcagcttcttcagcacctgcggcgccggcctgcagagcctgaccggcgcccccagactgctgcaggccatcgccaaggacaacatcatccccttcctgagagtgttcggccacagcaaggccaacggcgagcccacctgggccctgctgctgaccgccgccatcgccgagctgggcatcctgatcgccagcctggacctggtggcccccatcctgagcatgttcttcctgatgtgctacctgttcgtgaacctggcctgcgccctgcagaccctgctgagaacccccaactggagacccagattcagatactaccactgggccctgagcttcatgggcatgagcatctgcctggccctgatgttcatcagcagctggtactacgccatcgtggccatggtgatcgccggcatgatctacaagtacatcgagtaccagggcgccgagaaggagtggggcgacggcatcagaggcctgagcctgagcgccgccagattcgccctgctgagactggaggagggccccccccacaccaagaactggagaccccagctgctggtgctgctgaagctggacgaggacctgcacgtgaagcaccccagactgctgaccttcgccagccagctgaaggccggcaagggcctgaccatcgtgggcagcgtgatcgtgggcaacttcctggagaactacggcgaggccctggccgccgagcagaccatcaagcacctgatggaggccgagaaggtgaagggcttctgccagctggtggtggccgccaagctgagagagggcatcagccacctgatccagagctgcggcctgggcggcatgaagcacaacaccgtggtgatgggctggcccaacggctggagacagagcgaggacgccagagcctggaagaccttcatcggcaccgtgagagtgaccaccgccgcccacctggccctgctggtggccaagaacatcagcttcttccccagcaacgtggagcagttcagcgagggcaacatcgacgtgtggtggatcgtgcacgacggcggcatgctgatgctgctgcccttcctgctgaagcagcacaaggtgtggagaaagtgcagcatcagaatcttcaccgtggcccagctggaggacaacagcatccagatgaagaaggacctggccaccttcctgtaccacctgagaatcgaggccgaggtggaggtggtggagatgcacgacagcgacatcagcgcctacacctacgagagaaccctgatgatggagcagagaagccagatgctgagacacatgagactgagcaagaccgagagagacagagaggcccagctggtgaaggacagaaacagcatgctgagactgaccagcatcggcagcgacgaggacgaggagaccgagacctaccaggagaaggtgcacatgacctggaccaaggacaagtacatggccagcagaggccagaaggccaagagcatggagggcttccaggacctgctgaacatgagacccgaccagagcaacgtgagaagaatgcacaccgccgtgaagctgaacgaggtgatcgtgaacaagagccacgaggccaagctggtgctgctgaacatgcccggcccccccagaaaccccgagggcgacgagaactacatggagttcctggaggtgctgaccgagggcctggagagagtgctgctggtgagaggcggcggcagcgaggtgatcaccatctacagctag

SEQ ID NO: 153085 - protein, 550 aa, Artificial Sequence
  derived and/or modified sequence
MVPKADSGAFLLLFLLVLTVTEPLRPELRCNPGQFACRSGTIQCIPLPWQCDGWATCEDESDEANCPEVTGEVRPHHGKEAVDPRQGRARGGDPSHFHAVNVAQPVRFSSFLGKCPTGWHHYEGTASCYRVYLSGENYWDAAQTCQRLNGSLATFSTDQELRFVLAQEWDQPERSFGWKDQRKLWVGYQYVITGRNRSLEGRWEVAFKGSSEVFLPPDPIFASAMSENDNVFCAQLQCFHFPTLRHHDLHSWHAESCYEKSSFLCKRSQTCVDIKDNVVDEGFYFTPKGDDPCLSCTCHGGEPEMCVAALCERPQGCQQYRKDPKECCKFMCLDPDGNSLFDSMASGMRLVVSCISSFLILSLLLFMVHRLRQRRRERIESLIGANLHHFNLGRRIPGFDYGPDGFGTGLTPLHLSDDGEGGTFHFHDPPPPYTAYKYPDIGQPDDPPPPYEASIHPDSVFYDPADDDAFEPVEVSLPAPGDGGSEGALLRRLEQPLPTAGASLADLEDSADSSSALLVPPDPAQSGSTPAAEALPGGGRHSRSSLNTVV

SEQ ID NO: 153086 - protein, 327 aa, Artificial Sequence
  derived and/or modified sequence
MVPKADSGAFLLLFLLVLTVTEPLRPELRCNPGQFACRSGTIQCIPLPWQCDGWATCEDESDEANCPEVTGEVRPHHGKEAVDPRQGRARGGDPSHFHAVNVAQPVRFSSFLGKCPTGWHHYEGTASCYRVYLSGENYWDAAQTCQRLNGSLATFSTDQELRFVLAQEWDQPERSFGWKDQRKLWVGYQYVITGRNRSLEGRWEVAFKGSSEVFLPPDPIFASAMSENDNVFCAQLQCFHFPTLRHHDLHSWHAESCYEKSSFLCKRSQTCVDIKDNVVDEGFYFTPKGDDPCLSCTCHGGEPEMCVAALCERPQGCSPLSCTARAT

SEQ ID NO: 153087 - DNA, 1653 bp, Artificial Sequence
  derived and/or modified sequence
atggtgcctaaagccgactccggagcattcctgctgttattcctcttagttctaaccgttaccgaaccgttacggcctgaactgaggtgtaatcccgggcaatttgcctgcaggagcggtacaatccagtgtattccgctcccttggcagtgcgacgggtgggccacctgcgaggacgaatccgatgaagctaattgccctgaagtcacaggcgaggtcaggcctcaccacgggaaggaggctgtagatcccagacagggccgagctcgtggaggggatccgtcccacttccatgccgttaatgtagctcagcctgtcaggttttcttccttcctgggtaagtgtcccacggggtggcaccactatgaagggaccgccagttgctatagagtgtacttaagcggggagaattactgggatgctgcccagacctgccagcgcctgaatgggtccctggcaacatttagcacggaccaagaattgcgtttcgtcttggcacaagagtgggaccagcctgaacgatctttcggttggaaagaccagcggaagctctgggtgggctaccagtacgtgataactggacggaataggagcctggaggggagatgggaggtcgcttttaaaggatccagcgaagtgttcctgccccctgatcctatttttgcctccgctatgtcggaaaatgataatgttttttgcgcccagctccagtgcttccattttcctactcttcgacatcacgaccttcactcttggcatgcagagtcctgttacgaaaagtcttctttcctttgcaagcggtcgcagacctgcgtcgacattaaggataatgtcgttgacgagggtttttatttcacacccaaaggcgacgacccttgcctgagctgtacctgccacggcggcgaacccgagatgtgtgtagccgctctgtgcgaacggccccaagggtgccagcaatatcggaaggacccaaaggaatgttgcaagtttatgtgccttgaccccgatggcaactcactcttcgacagtatggcgtcaggaatgcgtctcgttgtgtcctgtatcagtagtttcctgatcctgtccctgcttttgttcatggttcacaggcttaggcaaaggcgccgcgagaggattgagagtcttattggtgccaacctgcatcatttcaacctggggagacgaatcccaggtttcgattacggtccagatggctttggcaccggactgacacctctgcatctgagtgatgacggagaaggggggactttccatttccatgatcccccacctccctatactgcatataagtatcctgacataggacagccggatgatccaccccctccctatgaagcttccatccatcctgattctgtgttctatgatcccgcggacgacgacgcatttgagccggtcgaagtgagcttgccagcccccggcgacggcggctccgaaggcgcactgttgcgccgactggagcagccactgccaacagctggcgcctcactcgctgacctagaggactcggcagactcttcctccgcgctgctggtccccccggaccccgctcagtccggtagcacccctgcagctgaggccctgcctggaggtgggcgccacagtcgatccagtctcaatacggtcgtttag

SEQ ID NO: 153088 - DNA, 984 bp, Artificial Sequence
  derived and/or modified sequence
atggtgcctaaagccgatagtggggcctttctgctcctttttctcctggttctcacagtgacagagcccctgcgccctgaactgcgatgcaatcctggccaatttgcttgtaggagtggcaccatccagtgcattccgctcccctggcagtgcgacggttgggctacctgtgaggacgagtctgacgaggcgaattgccctgaagtgactggcgaggtgcgaccacaccacgggaaggaggccgtcgatccacggcaaggacgcgctagggggggggatccttctcatttccatgctgtgaacgtcgctcagcctgtacgattttcttctttcctggggaagtgccccacaggttggcatcactatgaggggaccgcaagctgctacagagtatacctctcaggagaaaactactgggatgccgctcagacctgtcagagactgaatggttctctggcaacgttttcaactgatcaggagctccgttttgtactggcccaagagtgggaccagcccgagcggtccttcggctggaaagatcagaggaaactctgggtgggctaccagtatgtgataactgggagaaaccgcagcctggaaggtagatgggaggttgcttttaaggggtcctccgaagtatttcttcctcccgaccctatcttcgccagtgcaatgtccgaaaatgacaacgtgttttgcgcccaactccagtgctttcatttccccacacttcgacatcatgatctgcacagctggcacgccgaaagttgctacgaaaaaagctcatttctatgtaagcggtcccagacctgtgtggatattaaggacaacgtggtcgatgagggcttttacttcactcctaagggtgatgacccctgcctgtcctgtacctgccatgggggggaacccgaaatgtgcgtggccgcactgtgcgagcgcccccagggctgcagcccgctcagttgtacagcaagagccacctag

SEQ ID NO: 153089 - DNA, 1653 bp, Artificial Sequence
  derived and/or modified sequence
atggtgcccaaggctgacagcggggccttcctgctgctcttcctgctggtgctgactgtgacagagcccctgcggcctgagctgcgctgcaaccctggccagtttgcctgccgcagcggcaccatccagtgcatccccctgccctggcagtgtgatggctgggccacctgtgaagatgaaagtgatgaggccaactgcccagaggtgactggagaggtgcggccccaccacggcaaggaggccgtggacccccggcagggccgggcccggggcggggaccccagccacttccacgctgtgaatgtggcccagcctgtgcgcttcagcagcttcctgggcaagtgccccaccggctggcaccactatgagggcacagccagctgctacagagtgtacctgagcggggagaactactgggatgctgcccagacctgccagaggctgaatggcagcctggccaccttcagcacagaccaggagctgcgctttgtgctggcccaggagtgggaccagcctgagaggagctttggctggaaggaccagaggaagctgtgggtgggctaccagtatgtgatcactggaagaaacagaagcctggagggccgctgggaggtggccttcaagggcagcagcgaggtgttcctgcccccagaccccatctttgccagcgccatgtctgaaaatgacaacgtgttctgtgcccagctgcagtgcttccacttccccaccctgcggcaccacgacctgcacagctggcacgccgagagctgctatgagaagagcagcttcctgtgcaagaggagccagacctgtgtggacatcaaggacaacgtggtggatgagggcttctacttcacccccaagggagatgacccctgcctgagctgcacctgccacggcggggagcctgagatgtgtgtggccgccctgtgtgagcggccccagggctgccagcagtacaggaaggaccccaaggagtgctgcaagttcatgtgcctggaccctgatggcaacagcctgtttgacagcatggccagcggcatgaggctggtggtgtcctgcatcagcagcttcctgatcctgagcctgctgctcttcatggtgcaccggctgcggcagaggagaagagaaagaattgagagcctgattggagccaacctgcaccacttcaacctgggccgccgcatccctggctttgattatggcccagatggcttcggcaccggcctgacccccctgcacctgagtgatgatggagagggcggcaccttccacttccatgaccccccaccaccctacacagcctacaagtacccagacatcggccagccagatgatcctcctccaccctatgaggccagcatccacccagattctgtgttctatgaccctgcagatgatgatgcctttgagcctgtggaggtgtccctgcctgcccctggagatggcggcagcgagggcgccctgctgcggcggctggagcagcccctgcccacagctggggccagcctggccgacctggaggacagcgctgacagcagcagcgccctgctggtgcccccagaccctgcccagagcggcagcaccccagctgctgaggccctgcccggcggcggccgccacagccgcagcagcctgaacacagtggtgtag

SEQ ID NO: 153090 - DNA, 984 bp, Artificial Sequence
  derived and/or modified sequence
atggtgcccaaggctgacagcggggccttcctgctgctcttcctgctggtgctgactgtgacagagcccctgcggcctgagctgcgctgcaaccctggccagtttgcctgccgcagcggcaccatccagtgcatccccctgccctggcagtgtgatggctgggccacctgtgaagatgaaagtgatgaggccaactgcccagaggtgactggagaggtgcggccccaccacggcaaggaggccgtggacccccggcagggccgggcccggggcggggaccccagccacttccacgctgtgaatgtggcccagcctgtgcgcttcagcagcttcctgggcaagtgccccaccggctggcaccactatgagggcacagccagctgctacagagtgtacctgagcggggagaactactgggatgctgcccagacctgccagaggctgaatggcagcctggccaccttcagcacagaccaggagctgcgctttgtgctggcccaggagtgggaccagcctgagaggagctttggctggaaggaccagaggaagctgtgggtgggctaccagtatgtgatcactggaagaaacagaagcctggagggccgctgggaggtggccttcaagggcagcagcgaggtgttcctgcccccagaccccatctttgccagcgccatgtctgaaaatgacaacgtgttctgtgcccagctgcagtgcttccacttccccaccctgcggcaccacgacctgcacagctggcacgccgagagctgctatgagaagagcagcttcctgtgcaagaggagccagacctgtgtggacatcaaggacaacgtggtggatgagggcttctacttcacccccaagggagatgacccctgcctgagctgcacctgccacggcggggagcctgagatgtgtgtggccgccctgtgtgagcggccccagggctgcagccccctgagctgcacagcccgggccacctag

SEQ ID NO: 153091 - DNA, 1653 bp, Artificial Sequence
  derived and/or modified sequence
atggtgcccaaggccgacagcggcgccttcctgctgctgttcctgcttgtgttaaccgtgaccgagccgttaagacctgagcttagatgcaacccagggcagttcgcctgcagatccggcaccatccagtgcatacctctgccttggcagtgcgacggctgggctacctgtgaagatgagagcgatgaagccaactgcccagaggtaacgggagaagtgagaccccaccatggcaaagaagccgtagatcctcggcagggaagggcaagaggcggcgatccatcgcactttcacgccgtgaacgtggctcaacctgtgagatttagctcttttctgggaaagtgcccaaccggctggcaccactatgaaggtactgcttcgtgctatagagtgtatctctcaggggagaactactgggatgcagctcagacttgccaacgcttaaacggatccctcgccacattttcaaccgatcaagaactaaggttcgttttggcccaggaatgggatcagcctgagagaagttttggatggaaggaccagagaaaactctgggttggatatcagtacgttataaccggacgaaataggtctctggagggacgatgggaggtcgctttcaaaggaagttctgaggtttttttgcccccagatccgatctttgcttccgccatgtcagagaacgataatgtgttttgtgctcagcttcaatgcttccacttccctaccctgagacatcacgatcttcactcttggcacgctgaatcctgttatgaaaagagcagcttcctgtgtaagcgatctcaaacctgtgtggatataaaggacaacgtagtagatgaagggttctactttacccctaagggagatgacccttgcctttcttgtacatgccatggaggggaaccggaaatgtgcgtggctgccttatgtgagcgaccccagggatgccaacagtacagaaaggatccgaaggaatgctgtaaattcatgtgtttagatcccgacgggaatagccttttcgattccatggcctctgggatgaggctggtggttagttgcatctcctcattcctcatacttagtctgctcttgtttatggtgcacaggcttcgccaacgccgccgtgagaggatcgaatctctcataggagctaatctccaccatttcaacctgggccggcggattcccggattcgactacggccccgatggcttcggcacaggcttaacccctctgcacctgagcgacgacggagagggaggtactttccattttcacgatccccctcctccttacaccgcctataagtacccggacatcgggcagcctgacgatccaccacctccgtatgaagcctccatccacccggattcggtattttatgacccagctgatgatgacgccttcgaacccgtcgaagtgtccttacccgctcctggagacggagggagtgaaggagctttactgagaagattggagcagccccttccaactgcgggtgcatcactggccgatctggaagacagcgccgattcctccagcgctctgctcgtacctcccgaccctgcgcagtccggatctacccctgctgccgaagcactcccgggcgggggcagacatagccgctctagtctcaataccgtggtctag

SEQ ID NO: 153092 - DNA, 984 bp, Artificial Sequence
  derived and/or modified sequence
atggtgcccaaggccgacagcggcgccttcctgctgctgttcctgctggtactaaccgtgacagaacctcttcgccctgagctgcggtgcaatcctggccagttcgcttgccggtcaggtactattcaatgtattccccttccctggcaatgcgacgggtgggccacatgcgaggacgagtccgacgaggcgaattgtcccgaagtcactggcgaagtacggcctcatcacggtaaggaagcggtggacccacggcaaggcagggccagaggcggagatccatcacattttcacgcagtgaatgtcgcccaacctgtccgcttcagtagtttcctgggcaagtgtccaaccggctggcaccactacgaggggaccgcatcctgttatagagtgtatcttagcggtgaaaactactgggatgcagcacagacatgccagcgtctgaatggatccctggcgacgtttagcaccgatcaagagttgagatttgtacttgcccaagagtgggaccagccagagcggtcattcggatggaaagatcagcggaagctgtgggtgggttatcagtacgttatcaccggacgcaaccggagcctggaggggaggtgggaagtggcctttaagggaagcagcgaagtttttcttccaccagacccaatcttcgcttctgcgatgtcagagaatgacaacgttttttgcgcacaattgcagtgctttcatttcccaacacttaggcaccatgacttacactcttggcatgcagaaagctgctatgagaagtcttcgttcctttgcaagagatcccagacatgtgtggacataaaagacaacgtagtggatgaggggttctacttcacccccaaaggagacgacccttgcctgtcctgcacatgtcatggaggcgaacccgagatgtgtgtggcggccctatgcgagcggcctcaaggttgttctccactcagctgcaccgcgagggcgacttag

SEQ ID NO: 153093 - DNA, 1653 bp, Artificial Sequence
  derived and/or modified sequence
atggtcccaaaggctgactctggagccttccttctgttgttcctgctggtgctgactgtcacagagcctctgcgccctgagttgcgttgcaatcccggacaattcgcatgtagaagcgggaccattcaatgcatccccttgccgtggcagtgcgacggatgggcaacctgcgaagatgagtctgacgaggctaactgtccagaagtgacaggggaagtcagaccgcaccacgggaaagaagctgtggatccaagacagggccgagccagggggggagatccttcccactttcacgccgtgaacgtcgcacagcctgtgcgctttagtagcttcctgggcaaatgccctactggatggcatcattatgaaggaaccgcaagctgctacagggtgtatctctccggagaaaactattgggatgctgctcagacctgtcagaggctaaacggatctctggccacgttctctacggaccaagagttgaggtttgtgctcgcccaggagtgggaccagcctgagagaagttttgggtggaaagaccagcgcaaactttgggtgggctatcagtatgtgattactgggcgaaacaggtctctagagggcagatgggaggtggcatttaaggggagcagcgaggtattcctgccacccgacccaatttttgcctccgcgatgtctgaaaatgataacgtcttctgtgctcaactacagtgtttccattttcctacattgcgacaccacgacctgcatagctggcacgcagaatcctgctacgagaagagctcattcctctgcaagaggtcccagacttgcgtagatatcaaagataatgttgtggacgaagggttttacttcacccctaagggcgacgacccttgcttgtcatgtacttgccacggcggagaacccgagatgtgcgtggcagccctatgtgaaagacctcaggggtgccagcagtacagaaaggaccctaaggaatgctgcaagtttatgtgtctggaccccgacgggaattccctgtttgatagtatggctagtggaatgcggctggtcgtttcctgcatttcaagcttcctgattctcagtttactgctgttcatggtgcataggctccgtcaacgcagacgtgagcggatcgaatcccttattggcgctaatctgcaccatttcaatctgggccgtagaatccccggatttgattacggccctgacggcttcgggacggggctaacccctctgcacttgagtgacgatggagagggcggtacctttcactttcacgaccccccacccccttatacagcctataaataccccgatattggacaacccgacgatccgccaccaccatatgaggcaagcattcatccagattctgtattttacgacccggcagacgatgacgccttcgagcccgtggaggttagtctgcccgcacctggtgacggtggctccgaaggtgctctgcttcgtcgtctggagcagccgttgcccacagcgggagcatccctggccgacctggaggacagcgccgacagcagctctgccttgcttgtgcctcccgatcctgcacagagcggttcaactcctgctgctgaggctctgcccggagggggtcgtcactcccgctcttctcttaataccgtggtttag

SEQ ID NO: 153094 - DNA, 984 bp, Artificial Sequence
  derived and/or modified sequence
atggtacctaaagccgatagtggggcattcctactactgttcctgttggtgcttaccgtgaccgaaccactgaggccagaactgcgttgcaatcctggccaatttgcctgcaggtccgggactatacaatgcatcccacttccatggcagtgcgacgggtgggctacttgtgaagatgagagcgatgaggctaattgccctgaggtcacgggcgaagtacggccacaccacggcaaggaagctgtcgaccctcgtcagggcagggcaaggggcggagacccttcccatttccacgccgtgaacgtcgcgcaacccgttcggttcagttcgttcctaggaaaatgtccaacaggatggcatcactacgaagggaccgcctcatgctacagagtgtatctgtctggggaaaactattgggacgccgctcaaacatgtcagagactaaacggcagtctcgctactttttccacagaccaagagctgcgtttcgtcctggcacaggaatgggatcagcctgaacgcagtttcggatggaaggaccagagaaagctctgggttggctatcagtatgtaatcaccggcaggaataggtctctggaaggacgatgggaggtagcctttaagggatcgagtgaagttttcttaccccctgaccctatcttcgcgagtgccatgagtgaaaatgacaatgttttttgtgcacagctacagtgctttcatttccccaccctccgccaccatgatctgcacagctggcatgcagaaagctgctacgaaaaatcatcctttctgtgtaagcgtagtcagacttgtgtagacattaaggataatgtcgttgacgagggcttttatttcacacccaagggcgatgatccatgcctctcctgcacttgtcatggaggcgagccagaaatgtgcgtggcggcactctgcgagaggccacaggggtgcagtcccctttcttgcaccgcccgagcgacatag

SEQ ID NO: 153095 - DNA, 1653 bp, Artificial Sequence
  derived and/or modified sequence
atggtgcccaaggccgacagcggcgccttcctgctgctgttcctgctggtgctgaccgtgaccgagcccctgagacccgagctgagatgcaaccccggccagttcgcctgcagaagcggcaccatccagtgcatccccctgccctggcagtgcgacggctgggccacctgcgaggacgagagcgacgaggccaactgccccgaggtgaccggcgaggtgagaccccaccacggcaaggaggccgtggaccccagacagggcagagccagaggcggcgaccccagccacttccacgccgtgaacgtggcccagcccgtgagattcagcagcttcctgggcaagtgccccaccggctggcaccactacgagggcaccgccagctgctacagagtgtacctgagcggcgagaactactgggacgccgcccagacctgccagagactgaacggcagcctggccaccttcagcaccgaccaggagctgagattcgtgctggcccaggagtgggaccagcccgagagaagcttcggctggaaggaccagagaaagctgtgggtgggctaccagtacgtgatcaccggcagaaacagaagcctggagggcagatgggaggtggccttcaagggcagcagcgaggtgttcctgccccccgaccccatcttcgccagcgccatgagcgagaacgacaacgtgttctgcgcccagctgcagtgcttccacttccccaccctgagacaccacgacctgcacagctggcacgccgagagctgctacgagaagagcagcttcctgtgcaagagaagccagacctgcgtggacatcaaggacaacgtggtggacgagggcttctacttcacccccaagggcgacgacccctgcctgagctgcacctgccacggcggcgagcccgagatgtgcgtggccgccctgtgcgagagaccccagggctgccagcagtacagaaaggaccccaaggagtgctgcaagttcatgtgcctggaccccgacggcaacagcctgttcgacagcatggccagcggcatgagactggtggtgagctgcatcagcagcttcctgatcctgagcctgctgctgttcatggtgcacagactgagacagagaagaagagagagaatcgagagcctgatcggcgccaacctgcaccacttcaacctgggcagaagaatccccggcttcgactacggccccgacggcttcggcaccggcctgacccccctgcacctgagcgacgacggcgagggcggcaccttccacttccacgaccccccccccccctacaccgcctacaagtaccccgacatcggccagcccgacgaccccccccccccctacgaggccagcatccaccccgacagcgtgttctacgaccccgccgacgacgacgccttcgagcccgtggaggtgagcctgcccgcccccggcgacggcggcagcgagggcgccctgctgagaagactggagcagcccctgcccaccgccggcgccagcctggccgacctggaggacagcgccgacagcagcagcgccctgctggtgccccccgaccccgcccagagcggcagcacccccgccgccgaggccctgcccggcggcggcagacacagcagaagcagcctgaacaccgtggtgtag

SEQ ID NO: 153096 - DNA, 984 bp, Artificial Sequence
  derived and/or modified sequence
atggtgcccaaggccgacagcggcgccttcctgctgctgttcctgctggtgctgaccgtgaccgagcccctgagacccgagctgagatgcaaccccggccagttcgcctgcagaagcggcaccatccagtgcatccccctgccctggcagtgcgacggctgggccacctgcgaggacgagagcgacgaggccaactgccccgaggtgaccggcgaggtgagaccccaccacggcaaggaggccgtggaccccagacagggcagagccagaggcggcgaccccagccacttccacgccgtgaacgtggcccagcccgtgagattcagcagcttcctgggcaagtgccccaccggctggcaccactacgagggcaccgccagctgctacagagtgtacctgagcggcgagaactactgggacgccgcccagacctgccagagactgaacggcagcctggccaccttcagcaccgaccaggagctgagattcgtgctggcccaggagtgggaccagcccgagagaagcttcggctggaaggaccagagaaagctgtgggtgggctaccagtacgtgatcaccggcagaaacagaagcctggagggcagatgggaggtggccttcaagggcagcagcgaggtgttcctgccccccgaccccatcttcgccagcgccatgagcgagaacgacaacgtgttctgcgcccagctgcagtgcttccacttccccaccctgagacaccacgacctgcacagctggcacgccgagagctgctacgagaagagcagcttcctgtgcaagagaagccagacctgcgtggacatcaaggacaacgtggtggacgagggcttctacttcacccccaagggcgacgacccctgcctgagctgcacctgccacggcggcgagcccgagatgtgcgtggccgccctgtgcgagagaccccagggctgcagccccctgagctgcaccgccagagccacctag

SEQ ID NO: 153097 - DNA, 4480 bp, Artificial Sequence
  derived and/or modified sequence
ggggcggggcggcgcggcgcggagccgagcaggacggccgccatcttgcgcgcagctggagtcggtgcctgaggttgcagccgagagtgtgcgccagcccgcggcccagccgaagctctttcccgccgcctctccgcgcctcgcccaggttcagctccgcctgaccctccgcttggcacggtcccctgaccctcagtccggcctggtccggccttccagccgccccggggacgatgaacggaggataaatggtgcccaaggcagacagcggcgccttcctgctgctcttcctgctcgtgctcactgtcaccgagccgctgcggccagagctgcggtgcaaccctgggcagtttgcgtgtcgcagcggcaccatccagtgcatccccctcccctggcagtgtgacggctgggcgacttgcgaggatgagagcgacgaagccaactgtccagaagtgaccggggaggtgcgtcctcatcatgggaaggaggctgtggatccgcggcaggggcgggccagaggaggcgacccttcgcacttccacgcggtgaacgtggcgcagcccgttcgcttcagcagtttcctagggaagtgcccgacagggtggcaccactacgaaggcacggccagctgctaccgggtctacctgagcggggagaactactgggatgccgcgcagacctgccagcgcctgaatggctctctcgccaccttctccactgaccaggagctgcgctttgtcctggcccaggaatgggaccagcccgagcggagctttggttggaaggaccagcgcaagttgtgggttggctatcagtatgttatcactggccggaaccgctccttggaaggtcgctgggaggtggcattcaaaggctcttcagaggtgttcctgcccccagaccccatctttgcctcggccatgtctgagaacgacaacgtgttctgtgcccagcttcagtgcttccatttccccaccctgcggcaccacgacctccacagctggcacgccgagagctgctacgagaagtcttcatttctgtgtaaaagaagtcaaacatgtgttgacatcaaggacaacgtggtggatgaagggttctacttcacccctaagggggacgacccatgcctgagctgcacctgccatggaggggagcctgagatgtgtgtggctgctctctgtgagaggccccagggctgccaacagtaccgcaaggaccccaaagagtgctgcaagttcatgtgtctggacccagatggcaacagtctgtttgactccatggccagcgggatgcgcctggtcgtcagctgcatctcctccttcctcatcctgtcactgctgctcttcatggtccaccggctgcgccagcggcgccgggagcgcatcgagtccctgattggagcaaacttgcaccacttcaacctcggccgcaggatccctggctttgattacggcccagacgggtttggcacgggcctcacgccgctgcatctttctgacgacggagagggtgggactttccatttccacgaccctccacctccctacacggcatacaagtacccggacatcggccagcccgacgaccctccgccgccctacgaggcctccatccacccggacagtgtgttctatgaccctgcagacgatgatgcttttgagcctgtggaggtcagcctgccagcccctggggatggtgggagtgaaggtgcattactccggcgcctggagcagcctctgcccactgcgggggcctctctggcagacctggaagactctgccgacagcagcagcgccctgctcgtgccccctgaccctgcccagagcgggagcaccccagctgcagaggcactgccagggggtggccgccacagccgcagctccctcaatactgtggtgtagacggcctggcctgtaccccaacggtctgggagcacctgtctgttgtagaaaacaccggtccctggggagacttgaaaggcccctgtcccagcctggacgccacgcactgccgcacgtcactggcgggctcgcgtgtgtacatagagaccacagcccgccttctgccaaaagaagtgatggcctgcaccgagcttccttgagggcttcagaaacatgcatagctttggatcactgtcttctcctttataaatggcagaagagtgacaaaattcattcagaccgcacatgttagaggcagggaatgaagaaggtactgtgggccatggccacacctgatgcgtttttggtgggcttacttggtgcagtgtgctgtccagagagacctgctgacccagtctgggacaggcacagtgggagctgccacagtgccccttgctggccgccctcaggagggggcctctggaccgtcagtgtggcgtaggcagtgggtctgcttcagggaggcagcctcttgactttgtcacaacggttgcactgaagatggcccccacaagcccagttgtgaatatcaaggtgaccctgcccctggctgggagctcccctggggctctggaacctgaagccctgagaaggagagcttggaaggaggttgagctcttcactgtgtctttccatctgggctctgcagcccagctctgtggcaggaggcctgaccccaccccatcagtccctctcccagcattgctgtgcatggctccctcaggaagaagctctggagtggggccgaggccccagatgctctgctggggtctggggactgagctgcctcctgtctctccactctggagccctgggctcttgcctcctgttgaattgcccctgggcctgcccccggccccatttgtgccataaagggttgcttcattgcaggaggggtggctgaaaccaccatcctgggctgcatctatctccttaaagtccactccttacatcaccgccactactgcagctcagtgcccagcggccgcatgcacacctcccggcccctcctcagcagcgcaggggctgggggcccttcctggcacccttttgcctgacggaccctgttgcctgctcctgggcagtggttttgttgcctgacacagggcctttaacatttctgaggtttggagattaagcgggttctgtgcgatttttagcacatccatatcttttctacgttgaatgtctggatctttcctttgtatgtttgtgtctctgtgtgtgtatgtggccaagcgtctgcaggtgagggtggcacatggaacttcacgggtcactgggggcccactcttccagggtcatcgatgcatcctgggctgtgctgaggcagtgctgtctcgctcagtctttccagaccagcggggcagcacctgggaggcctgtctgaagcatgcagttctgtggtgctgctcggggatggactccatgcacagtccacttcttgacacattctcacactgtggctggagacccattttttccatcccatgtggaatgagaatcttgagttgcccacagacagacttgacctttgtgccagaactgtccagagctgtgagttttgttactgaattgcctgtccctgagcttggcctgctggagcatgatgctggaggctgtgtgcgggcaggcttgtgctccccttggagaagggctgctacttaacaaggaagtcctggccacaggagtcccctactggctgcagaggacgaagcaggaagcatgccgtggatcccacatgcactggggcagggcagccaggttccagagcagcaggcatgtgcattatgggtgccaggtggccagtgagggcccgaggaccacgcagcagagtcccccacgggcctgagcctgagagctcagaggattcctgccaggcctcagaactgtgtgtgcgggacagggtggctggcacgagatgtgtgggactgggacgcttcctttggggaccagaggaacattaggggccggtcagacacgtagggggcagtgaggaaacggggtaaagtggaccatgcaggctgcagagggtgggccttgggctggccggggttgctgggtggccccttccccatgggcctccacaagcactcaggccactggcacgttgggccaggcagaaggtccacatggcagggctgcctggaacaccgctgccactgtggctccaggaggcccttgggagcatgaggagagctggactcgctcatctgttcttgcaccaccatccagaatgccccctttgcaaggcctgctgcagtccccagtctgaccagcaagtcccggggtcacccttgctgaaccttgtgctccaggggtcctcctcctctaggaccagcttgccacggtttctcagagcccaggtgccctctgacctgccatgcggaggtgggatttgatactgtacattgtcttgatgcctgtttttttatgttttcattaagggtttttagtttttggttgggttgacactaacttttcttaagatgctgtgagaatcatttcatccaaatgccaaataaacttgtgttccggaa

SEQ ID NO: 153098 - DNA, 1135 bp, Artificial Sequence
  derived and/or modified sequence
atggtgcccaaggcagacagcggcgccttcctgctgctcttcctgctcgtgctcactgtcaccgagccgctgcggccagagctgcggtgcaaccctgggcagtttgcgtgtcgcagcggcaccatccagtgcatccccctcccctggcagtgtgacggctgggcgacttgcgaggatgagagcgacgaagccaactgtccagaagtgaccggggaggtgcgtcctcatcatgggaaggaggctgtggatccgcggcaggggcgggccagaggaggcgacccttcgcacttccacgcggtgaacgtggcgcagcccgttcgcttcagcagtttcctagggaagtgcccgacagggtggcaccactacgaaggcacggccagctgctaccgggtctacctgagcggggagaactactgggatgccgcgcagacctgccagcgcctgaatggctctctcgccaccttctccactgaccaggagctgcgctttgtcctggcccaggaatgggaccagcccgagcggagctttggttggaaggaccagcgcaagttgtgggttggctatcagtatgttatcactggccggaaccgctccttggaaggtcgctgggaggtggcattcaaaggctcttcagaggtgttcctgcccccagaccccatctttgcctcggccatgtctgagaacgacaacgtgttctgtgcccagcttcagtgcttccatttccccaccctgcggcaccacgacctccacagctggcacgccgagagctgctacgagaagtcttcatttctgtgtaaaagaagtcaaacatgtgttgacatcaaggacaacgtggtggatgaagggttctacttcacccctaagggggacgacccatgcctgagctgcacctgccatggaggggagcctgagatgtgtgtggctgctctctgtgagaggccccagggctgcagccctctctcctgcacggccagagcgacttagctgggccctgctctgcctgccctgtggccatgcttccatgggctcctgactctcctagggccttcttctggaaagtgctcaagaaccgagacactatcaccaaaactggagactctgggaataggatgtcatgtgttaagcatcagaatgt

SEQ ID NO: 153099 - protein, 323 aa, Artificial Sequence
  derived and/or modified sequence
MASIWVGHRGTVRDYPDFSPSVDAEAIQKAIRGIGTDEKMLISILTERSNAQRQLIVKEYQAAYGKELKDDLKGDLSGHFEHLMVALVTPPAVFDAKQLKKSMKGAGTNEDALIEILTTRTSRQMKDISQAYYTVYKKSLGDDISSETSGDFRKALLTLADGRRDESLKVDEHLAKQDAQILYKAGENRWGTDEDKFTEILCLRSFPQLKLTFDEYRNISQKDIVDSIKGELSGHFEDLLLAIVNCVRNTPAFLAERLHRALKGIGTDEFTLNRIMVSRSEIDLLDIRTEFKKHYGYSLYSAIKSDTSGDYEITLLKICGGDD

SEQ ID NO: 153100 - protein, 134 aa, Artificial Sequence
  derived and/or modified sequence
MASIWVGHRGTVRDYPDFSPSVDAEAIQKAIRGIGTDEKMLISILTERSNAQRQLIVKEYQAAYGKELKDDLKGDLSGHFEHLMVALVTPPAVFDAKQLKKSMKGAGTNEDALIEILTTRTSRQMKDISQAYYT

SEQ ID NO: 153101 - protein, 104 aa, Artificial Sequence
  derived and/or modified sequence
MASIWVGHRGTVRDYPDFSPSVDAEAIQKAIRGIGTDEKMLISILTERSNAQRQLIVKEYQAAYGKELKDDLKGDLSGHFEHLMVALVTPPAVFDAKQLKKSMK

SEQ ID NO: 153102 - protein, 154 aa, Artificial Sequence
  derived and/or modified sequence
MASIWVGHRGTVRDYPDFSPSVDAEAIQKAIRGIGTDEKMLISILTERSNAQRQLIVKEYQAAYGKELKDDLKGDLSGHFEHLMVALVTPPAVFDAKQLKKSMKGAGTNEDALIEILTTRTSRQMKDISQAYYTVYKKSLGDDISSETSGDFRK

SEQ ID NO: 153103 - DNA, 972 bp, Artificial Sequence
  derived and/or modified sequence
atggccagcatctgggttggccatagaggcacagtgcgcgattatccggacttcagcccatcagtggatgctgaagccatccagaaggccatacgcgggattggcaccgacgagaaaatgctgataagcattctgacagaacggtccaacgcccagaggcaattgattgttaaggaataccaagcagcctatgggaaagagctcaaggacgacctgaagggcgacctgtccggccacttcgaacatctgatggtggctctcgttacccctcccgctgtcttcgacgccaagcagctaaaaaagagtatgaagggggctggaacgaacgaggacgcactgatagagatcctgacgactagaacctcccgacaaatgaaagacatctctcaggcttactacaccgtgtacaaaaaatcactgggagacgatatcagtagtgagactagtggagattttagaaaagcgctcctcaccctggcagatggcaggagggacgaaagcctgaaagtggatgagcatcttgccaagcaggatgcccagatactttacaaggccggggagaataggtggggaacggacgaggataagtttactgagattttgtgcctgcgttccttcccccagctcaaactcaccttcgatgagtatcggaacatcagtcaaaaagacatcgtggacagcattaaaggggagctgtcaggtcactttgaagatctattacttgccatagtgaattgcgtgaggaacacgcccgccttcctggccgagcggctgcatagagcactgaaaggtataggcactgatgagttcaccctaaatcggattatggtctcacgttccgagattgatttactcgacatccggactgaatttaagaagcactatggttactctctttactctgcaatcaagagtgacacgtctggtgattatgagataaccctgctgaagatctgcggcggtgacgactag

SEQ ID NO: 153104 - DNA, 405 bp, Artificial Sequence
  derived and/or modified sequence
atggctagcatctgggtgggtcatcgtgggacggtgcgagactaccccgatttcagcccaagtgtggacgctgaagccattcagaaggcgattagaggaatcggaacggatgaaaagatgctgatctcaatcctgacagagcgctccaacgcgcagcgccaacttatcgtcaaagagtaccaggctgcctatggcaaagaactgaaggatgatctgaagggcgatctttcagggcatttcgaacacctgatggtggcgttagtgaccccaccagccgtatttgacgctaaacaacttaaaaaatcaatgaagggcgcaggaacgaacgaggacgcactcatagagatactcactacaagaaccagtagacaaatgaaggacatatcccaagcctactatacttag

SEQ ID NO: 153105 - DNA, 315 bp, Artificial Sequence
  derived and/or modified sequence
atggcctccatttgggtaggacataggggcacggtgagggactatcctgatttctctcctagcgtcgacgctgaggctattcaaaaagctattagaggaatcggtactgacgagaaaatgttaatttctatccttacagaaaggtctaatgcccaaagacagctaatagtgaaagaataccaggccgcctacggaaaggaacttaaagacgatctgaaaggcgacttgtctggccattttgagcacctaatggttgcacttgtaacacctccggcagtgtttgacgccaagcagctgaagaaaagtatgaagtag

SEQ ID NO: 153106 - DNA, 465 bp, Artificial Sequence
  derived and/or modified sequence
atggcatccatttgggtcgggcatagggggaccgtccgggactacccagacttcagtccaagtgtcgatgccgaggcaatccagaaggcaatacgaggcataggaaccgatgagaagatgctgatcagtattctaaccgaacggagtaacgcgcagcggcagctgatcgtaaaggagtatcaggctgcatacggtaaggagctaaaagatgacctcaaaggcgacttgtctgggcactttgagcacctgatggtcgctctcgtgacgccacctgccgttttcgatgccaagcagctgaagaagtccatgaagggggcaggcacaaacgaagatgctctgatcgagattctgactactagaacgagtagacagatgaaggatatcagtcaggcctactatactgtgtataaaaagtcactgggggacgacatttcaagcgagaccagcggagattttaggaagtag

SEQ ID NO: 153107 - DNA, 972 bp, Artificial Sequence
  derived and/or modified sequence
atggccagcatctgggtgggccaccggggcaccgtgcgggactacccagacttcagccccagcgtggatgctgaggccatccagaaggccatccggggcatcggcacagatgagaagatgctgatcagcatcctgacagagaggagcaatgcccagaggcagctgattgtgaaggagtaccaggccgcctacggcaaggagctgaaggatgacctgaagggggacctgagcggccactttgagcacctgatggtggccctggtgaccccacctgctgtgtttgatgccaagcagctgaagaagtccatgaagggggccggcaccaatgaagatgccctgattgagatcctgaccaccaggaccagccggcagatgaaggacatcagccaggcctactacacagtgtacaagaagagcctgggagatgacatcagcagcgagaccagcggggacttcaggaaggccctgctgaccctggctgatggaagaagagatgagagcctgaaggtggatgagcacctggccaagcaggatgcccagatcctgtacaaggctggagaaaatcgctggggcacagatgaggacaagttcacagagatcctgtgcctgcgctccttcccccagctgaagctgacctttgatgagtacagaaacatcagccagaaggacatcgtggacagcatcaagggggagctgagcggccactttgaggacctgctgctggccatcgtgaactgtgtgaggaacaccccagccttcctggccgagcggctgcaccgggccctgaagggcattggaacagatgagttcaccctgaaccgcatcatggtgagccgctcagaaattgacctgctggacatcagaacagagttcaagaagcactacggctacagcctgtacagcgccatcaagagtgacaccagcggggactatgagatcaccctgctgaagatctgtggaggagatgactag

SEQ ID NO: 153108 - DNA, 405 bp, Artificial Sequence
  derived and/or modified sequence
atggccagcatctgggtgggccaccggggcaccgtgcgggactacccagacttcagccccagcgtggatgctgaggccatccagaaggccatccggggcatcggcacagatgagaagatgctgatcagcatcctgacagagaggagcaatgcccagaggcagctgattgtgaaggagtaccaggccgcctacggcaaggagctgaaggatgacctgaagggggacctgagcggccactttgagcacctgatggtggccctggtgaccccacctgctgtgtttgatgccaagcagctgaagaagtccatgaagggggccggcaccaatgaagatgccctgattgagatcctgaccaccaggaccagccggcagatgaaggacatcagccaggcctactacacctag

SEQ ID NO: 153109 - DNA, 315 bp, Artificial Sequence
  derived and/or modified sequence
atggccagcatctgggtgggccaccggggcaccgtgcgggactacccagacttcagccccagcgtggatgctgaggccatccagaaggccatccggggcatcggcacagatgagaagatgctgatcagcatcctgacagagaggagcaatgcccagaggcagctgattgtgaaggagtaccaggccgcctacggcaaggagctgaaggatgacctgaagggggacctgagcggccactttgagcacctgatggtggccctggtgaccccacctgctgtgtttgatgccaagcagctgaagaagtccatgaagtag

SEQ ID NO: 153110 - DNA, 465 bp, Artificial Sequence
  derived and/or modified sequence
atggccagcatctgggtgggccaccggggcaccgtgcgggactacccagacttcagccccagcgtggatgctgaggccatccagaaggccatccggggcatcggcacagatgagaagatgctgatcagcatcctgacagagaggagcaatgcccagaggcagctgattgtgaaggagtaccaggccgcctacggcaaggagctgaaggatgacctgaagggggacctgagcggccactttgagcacctgatggtggccctggtgaccccacctgctgtgtttgatgccaagcagctgaagaagtccatgaagggggccggcaccaatgaagatgccctgattgagatcctgaccaccaggaccagccggcagatgaaggacatcagccaggcctactacacagtgtacaagaagagcctgggagatgacatcagcagcgagaccagcggggacttcaggaagtag

SEQ ID NO: 153111 - DNA, 972 bp, Artificial Sequence
  derived and/or modified sequence
atggccagcatctgggtgggccaccggggcaccgtgcgggactaccctgacttttcgcccagtgtcgatgccgaggcaattcagaaagcaatcagaggaattggcacagacgaaaaaatgctcatatcaatcctgacggagaggtctaacgcacagcgccagctgatcgtcaaggaatatcaagccgcatacggaaaagagctgaaggacgatttgaagggcgacctatcgggccacttcgaacacttaatggtggccctggtaaccccacccgcagtgttcgacgctaagcaactgaaaaagagcatgaagggcgccggcaccaacgaagacgccctcatcgagatcctgacgactaggacttcacgccagatgaaggacatctctcaggcctattatacagtgtacaagaagagcctgggggatgacatttcatcagagacatctggcgatttccggaaagccctcctgaccctggctgacggacgacgcgatgagagtctaaaggttgacgaacacctggctaagcaggacgctcaaatcctgtacaaagcaggggagaaccgctgggggaccgatgaggataagttcacagaaatattgtgtctaaggtcattccctcagcttaaactgacctttgacgaatatcgtaatatctcacagaaagacattgtggacagcatcaaaggagaactgtcagggcacttcgaggacctcctgttggccatcgtgaactgcgtaaggaacactccagctttcttggctgagaggttgcaccgtgccctgaaggggatcgggactgacgagttcaccctaaatcgcatcatggtctcccgctcggagattgatttgttggatattcgcacagaatttaaaaagcattatggctattcgctttattccgccatcaagtctgatacctccggcgactacgaaattactctcctcaaaatatgcggaggtgacgattag

SEQ ID NO: 153112 - DNA, 405 bp, Artificial Sequence
  derived and/or modified sequence
atggccagcatctgggtgggccaccggggcaccgtgcgggactacccagactttagcccctcagttgacgccgaggctatccagaaagcaatccgcggaatcggaaccgatgagaagatgttgatttccatactgacagaaagaagcaatgcccagaggcagctgatcgtcaaggaataccaggcagcctacggcaaggagctcaaggatgatctgaagggcgaccttagcggccactttgaacacctcatggtggctctcgtcaccccgcctgccgtgttcgacgcgaaacaattaaagaagtccatgaagggggcagggacgaacgaggacgccttaatagaaattttgaccacacgcacaagtcggcagatgaaagacatcagccaggcctattacacgtag

SEQ ID NO: 153113 - DNA, 315 bp, Artificial Sequence
  derived and/or modified sequence
atggccagcatctgggtgggccaccggggcaccgtgcgggactaccctgattttagtcccagcgtagacgcagaggctattcagaaggccatccgaggtattgggacggacgaaaagatgcttatttccattctgaccgaaaggagcaacgctcagagacaacttatcgtcaaagagtaccaggcagcgtacggtaaagaattgaaggacgatctcaagggcgacctgtcaggacacttcgagcacttgatggtggccctggtgaccccccctgcagtctttgacgccaagcagctcaagaagtccatgaaatag

SEQ ID NO: 153114 - DNA, 465 bp, Artificial Sequence
  derived and/or modified sequence
atggccagcatctgggtgggccaccggggcaccgtgcgggactacccggatttcagtcctagcgtggatgcagaagccatccaaaaggccattcgcgggatcggtactgacgagaagatgctgatttccatactgactgaacgtagcaatgcacagaggcagttaatagtgaaagaataccaagctgcgtatggaaaagagctgaaagacgatctgaaaggtgatctatccggccacttcgaacacctcatggtagctcttgttactccccccgccgtctttgatgctaaacagctcaaaaaatccatgaaaggtgccggcactaatgaagacgccctgatcgagattctgaccacaagaaccagtaggcagatgaaagatatcagtcaggcatattatacagtctacaagaaaagcctcggtgacgacatctcttccgagacttcaggcgacttccggaagtag

SEQ ID NO: 153115 - DNA, 1657 bp, Artificial Sequence
  derived and/or modified sequence
attgcagtacatttgagaaagtaaaggtgtagtggaaaccgagagcgaaatgagggcgtagggagaaaagggtggggaagcttagagaccggtgagggagcagagctggggcgcctgtgtacagggatagagcccggcggcagcagggcgcggcttccctttcccggggcctggggccgcaatcaggtggagtcgagaggccggaggaggggcaggaggaaggggtgcggtcgcgatccggacccggagccagcgcggagcacctgcgcccgcggctgacaccttcgctcgcagtttgttcgcagtttactcgcacaccagtttcccccaccgcgctttggattagtgtgatctcagctcaaggcaaaggtgggatatcatggcatctatctgggttggacaccgaggaacagtaagagattatccagactttagcccatcagtggatgctgaagctattcagaaagcaatcagaggaattggaactgatgagaaaatgctcatcagcattctgactgagaggtcaaatgcacagcggcagctgattgttaaggaatatcaagcagcatatggaaaggagctgaaagatgacttgaagggtgatctctctggccactttgagcatctcatggtggccctagtgactccaccagcagtctttgatgcaaagcagctaaagaaatccatgaagggcgcgggaacaaacgaagatgccttgattgaaatcttaactaccaggacaagcaggcaaatgaaggatatctctcaagcctattatacagtatacaagaagagtcttggagatgacattagttccgaaacatctggtgacttccggaaagctctgttgactttggcagatggcagaagagatgaaagtctgaaagtggatgagcatctggccaaacaagatgcccagattctctataaagctggtgagaacagatggggcacggatgaagacaaattcactgagatcctgtgtttaaggagctttcctcaattaaaactaacatttgatgaatacagaaatatcagccaaaaggacattgtggacagcataaaaggagaattatctgggcattttgaagacttactgttggccatagttaattgtgtgaggaacacgccggcctttttagccgaaagactgcatcgagccttgaagggtattggaactgatgagtttactctgaaccgaataatggtgtccagatcagaaattgaccttttggacattcgaacagagttcaagaagcattatggctattccctatattcagcaattaaatcggatacttctggagactatgaaatcacactcttaaaaatctgtggtggagatgactgaaccaagaagataatctccaaaggtccacgatgggctttcccaacagctccaccttacttcttctcatactatttaagagaacaagcaaatataaacagcaacttgtgttcctaacaggaattttcattgttctataacaacaacaacaaaagcgattattattttagagcatctcatttataatgtagcagctcataaatgaaattgaaaatggtattaaagatctgcaactactatccaacttatatttctgctttcaaagttaagaatctttatagttctactccattaaatataaagcaagat

SEQ ID NO: 153116 - DNA, 567 bp, Artificial Sequence
  derived and/or modified sequence
cctcctcaaagagcagatgtgtctttataacagactgtaggcttggagccttgtaaaatgtacatggagtttcacaatcaagcacaaggaatccaactgaaggcagctaaactttgtgttgatttgattagtgtgatctcagctcaaggcaaaggtgggatatcatggcatctatctgggttggacaccgaggaacagtaagagattatccagactttagcccatcagtggatgctgaagctattcagaaagcaatcagaggaattggaactgatgagaaaatgctcatcagcattctgactgagaggtcaaatgcacagcggcagctgattgttaaggaatatcaagcagcatatggaaaggagctgaaagatgacttgaagggtgatctctctggccactttgagcatctcatggtggccctagtgactccaccagcagtctttgatgcaaagcagctaaagaaatccatgaagggcgcgggaacaaacgaagatgccttgattgaaatcttaactaccaggacaagcaggcaaatgaaggatatctctcaagcctattatacag

SEQ ID NO: 153117 - DNA, 545 bp, Artificial Sequence
  derived and/or modified sequence
actcgcacaccagtttcccccaccgcgctttggctagcagcgtaagggatccacttagccatctcggcctccccagtcctaaaggtctaggggacagaaaaaagctgggagtcggaaggttcctcgggtccccggcatggcagacggggctggctcagaggtctgctctgtggacttggaatcgcacccatcctattagtgtgatctcagctcaaggcaaaggtgggatatcatggcatctatctgggttggacaccgaggaacagtaagagattatccagactttagcccatcagtggatgctgaagctattcagaaagcaatcagaggaattggaactgatgagaaaatgctcatcagcattctgactgagaggtcaaatgcacagcggcagctgattgttaaggaatatcaagcagcatatggaaaggagctgaaagatgacttgaagggtgatctctctggccactttgagcatctcatggtggccctagtgactccaccagcagtctttgatgcaaagcagctaaagaaatccatgaagg

SEQ ID NO: 153118 - DNA, 880 bp, Artificial Sequence
  derived and/or modified sequence
ctcgaccctgggcagggctggcggctggcgcccgcgcccggccccaacccagctgcgtgggtggggagctggagggacctcagtcctgcatttcagagtcgaggagactgggcccacgggggggaaagtgccgtgccatgggtgggtcacccaggtcttggtggggcccaagctgatactcagctgtcctcgctccctgaaagcttcgcttattacagctagcagcgtaagggatccacttagccatctcggcctccccagtcctaaaggtctaggggacagaaaaaagctgggagtcggaaggttcctcgggtccccggcatggcagacggggctggctcagaggtctgctctgtggacttggaatcgcacccatcctattagtgtgatctcagctcaaggcaaaggtgggatatcatggcatctatctgggttggacaccgaggaacagtaagagattatccagactttagcccatcagtggatgctgaagctattcagaaagcaatcagaggaattggaactgatgagaaaatgctcatcagcattctgactgagaggtcaaatgcacagcggcagctgattgttaaggaatatcaagcagcatatggaaaggagctgaaagatgacttgaagggtgatctctctggccactttgagcatctcatggtggccctagtgactccaccagcagtctttgatgcaaagcagctaaagaaatccatgaagggcgcgggaacaaacgaagatgccttgattgaaatcttaactaccaggacaagcaggcaaatgaaggatatctctcaagcctattatacagtatacaagaagagtcttggagatgacattagttccgaaacatctggtgacttccggaaag

SEQ ID NO: 153119 - DNA, 972 bp, Artificial Sequence
  derived and/or modified sequence
atggcaagcatctgggtggggcatcgcggaactgtccgtgactatcctgacttctcaccgtccgtggatgccgaggcaattcagaaggctattcgtgggatcggcaccgacgagaagatgctgatttctatcctcaccgagcgatctaatgctcagcgacagctgatcgtgaaggagtatcaagccgcttacggtaaggaactgaaagatgatctgaaaggggatctgtccgggcattttgagcacttgatggtggcactcgtgactccgccagcagtctttgatgcgaagcagctgaagaagtccatgaagggggcaggcaccaatgaggacgcactcattgagatcctcaccactagaacaagtagacaaatgaaggatatttcccaagcctactacacggtttacaaaaagtctctcggagacgacatcagctccgaaaccagtggagattttagaaaagctctccttacgctggctgacggcaggcgtgacgagagtcttaaggtggacgagcacctggccaagcaggatgcacaaatactgtataaggccggtgagaaccggtgggggacagatgaggacaagtttaccgagattctttgcctcagatcatttccccaacttaaacttacgttcgatgagtaccggaatatcagccagaaggacatagttgatagcatcaagggagagttgtcagggcacttcgaggacttattgctggctatcgtcaattgtgttagaaatactccagcttttttggcggagaggctccacagggcactcaaggggatagggaccgatgagtttaccctgaatcgcatcatggtctctcgttccgagatcgatctgttggacatacgaaccgagttcaaaaagcactatggctattccctctattccgcaattaagtccgacactagcggcgattacgagattaccctgttgaagatctgcggaggtgatgactag

SEQ ID NO: 153120 - DNA, 405 bp, Artificial Sequence
  derived and/or modified sequence
atggcctccatttgggtgggccataggggtactgtgcgtgactaccctgactttagcccttctgtggatgccgaggccatccagaaagccatcaggggcatcggtactgatgagaagatgctcatcagcatcttaactgagcgctccaacgctcagcgacaactaattgtgaaagagtaccaggctgcttacggaaaggagctgaaggacgacttgaaaggcgacttatccggacactttgagcatctgatggttgcactggtcactccaccagccgtcttcgatgccaagcaactgaagaagtctatgaaaggcgctggaaccaacgaggatgccctgatcgagattttgacgactcgcactagcagacagatgaaagacatcagccaagcatactatacttag

SEQ ID NO: 153121 - DNA, 315 bp, Artificial Sequence
  derived and/or modified sequence
atggcgtccatttgggtcgggcacaggggtacggttcgcgattatcccgattttagtccttccgtggatgccgaggctatacaaaaggccattcggggaatcggcacggacgagaagatgctgatatcaattctgactgaacgaagcaacgcacagcgacagctcattgtaaaggaataccaggcggcatacggaaaagaacttaaggatgatttgaagggcgatttgagtgggcatttcgaacatctgatggtggctttagtgactcccccagcggtttttgacgctaaacagcttaagaagagcatgaagtag

SEQ ID NO: 153122 - DNA, 465 bp, Artificial Sequence
  derived and/or modified sequence
atggcttccatatgggtgggacatagggggactgtgcgggactatccagacttttccccttctgtggatgccgaggctattcaaaaggccattagagggatagggacggacgagaagatgctaattagcatcctgacagaaaggtccaatgcccaacgccagcttatagtcaaggagtaccaagctgcctacggaaaagagttaaaagatgatctcaaaggtgacctgagcggacattttgagcacctaatggtagccctggtgaccccccctgccgtgtttgacgctaagcagctgaagaaatccatgaagggcgctggtacaaacgaggacgcactaatcgaaatcctgactacaaggacttctaggcagatgaaagacattagtcaggcctactacaccgtttataagaaatcccttggagatgacatttccagtgagactagcggagatttccgcaagtag

SEQ ID NO: 153123 - DNA, 972 bp, Artificial Sequence
  derived and/or modified sequence
atggccagcatctgggtgggccacagaggcaccgtgagagactaccccgacttcagccccagcgtggacgccgaggccatccagaaggccatcagaggcatcggcaccgacgagaagatgctgatcagcatcctgaccgagagaagcaacgcccagagacagctgatcgtgaaggagtaccaggccgcctacggcaaggagctgaaggacgacctgaagggcgacctgagcggccacttcgagcacctgatggtggccctggtgaccccccccgccgtgttcgacgccaagcagctgaagaagagcatgaagggcgccggcaccaacgaggacgccctgatcgagatcctgaccaccagaaccagcagacagatgaaggacatcagccaggcctactacaccgtgtacaagaagagcctgggcgacgacatcagcagcgagaccagcggcgacttcagaaaggccctgctgaccctggccgacggcagaagagacgagagcctgaaggtggacgagcacctggccaagcaggacgcccagatcctgtacaaggccggcgagaacagatggggcaccgacgaggacaagttcaccgagatcctgtgcctgagaagcttcccccagctgaagctgaccttcgacgagtacagaaacatcagccagaaggacatcgtggacagcatcaagggcgagctgagcggccacttcgaggacctgctgctggccatcgtgaactgcgtgagaaacacccccgccttcctggccgagagactgcacagagccctgaagggcatcggcaccgacgagttcaccctgaacagaatcatggtgagcagaagcgagatcgacctgctggacatcagaaccgagttcaagaagcactacggctacagcctgtacagcgccatcaagagcgacaccagcggcgactacgagatcaccctgctgaagatctgcggcggcgacgactag

SEQ ID NO: 153124 - DNA, 405 bp, Artificial Sequence
  derived and/or modified sequence
atggccagcatctgggtgggccacagaggcaccgtgagagactaccccgacttcagccccagcgtggacgccgaggccatccagaaggccatcagaggcatcggcaccgacgagaagatgctgatcagcatcctgaccgagagaagcaacgcccagagacagctgatcgtgaaggagtaccaggccgcctacggcaaggagctgaaggacgacctgaagggcgacctgagcggccacttcgagcacctgatggtggccctggtgaccccccccgccgtgttcgacgccaagcagctgaagaagagcatgaagggcgccggcaccaacgaggacgccctgatcgagatcctgaccaccagaaccagcagacagatgaaggacatcagccaggcctactacacctag

SEQ ID NO: 153125 - DNA, 315 bp, Artificial Sequence
  derived and/or modified sequence
atggccagcatctgggtgggccacagaggcaccgtgagagactaccccgacttcagccccagcgtggacgccgaggccatccagaaggccatcagaggcatcggcaccgacgagaagatgctgatcagcatcctgaccgagagaagcaacgcccagagacagctgatcgtgaaggagtaccaggccgcctacggcaaggagctgaaggacgacctgaagggcgacctgagcggccacttcgagcacctgatggtggccctggtgaccccccccgccgtgttcgacgccaagcagctgaagaagagcatgaagtag

SEQ ID NO: 153126 - DNA, 465 bp, Artificial Sequence
  derived and/or modified sequence
atggccagcatctgggtgggccacagaggcaccgtgagagactaccccgacttcagccccagcgtggacgccgaggccatccagaaggccatcagaggcatcggcaccgacgagaagatgctgatcagcatcctgaccgagagaagcaacgcccagagacagctgatcgtgaaggagtaccaggccgcctacggcaaggagctgaaggacgacctgaagggcgacctgagcggccacttcgagcacctgatggtggccctggtgaccccccccgccgtgttcgacgccaagcagctgaagaagagcatgaagggcgccggcaccaacgaggacgccctgatcgagatcctgaccaccagaaccagcagacagatgaaggacatcagccaggcctactacaccgtgtacaagaagagcctgggcgacgacatcagcagcgagaccagcggcgacttcagaaagtag

SEQ ID NO: 153127 - protein, 491 aa, Artificial Sequence
  derived and/or modified sequence
MKRMVSWSFHKLKTMKHLLLLLLCVFLVKSQGVNDNEEGFFSARGHRPLDKKREEAPSLRPAPPPISGGGYRARPAKAAATQKKVERKAPDAGGCLHADPDLGVLCPTGCQLQEALLQQERPIRNSVDELNNNVEAVSQTSSSSFQYMYLLKDLWQKRQKQVKDNENVVNEYSSELEKHQLYIDETVNSNIPTNLRVLRSILENLRSKIQKLESDVSAQMEYCRTPCTVSCNIPVVSGKECEEIIRKGGETSEMYLIQPDSSVKPYRVYCDMNTENGGWTVIQNRQDGSVDFGRKWDPYKQGFGNVATNTDGKNYCGLPGEYWLGNDKISQLTRMGPTELLIEMEDWKGDKVKAHYGGFTVQNEANKYQISVNKYRGTAGNALMDGASQLMGENRTMTIHNGMFFSTYDRDNDGWLTSDPRKQCSKEDGGGWWYNRCHAANPNGRYYWGGQYTWDMAKHGTDDGVVWMNWKGSWYSMRKMSMKIRPFFPQQ

SEQ ID NO: 153128 - protein, 474 aa, Artificial Sequence
  derived and/or modified sequence
MKRMVSWSFHKLKTMKHLLLLLLCVFLVKSQGVNDNEEGFFSARGHRPLDKKREEARPAKAAATQKKVERKAPDAGGCLHADPDLGVLCPTGCQLQEALLQQERPIRNSVDELNNNVEAVSQTSSSSFQYMYLLKDLWQKRQKQVKDNENVVNEYSSELEKHQLYIDETVNSNIPTNLRVLRSILENLRSKIQKLESDVSAQMEYCRTPCTVSCNIPVVSGKECEEIIRKGGETSEMYLIQPDSSVKPYRVYCDMNTENGGWTVIQNRQDGSVDFGRKWDPYKQGFGNVATNTDGKNYCGLPGEYWLGNDKISQLTRMGPTELLIEMEDWKGDKVKAHYGGFTVQNEANKYQISVNKYRGTAGNALMDGASQLMGENRTMTIHNGMFFSTYDRDNDGWLTSDPRKQCSKEDGGGWWYNRCHAANPNGRYYWGGQYTWDMAKHGTDDGVVWMNWKGSWYSMRKMSMKIRPFFPQQ

SEQ ID NO: 153129 - DNA, 1473 bp, Artificial Sequence
  derived and/or modified sequence
atgaagagaatggtaagctggtccttccataaactaaagactatgaaacacctgctgctgctgctgctctgcgtgttcctcgtgaaaagtcagggcgtgaacgataacgaagaagggttcttctctgcgagggggcacaggcctcttgataagaaacgtgaggaagcgccttccctgcgacccgctccacctcctatctctggcgggggatatagggcccggccagcgaaggcggcggccactcagaagaaggtagagcgcaaggccccagacgctgggggctgtttgcacgccgatccggacctgggagtgttgtgtccgactggctgccagctgcaggaagccctgctccagcaagagcggcctattaggaattcggtggatgaactcaacaacaacgttgaggccgtcagccagaccagtagtagtagctttcagtatatgtacctcttgaaggacctttggcagaaacgacagaagcaggtgaaagacaacgagaatgtggtgaacgagtactcatcagaactggaaaaacaccagctgtacatcgacgagacggtgaattcaaatatccccacgaacctgcgggtgctacgctccatcttggagaacttaaggtcaaaaatccaaaagctggagagcgacgtgtctgcacagatggagtactgtaggaccccctgcacagtgagctgtaatatccccgtagtgtctgggaaagagtgtgaggagattatcagaaaggggggagaaacctctgagatgtatctgatccagcctgactcttccgtcaagccctatcgcgtttactgtgatatgaacaccgaaaatggggggtggacggttattcaaaatagacaggatgggagtgtcgattttggacgcaaatgggatccatacaagcaaggttttgggaatgtggccactaatacagatgggaagaactactgcggactgcctggtgaatattggctgggaaacgataaaatcagccagctgacccgaatgggtcccacagagctgctgatcgagatggaggattggaagggcgataaggttaaggcccactacggcgggtttactgtccagaatgaggccaacaagtaccagattagtgtgaacaagtaccggggcactgccggcaatgctctgatggatggcgcttcccagcttatgggcgagaaccgcacaatgactattcataacggtatgttcttttcgacgtacgatcgcgacaatgatgggtggctgacaagcgatcccagaaagcagtgtagcaaggaggatgggggcggctggtggtacaataggtgccatgccgccaacccaaacgggcggtattattgggggggacagtacacgtgggacatggccaagcatggcacagacgatggagttgtgtggatgaactggaaaggaagctggtactcaatgcggaagatgtccatgaagattaggcccttctttccacagcaa

SEQ ID NO: 153130 - DNA, 1473 bp, Artificial Sequence
  derived and/or modified sequence
atgaaaaggatggtgtcgtggtcatttcataaactgaaaactatgaaacacctgctcctgttgctgctgtgtgtgtttttggttaagagccagggtgtcaatgacaacgaagaaggttttttcagcgcccgcgggcacagaccgctggataagaagcgggaagaggcccccagccttcggcccgcgcccccgccaattagcggcggaggctacagagcacgtcctgcaaaggccgcggctactcagaagaaagtcgaacgaaaggcacctgatgcaggaggttgcttgcatgcagaccctgacctgggagtgctttgtcctaccggttgtcaactgcaggaagcacttctgcagcaagaaaggcctattaggaactccgtggatgaactcaacaacaacgttgaggcagtttcacagacctcgagcagcagctttcaatacatgtacctcctgaaggatctttggcagaaacgtcagaagcaagtcaaggataacgagaacgtggtaaacgagtacagctccgaactggaaaaacatcagttgtacattgatgagactgtgaactcaaatatccctactaacttgagagtgctgcgaagcatacttgagaatctgcgctctaaaatccagaagctcgagtccgatgtgtcggcacaaatggagtactgccgcaccccttgtactgtcagctgtaacatacccgtggtttccggcaaggagtgtgaggagattatccggaagggaggtgaaaccagcgaaatgtacctcatccagcctgattcctcggtcaagccatatagagtgtactgcgacatgaacactgaaaatggagggtggacggtgattcagaacagacaagatggatcggtggactttggcaggaagtgggatccttacaagcaaggtttcggcaacgtggcgaccaatactgatggtaaaaactactgcgggcttcctggtgagtactggcttggcaacgacaagatctcgcagcttaccaggatgggaccaactgagctcctgatcgaaatggaggattggaaaggagataaagtcaaggctcactacggaggtttcactgtgcagaacgaagcgaacaagtaccaaatttcggtgaacaagtaccgcggaacggcaggaaatgccctgatggacggagcaagccaacttatgggtgaaaacagaacgatgactattcataatggtatgttcttctcaacttacgatagagacaacgatggttggctcacttcggatccccgcaagcaatgctcaaaggaagatggaggaggatggtggtataaccgctgtcatgccgcgaaccctaacggtcgatactactggggaggccaatacacttgggatatggcaaagcatggaactgacgacggtgttgtgtggatgaactggaagggttcatggtacagcatgcgtaagatgtccatgaaaattcggcccttttttccccaacaa

SEQ ID NO: 153131 - DNA, 1473 bp, Artificial Sequence
  derived and/or modified sequence
atgaagagaatggtgtcgtggtcatttcataagctcaaaacgatgaaacatctgcttctgctgctgctgtgcgtgttcctggtgaaaagccagggggtgaacgacaacgaggaaggattcttctcagcccggggccacagaccactggacaagaaacgggaagaagcgcccagcttgcggccggcacccccgcctatctcggggggcggttaccgcgcccgaccggcgaaggccgccgccactcagaagaaagtggagaggaaggcgcctgacgctggtggatgcttgcacgctgaccctgaccttggggtgctgtgcccgactggatgccaactccaggaggcccttctccagcaagaacgcccaatcagaaattcagtggatgagctcaacaataacgtggaggctgtgagccagacctcctcgagctccttccaatacatgtatctcctgaaggacctgtggcagaagaggcagaaacaggtcaaggataacgaaaacgtcgtcaatgaatactcctcagagctggaaaagcaccagttgtacatcgacgagactgtgaacagcaatatcccaacgaacctccgggtgctgcggagcatccttgaaaaccttagatcgaaaatccaaaaactggaatccgacgtgtcggctcaaatggagtactgtagaactccgtgcactgtttcctgcaacatcccagtggtgtcgggcaaagagtgcgaggaaatcatcagaaaaggaggagagactagcgaaatgtacctcatccaacctgatagctcagtgaaaccttaccgcgtgtactgcgacatgaacactgaaaacggaggatggaccgtcattcaaaacaggcaggacgggtccgttgacttcggacgaaagtgggacccgtacaagcagggattcggcaacgtggcgacgaataccgacggaaagaattactgtgggctgccgggggagtactggctgggaaacgacaaaatctcacaactgaccagaatgggtccgaccgagctcctcatcgaaatggaagattggaagggggataaggtgaaggcgcactacggaggattcactgtgcagaatgaggccaacaagtaccaaatcagcgtgaacaagtaccggggcactgccggcaatgcactgatggacggggcttcccaactgatgggcgaaaacagaaccatgactattcacaacggcatgttcttttcgacttacgaccgggataacgacgggtggttgacgtcggacccgcgaaagcagtgctcgaaagaggacggcgggggctggtggtacaaccgctgccacgccgccaaccccaatggccgatactactggggaggacagtacacctgggatatggccaaacacggcaccgatgacggcgtcgtctggatgaactggaaaggatcatggtactccatgcgcaagatgtcaatgaagatccggcccttcttcccacagcag

SEQ ID NO: 153132 - DNA, 1473 bp, Artificial Sequence
  derived and/or modified sequence
atgaagcgaatggtgtcgtggagcttccacaagttgaaaacgatgaagcacctgctgctcctgctgctttgtgtgtttctggtaaagtcgcagggtgttaacgataacgaagaaggttttttctccgcccggggacataggccacttgataagaaaagagaagaagcaccttcattgaggcctgctcctccgcctatcagcggcggcggttacagggccagacctgcaaaagcagcagcgacccaaaagaaggtcgaaaggaaggcacctgacgcaggcggatgccttcacgccgacccggatcttggagtgctgtgtccaaccggctgtcagcttcaagaagcacttcttcaacaagaaagaccaatccgaaattcggtcgacgaacttaacaacaatgtggaagcagtgtcgcagacttcctcctcgagctttcagtatatgtaccttctgaaggacctgtggcagaagaggcaaaagcaggtgaaagacaacgaaaatgtggtgaatgaatactcgagcgaactggagaagcatcaactgtacatcgatgagactgtcaactccaacattcctaccaaccttcgcgtcctgagatccatccttgagaacctgcgctcgaaaatacaaaaacttgagtccgacgtctccgcgcaaatggaatactgcagaaccccctgcacggtgtcatgcaacatccctgtggtgtcgggaaaggaatgcgaggagattatcagaaagggcggagagacttcggaaatgtaccttattcagcctgacagctcggtgaagccataccgtgtgtactgcgatatgaatactgagaatggtggctggaccgtgatccagaaccggcaagacggaagcgtcgattttggtagaaagtgggacccatacaagcagggctttggaaacgtggctactaacactgatggtaagaactactgtggtttgccaggagagtactggctgggtaacgacaagatctcccaacttacccgcatgggccctactgaactcctgattgagatggaagattggaagggggataaggtgaaggcccattatggcggatttacggtccagaacgaggccaacaagtaccaaatatctgtcaataagtacagaggtaccgcaggaaacgcacttatggatggagcctcgcaactcatgggcgaaaaccgtactatgactattcataatggaatgttcttttccacttacgatagagacaacgatggttggcttacctccgacccgaggaaacaatgctcgaaagaggatggtggtggttggtggtacaatcggtgtcatgccgcgaatccaaacggtagatattactggggagggcagtacacctgggacatggccaaacacggcactgatgacggtgttgtttggatgaattggaagggtagctggtattccatgcgtaaaatgtcgatgaagattaggccttttttcccccaacag

SEQ ID NO: 153133 - DNA, 1473 bp, Artificial Sequence
  derived and/or modified sequence
atgaagagaatggtgtcctggtcgttccataagttgaaaactatgaagcatcttctcctgctgttgctttgcgtgttccttgttaagtcgcaaggcgtcaacgacaacgaagaaggatttttctcggcacgtggacatcggccactggacaaaaagcgtgaagaagccccttcccttagaccagcccctcctcccatttccggaggaggttaccgcgcaagacctgcgaaggctgcagccacccaaaagaaagtcgagcgcaaggcccccgatgcgggcggttgcctgcacgccgaccctgacctcggcgtcctttgtcccaccggttgccagctccaggaagcacttcttcaacaagagcgacctataaggaactcggtggacgaactgaacaacaacgtggaagcagtaagtcagacctcaagctcgtcctttcagtacatgtacctgctgaaagacctctggcaaaaacgccagaagcaagtcaaggataatgaaaatgtggtcaacgagtattcatcggagctcgaaaagcatcagctgtacatcgacgaaaccgtcaacagcaacattcctaccaacctgagggtcttgaggtcaatccttgaaaaccttaggtccaagattcaaaaactggaatccgacgtttcggcgcaaatggagtactgtaggaccccgtgcaccgtgagctgtaacatccctgtagtctcggggaaggaatgtgaagagatcatccggaagggcggcgaaacctcagagatgtaccttattcagcccgattcatccgtgaaaccttaccgcgtttactgtgatatgaacacggaaaatggaggttggactgtgattcagaaccgccaagacggctccgtggactttggaagaaaatgggatccttacaagcaggggtttggaaacgtcgcaaccaatactgatggaaagaattactgtggcctccctggtgagtactggctgggaaatgataagatcagccagctcacccggatgggaccaaccgagttgcttatagaaatggaagattggaaaggcgataaggttaaggcccactacgggggcttcactgtccagaacgaggccaacaagtaccaaatttcagtcaacaaatatcggggaactgcaggaaatgctcttatggacggagcatcccagttgatgggtgaaaacagaactatgaccatacataatggtatgtttttctccacgtacgatagagacaatgacgggtggctgacttcggaccccagaaagcaatgctccaaggaagatggtggtgggtggtggtacaatagatgtcatgcagccaaccctaatggccggtactactggggagggcagtacacttgggatatggccaaacacggaactgacgatggagtggtgtggatgaactggaagggatcatggtactctatgcggaagatgtcgatgaagattagacccttttttcctcagcaa

SEQ ID NO: 153134 - DNA, 1473 bp, Artificial Sequence
  derived and/or modified sequence
atgaaacggatggtctcctggagctttcacaaacttaaaactatgaaacatttactgctgctgctgctgtgtgtcttcctcgtgaaatctcagggtgtgaacgataatgaagaagggtttttttctgcccgcggccaccgacctctggataaaaaacgagaagaagccccttccctgcgaccggccccgccgcccattagtggcggcgggtacagagcaaggcccgctaaagcggccgccactcagaagaaagtggaacgcaaagcgccagacgctggcggctgtttacacgctgatcctgaccttggggtgctttgccctacgggttgccagctccaggaagcactgcttcagcaggagcggccgattagaaattccgtcgacgagctcaacaataacgtggaggcagtgtcccaaacctcctctagcagcttccaatacatgtatctcttgaaggatctgtggcaaaagcggcagaaacaggttaaagacaacgaaaacgtggtgaatgaatattcctccgagctagaaaagcaccaattgtacatcgacgaaacagtgaactcgaatatccctactaacctccgggtattgcggtccatcctcgaaaacctgagatctaagatccagaaacttgagagcgacgtctctgcccaaatggagtactgcagaaccccctgcactgtgagctgtaacatccccgtcgtcagcgggaaagagtgcgaagagatcattagaaaaggaggagaaacaagtgagatgtacctgattcagccggattcttcagtcaagccctatcgcgtgtactgtgatatgaacacggaaaacgggggatggaccgtgatccaaaaccgccaggacggcagcgtggactttggtagaaaatgggatccatacaaacaaggcttcggtaacgtggccaccaacacagatggaaagaattactgtgggctccccggagagtactggctgggtaacgacaaaataagccagctaacccggatgggccctacggagcttttgatcgaaatggaggattggaagggagataaagtcaaggcacattatggtgggtttacagtccaaaacgaagccaacaaataccaaatctcggtcaataagtatagaggcactgccggcaatgctctcatggacggtgcctcccagctgatgggtgaaaatcgcaccatgacgattcacaacggaatgtttttttccacctacgacagagataatgacggatggctcacctctgatccccgcaaacaatgtagtaaagaggatgggggcggatggtggtataataggtgccacgcagccaacccaaatggcaggtactattggggaggacaatacacctgggacatggccaaacacggcaccgacgatggcgtggtttggatgaactggaaagggagttggtacagtatgcgcaaaatgtcaatgaaaatcagacccttctttccgcagcag

SEQ ID NO: 153135 - DNA, 1473 bp, Artificial Sequence
  derived and/or modified sequence
atgaaacgcatggtgtcctggtcgttccataagctgaaaacgatgaaacacctgctcctgttgctgctgtgcgtattcctggtaaaatcccagggagtcaacgacaatgaggagggcttcttctccgccagaggccatcgccctttggacaaaaaacgggaggaagctccatcactccggccggctcctcctccgatctccggcggaggctaccgcgccagaccggcaaaggctgccgccacgcagaagaaagtcgagcgcaaggccccggatgcgggagggtgcctgcatgccgacccagacctgggcgtcctgtgtccaaccggatgccagctgcaagaggcgctgcttcagcaagaacgcccaatcagaaacagcgtcgatgaacttaacaataatgtggaagcggtcagccaaaccagcagctcctctttccaatacatgtacctgctgaaggacctctggcagaagagacagaagcaggtgaaggataatgagaacgtggtgaacgaatattcatcggaactggaaaagcaccagctctacatcgacgaaaccgtgaactcgaatataccgacgaacctgagagtgctgcggtcgatcctcgaaaacttgaggtcaaaaatccagaagctggagtcagatgtcagcgcgcaaatggagtactgtcggactccgtgcaccgtgtcgtgcaacatcccggtcgtctcgggaaaggaatgcgaggagataattcggaagggaggcgagactagcgaaatgtacctcatccagccggactcctccgtcaagccataccgtgtatactgcgacatgaacactgaaaatggcggctggactgttattcagaatcgccaggacggatccgtggatttcggtagaaagtgggacccgtacaagcaaggttttggaaacgtggccactaacaccgacggaaagaattactgtgggttgcctggagaatattggctcggaaacgataagatctcccaactgacccggatgggaccgaccgaattgctcatcgagatggaggattggaagggcgacaaagtcaaagcacactacggaggatttaccgtgcagaacgaagccaacaagtaccaaatttccgtgaataagtaccggggaaccgccggtaacgccctcatggacggagcttcccaactgatgggagaaaaccggaccatgactatccataatggcatgttctttagcacttatgacagggacaacgatgggtggcttacttcggatccccgcaagcagtgctccaaagaggatggaggtggttggtggtacaatcgatgtcacgctgccaacccgaatgggagatactactggggaggtcaatacacttgggacatggccaagcacggaactgatgatggggtggtttggatgaactggaaggggtcatggtacagcatgcgcaaaatgagcatgaaaatcaggccatttttcccacagcag

SEQ ID NO: 153136 - DNA, 1473 bp, Artificial Sequence
  derived and/or modified sequence
atgaagcggatggtgtcgtggtcgttccacaaacttaagaccatgaagcacttgctgctgctgctcctgtgcgtttttctggtcaagtcccagggcgttaacgataacgaagaaggatttttctccgcacggggacatcgtccgctggataagaagcgggaggaggcgccaagcctgcggccggcaccgccgcccatctctggaggcgggtaccgtgcccgcccggccaaggcagcagctactcagaagaaggtggagagaaaagctccagatgcgggagggtgccttcacgcagatccggacctgggagtcctgtgtcctaccggatgtcagctgcaggaagctctgctgcaacaggagcggccaatccgcaattcggtggatgagctgaataacaatgtcgaggccgtttcgcaaacctcctcctccagcttccagtacatgtacctgttgaaagacctttggcagaagagacagaagcaagtcaaggataatgaaaacgtggttaatgaatactcgtcggagttggaaaagcatcagctgtacatcgacgagactgtgaactctaacattccaacgaacctgcgggtccttcgctcaattctcgagaacctgagaagcaagatccaaaaactcgaatccgacgtgtccgctcagatggagtactgccgcacgccgtgcactgtgtcgtgcaatatccctgtggtgtcgggaaaagaatgtgaagagatcattaggaagggaggcgaaacgtcagagatgtacctcatccaacctgactcgtcggttaaaccatacagagtgtactgcgacatgaatactgagaatgggggatggaccgtgatccagaacaggcaggacggatcggtggatttcggccggaagtgggacccatacaaacagggattcggaaacgtggcaactaacaccgatggcaagaattactgcggcctgccgggggaatactggctgggcaacgacaagatatcgcaactcacccggatgggaccaactgagcttctcatcgaaatggaagattggaaaggcgacaaagtgaaggcgcactacggaggattcaccgtgcagaatgaagccaataagtaccaaatctctgtgaacaaatacagaggtactgctggaaatgcgctgatggacggtgcgagccaattgatgggtgagaatcgcaccatgaccatccataacggtatgtttttcagcacctacgatagggacaatgatggatggctgacctccgacccccggaagcaatgtagcaaagaggacggcgggggctggtggtacaacagatgccacgccgccaacccgaacgggagatactactggggcgggcagtacacttgggatatggccaagcacggaacggatgacggagtggtgtggatgaattggaagggatcgtggtattcaatgcgcaagatgtcaatgaagatacggcccttctttccgcaacag

SEQ ID NO: 153137 - DNA, 1473 bp, Artificial Sequence
  derived and/or modified sequence
atgaagagaatggtgagctggtcgttccataaactgaagaccatgaaacatctcctcctcctgctgctctgcgtgtttctcgtcaagtcgcagggggtgaacgacaatgaggaaggattcttcagcgcgcgcggacacagaccgctggataaaaagcgcgaggaggccccttcactgcgacctgcaccaccgccaatttcaggaggcggataccgcgcgcgcccagccaaagcggctgccacccagaagaaagtcgaaaggaaggcccctgatgccggcggctgcttgcacgctgacccagacctgggagtgctgtgtccaacgggatgccagctccaggaagcgctgctccagcaagagcgccccatcaggaactcggtcgacgaactgaataacaacgtggaagctgtcagtcagacttcgtcatcctcctttcagtatatgtacctgctcaaggacctctggcagaagcgccagaagcaagtgaaggacaacgaaaatgtggtgaacgagtattcaagcgaacttgagaagcatcagctgtacatcgatgaaacggtcaattccaacatcccgacgaacctcagggtgctgcgctcaatcctggagaatctgagatcgaagatccaaaagctcgagtccgacgtgtcggcacagatggaatactgcagaactccgtgtaccgtgagctgcaacatccccgtggtgagcggaaaggagtgtgaagagatcatcagaaaaggtggcgagactagcgaaatgtatcttatccaaccggactcatcagtgaagccttaccgcgtgtactgcgacatgaataccgaaaatggaggatggactgtgatccaaaatagacaggacggatccgtggacttcggacggaagtgggacccgtacaagcagggattcggcaacgtcgctaccaataccgatggaaaaaactattgtggtctgccaggcgaatactggctgggcaacgataagatctcgcagttgacccgcatgggaccgacggaactgctcatcgagatggaggattggaagggagataaggtcaaggcgcactacggaggattcaccgtgcagaacgaagcaaacaagtaccaaatctccgtgaacaagtaccgcggcactgctggcaatgccctgatggacggtgcttctcaacttatgggagagaaccggactatgaccatccacaacggtatgttctttagcacttacgacagggacaacgacggatggctgaccagcgacccgcgcaaacagtgttcgaaggaggacggcggaggctggtggtacaacaggtgccacgcagcgaatccgaatggcagatactattggggcggtcaatacacctgggatatggccaaacacggcactgatgacggagtcgtctggatgaactggaagggatcttggtactcgatgcgcaagatgagtatgaagatccgaccattcttcccccaacaa

SEQ ID NO: 153138 - DNA, 1473 bp, Artificial Sequence
  derived and/or modified sequence
atgaaaaggatggtgtcctggtcgtttcacaaactgaaaactatgaagcatcttttgcttctgcttctctgtgtgtttctcgtgaagagccagggcgtgaacgataacgaagagggctttttctcagcaagaggtcacagaccattggataagaagcgcgaggaggctccttcgttgaggcccgcacctccacctatctccggaggtggttaccgtgcacggcctgcaaaggccgcagcaactcagaaaaaggtggaaagaaaggcccctgatgcagggggatgtctgcatgctgatcctgacctcggggtgctttgccctactgggtgtcagctccaggaagcattgcttcaacaggagcgaccgattcggaactcagtcgacgagcttaacaacaacgtggaagcagtctcccagacttcatcgtcgagcttccagtatatgtacctgttgaaggacctttggcagaaaagacaaaaacaagtgaaggataatgaaaatgtggtcaatgaatactcgtcggaactggaaaaacaccaactgtacattgatgaaactgtcaatagcaacatacccaccaacctccgagtgcttcgctcaatcctggagaaccttcggtctaaaatccaaaagctcgagagcgacgtgtcagctcaaatggaatactgtcggacgccttgcaccgtctcttgcaacattcctgtcgtgtcgggaaaagaatgtgaagagataatccgcaaggggggcgaaacctcggagatgtacttgatccaacctgattcctcggtgaaaccgtaccgggtgtactgcgatatgaataccgaaaatgggggatggacggttattcagaacagacaagacggctcggtggatttcggccggaagtgggacccctacaaacaaggttttggtaacgtggccactaacactgatggtaagaactactgtggtttgccaggtgaatactggcttgggaatgataagatttcccaacttaccagaatggggccaaccgaactgctcattgagatggaagattggaagggtgacaaagtgaaggcccattacgggggatttaccgtccaaaacgaggcaaataagtatcaaatctcggtcaataagtacagaggtaccgcaggaaatgcacttatggacggagcatcgcagctgatgggggaaaaccgcaccatgactattcacaacgggatgttcttctccacctatgaccgagacaatgacggctggcttacttcggaccctcggaaacagtgttccaaggaagatggaggggggtggtggtacaatcgctgtcatgcagctaatccaaacggtcggtactactggggtggacaatacacgtgggacatggcaaagcatggaaccgatgacggagtggtgtggatgaattggaaaggatcctggtacagcatgcgcaagatgtcgatgaagattcgaccgtttttcccacaacag

SEQ ID NO: 153139 - DNA, 1473 bp, Artificial Sequence
  derived and/or modified sequence
atgaaaagaatggttagctggagcttccacaagttaaagaccatgaaacatcttttgctgcttttgctgtgcgtgtttttggtcaagtctcaaggtgtgaacgacaacgaagagggcttttttagtgctcgggggcaccggcctttagataaaaagagggaagaggcgccttcactaagaccagcacctcctccgatctctggcggaggctatcgtgcgcggccagctaaggctgcagccactcagaaaaaagtcgagaggaaggcccccgatgccggaggatgcctgcacgctgaccccgacctgggtgtgttatgcccgaccgggtgccagctccaggaagcgttgctgcagcaggaacggcctatcaggaatagtgtggacgaattaaacaacaatgtcgaggccgtgtcccagacttcctcatcctcatttcagtacatgtacctcttgaaggatctgtggcagaagaggcaaaaacaagtgaaggataacgaaaacgtggtcaacgagtactccagtgaactcgagaagcatcagctgtatattgatgaaactgtcaactcgaatataccaaccaatttgcgtgtgctgaggagcatcctggagaacctgcgctcaaaaatccagaagttggaatcggacgtcagcgcccagatggagtactgtcgcacaccttgcactgtctcatgcaacatccctgtagtgtcgggaaaagagtgtgaagagattattcggaaaggaggggagacttctgaaatgtacctcatccagcccgacagctccgtgaaaccatacagagtatattgtgacatgaatacagagaatgggggttggactgtgatccagaaccgacaggatgggtccgtggacttcgggcgcaaatgggatccttataaacaaggtttcggcaatgtcgctactaacacagacggaaagaactattgtgggctcccgggagaatactggctgggaaatgataagatcagtcagcttacccggatgggtccaaccgagctgctcattgaaatggaggactggaagggagacaaagtgaaggcccactacggtgggttcactgtgcaaaacgaggcgaataaataccagatttcggtaaacaaataccgggggaccgccgggaatgccctcatggacggggccagtcagctcatgggagagaatcgcacaatgacgattcacaatggtatgttcttctccacttacgaccgggacaatgacgggtggctcacctcagacccaagaaagcagtgcagcaaggaagacggcggcggctggtggtataacagatgccatgcagctaatccaaatgggcggtattactgggggggacagtatacttgggacatggctaagcatggcacagacgacggcgttgtgtggatgaattggaagggttcttggtatagtatgagaaagatgagcatgaagatcaggcctttttttcctcagcag

SEQ ID NO: 153140 - DNA, 1473 bp, Artificial Sequence
  derived and/or modified sequence
atgaagcgtatggtgtcatggtcatttcataaacttaagactatgaagcatctcctcctccttcttctttgcgtgttcctggtgaagagccaaggggtcaacgataacgaagaagggttcttttccgccaggggccaccgccctctcgacaagaaaagagaggaagcgccaagcctgcgacctgcaccaccacctatctcaggcggtgggtaccgcgcaagacctgcaaaggccgcggcaactcagaagaaggtggaacgtaaagcacctgacgcaggcgggtgtctgcacgcggaccctgatctcggtgtgctctgtcctactggttgccaactccaggaagcgcttctgcagcaggagcgtccaattaggaactcggtagacgagctgaacaataacgtggaggccgttagccaaacttcgtcctcctcgtttcaatacatgtatcttttgaaggatttgtggcaaaagagacagaagcaggtgaaggataatgaaaatgtggtgaatgaatactcgtcagaactggaaaagcaccagctttacatcgatgagactgtcaattcaaacatacctaccaaccttcgggtcttgcgctcaattcttgaaaacctcaggtcgaaaatccaaaagctggagtccgatgtgtctgcccaaatggaatactgtagaaccccctgtactgtgtcgtgcaacatccctgtggtgtcgggtaaggaatgtgaagagattatcagaaaaggaggtgaaacctctgagatgtacctgattcagccagattcctcagtgaagccataccgagtgtactgtgatatgaacactgagaatgggggttggactgtcattcagaacagacaagatggttccgtggattttggtagaaaatgggacccgtataaacaaggatttggcaatgtggccactaacacggacggaaaaaactactgtgggctccctggagaatactggctcggcaacgataagatttcgcagcttacccgaatgggaccgactgaactgctcatcgaaatggaagattggaagggagataaggtgaaagcacattacggaggtttcactgtgcaaaatgaggcgaacaagtatcagatttcggtgaacaaatacagaggtaccgcaggaaacgcccttatggatggtgccagccaactcatgggagagaacagaaccatgacgattcataacggaatgttcttctcgacctacgacagagataacgacggatggctcacctcggatccaaggaagcagtgctcaaaagaagatggcggaggctggtggtacaaccgatgtcatgcggccaaccctaatggaagatattactggggcggtcagtacacctgggacatggcaaagcatggcactgatgacggggtcgtgtggatgaactggaagggatcgtggtactccatgcggaagatgagcatgaaaatccgccctttctttccacagcaa

SEQ ID NO: 153141 - DNA, 1473 bp, Artificial Sequence
  derived and/or modified sequence
atgaagcgtatggtgagctggagcttccataagctcaagacaatgaaacatttgctgctcttactgctctgcgtgttcttggtaaagtctcagggtgtgaacgacaacgaagagggattcttttctgccagaggccatcgccctcttgacaagaagagggaggaggcaccatcactgaggccagcaccaccacctatctcaggtgggggctatcgcgcccggcctgcaaaagccgccgccacccagaagaaagtcgagaggaaagcccctgacgcaggaggatgtctacatgccgacccggatctcggcgtgttgtgccccacagggtgtcaactccaggaggctctcctccaacaggagcgaccaattcgaaactctgtagacgagttgaacaataacgtggaggccgttagccagaccagcagctcttctttccaatacatgtacctgctaaaagatttgtggcaaaagcggcagaaacaggtgaaagataacgaaaacgtggtgaatgaatattcctccgaactggaaaaacaccagctatacatagacgagaccgtgaacagtaatatcccaacaaatctccgggtgctgagatccatactggaaaacttacggtctaagattcaaaaactggaatccgacgtgagtgcccagatggagtattgccgaaccccctgcaccgtctcttgcaatattcccgttgtgagcggcaaggagtgcgaagaaataatccgaaagggtggggagacttctgagatgtacttaatccagccggacagcagcgttaaaccttaccgagtgtattgtgatatgaatactgaaaatggaggctggactgttatccagaataggcaagacggaagcgtagacttcggcaggaagtgggatccgtataaacaagggttcgggaacgtggccaccaacactgacggaaagaattactgcgggctgcctggcgagtattggcttggcaacgacaagatttcccagctaacaaggatgggcccaactgaactgctcattgagatggaagactggaaaggggataaagtaaaggcccactatggcggcttcactgtgcaaaacgaggcaaataagtaccaaattagcgtgaataaatatcgtggcactgccggcaatgccttgatggacggcgcctctcagctgatgggcgagaaccggaccatgactattcacaatggtatgtttttcagtacatatgatagggataacgacgggtggctcaccagtgatccacggaagcagtgctcaaaagaggatggcggtggctggtggtataaccgatgtcatgccgccaatcctaacggtcgatactactggggcggtcagtacacctgggacatggccaaacacggcactgatgacggcgtggtatggatgaactggaagggctcctggtacagcatgagaaagatgtccatgaaaatcaggcccttttttccccagcag

SEQ ID NO: 153142 - DNA, 1473 bp, Artificial Sequence
  derived and/or modified sequence
atgaaacgcatggtatcttggtcctttcataaactaaaaactatgaaacacttgctgttgctcttgctttgtgttttcttagtgaaatctcaaggggttaacgataatgaggaggggtttttttctgcacgagggcacaggccactggacaaaaagcgggaagaagctcctagcctgagacctgcccccccccccatttccggcggagggtaccgcgccagaccagccaaggcggcagcaactcaaaaaaaagtagagcgcaaggcccctgatgctgggggctgtcttcatgctgatcctgatctgggagtcctgtgccctacaggctgtcagctccaggaggcccttctgcagcaagaacgcccgatccgcaatagtgtcgacgaactcaataataatgtggaagccgtgtctcaaaccagttcgtcgtccttccagtatatgtacctgctcaaggatctgtggcagaagcgtcagaaacaggtgaaggataatgagaacgtcgtcaatgagtattcatccgaactggagaagcatcagctttacatcgacgaaaccgtgaattcaaacataccaacaaatctgcgcgtgctgcgctccattctggagaatctacgctccaaaattcagaaactagagagcgatgtatctgcccagatggagtactgccgaaccccctgtactgtgagttgtaatattcctgtggtctctggaaaggaatgcgaggagatcattcgaaaaggaggggaaacgtctgagatgtacttgatacagcctgactcatccgtgaaaccctaccgcgtctattgtgatatgaataccgagaacgggggctggaccgtcatacagaataggcaggatgggtcggtagacttcggccgaaaatgggatccatacaagcaaggcttcggaaatgtcgccaccaatacagacggaaagaactattgtggactacctggtgagtactggctagggaacgataaaatctctcagctgacccgaatgggccccacagaactgctgatcgagatggaggactggaaaggcgataaagtgaaggctcattacgggggattcaccgtgcagaacgaagccaacaagtaccagatctcggtaaacaaatatagagggaccgccggtaacgctcttatggatggcgcatcccaactaatgggcgagaatcggactatgaccatccacaatggcatgttcttttccacgtacgatcgagacaacgatggatggctgacttctgaccctcgcaaacagtgtagtaaagaagacggtgggggatggtggtacaataggtgccatgccgccaatcccaacggtcgttactattggggtgggcaatatacttgggacatggcgaaacatgggaccgacgatggggttgtctggatgaactggaaagggtcgtggtatagcatgcgaaaaatgagtatgaagataagacctttctttccccagcag

SEQ ID NO: 153143 - DNA, 1473 bp, Artificial Sequence
  derived and/or modified sequence
atgaagcgcatggtgtcttggagttttcacaaactaaaaacgatgaaacatttgctccttctcttattgtgtgttttcttggttaaatcgcaaggagtgaatgacaatgaggaaggattcttctcagcacgaggtcatagaccgttagataagaaaagagaagaagcaccgtcgctacgtccagcaccaccacccatatccggaggtggatatagagctagaccagctaaagcagccgcaacgcagaaaaaggtcgagcgtaaagcaccagacgccggaggttgtcttcatgcggatccggatctcggagttctgtgcccaaccggatgccaactgcaggaagctttgctacaacaagaacgaccaatacggaactccgttgatgaacttaacaacaacgttgaggccgtatctcagacctcgtcgtcatcgtttcaatatatgtacctgttgaaggatttgtggcagaaaagacaaaagcaagtgaaggataatgagaatgtggtgaacgagtactcctcggaattggagaagcatcagttatacattgatgaaacagtgaactctaatatcccaaccaatctcagagttctccgatccatacttgaaaatctcagatcgaagatacaaaagctggagtctgacgtatcagcccagatggaatattgccgaacaccgtgcacagttagttgcaacatcccagtcgtttctggtaaagaatgtgaagagatcattcggaaaggaggagagacctcagaaatgtaccttatccaaccagactcatcggtcaagccatacagggtttattgcgacatgaatacagaaaacggaggatggactgttatccaaaatcgacaagatggatctgttgacttcggccgtaaatgggatccatataaacagggattcggaaatgtggcaacaaatactgatggaaaaaactattgcggattgccaggggagtattggttgggaaatgataaaatttcccaactcacgcggatgggtccaaccgaattgcttattgagatggaggactggaaaggagataaggttaaagctcattatggcggatttactgttcaaaatgaagcaaataaataccagatatcagttaataaatacaggggaacggccggaaatgcgttgatggatggcgcttctcagctcatgggagaaaatagaactatgacaatacacaatggaatgtttttcagtacttatgatcgggataacgatggatggctgacgagtgacccgagaaagcaatgctcaaaagaagatggaggaggatggtggtataatcgctgtcacgctgccaacccaaatggtcgatattattggggaggacaatatacgtgggatatggctaaacacggaacagatgatggagttgtttggatgaattggaagggttcgtggtattctatgcgtaagatgtcgatgaaaattaggccattcttcccccaacag

SEQ ID NO: 153144 - DNA, 1473 bp, Artificial Sequence
  derived and/or modified sequence
atgaagcggatggtgtcatggtcgttccataagctcaagacgatgaagcacctcctcctcctgcttctctgcgtctttctcgttaagtcacagggagtcaacgacaacgaggagggcttcttttcagctagaggccatcgcccactggataagaaaagagaggaagccccatctctccggccggctccgccgccgatcagcggaggaggctaccgcgcacgcccggccaaggccgcggctacccaaaagaaagtggaacgaaaggcaccggacgccggtggatgcctgcacgccgaccctgacttgggagtgctctgtccgaccggttgtcagctgcaggaagccctgctccagcaggagcggccgatcaggaactcagtggatgaactcaacaacaacgtcgaagcagtgagccagacttcctcctccagcttccagtacatgtacctgctgaaagacctttggcaaaaacgccaaaagcaggtgaaggacaacgagaatgtcgtgaacgaatactcctctgaactggagaaacaccagctgtacatcgacgaaactgtcaactcgaatatcccgacgaatctgagagtgctccgctcgatcctcgaaaacctccggtcgaagattcagaagttggaatcggacgtgtcggcgcagatggagtactgtcggacgccatgcaccgtgtcatgcaacatcccggtggtgtcaggaaaagaatgcgaggagattattcgcaagggcggagaaacgtccgagatgtacctcatccagccagacagctccgttaaaccgtaccgtgtgtactgcgatatgaacactgaaaacggaggatggaccgtgatccagaaccggcaggatggatcagtggacttcgggaggaaatgggatccatataagcaggggttcggcaacgtcgcgactaacacggacggaaagaactattgcggcctccctggcgaatactggctgggaaacgacaagatctcccagttgactcgcatgggccctaccgaactgttgatcgagatggaggactggaaaggagataaggtgaaggcacactacggcggcttcaccgtgcaaaacgaggctaacaagtaccaaatctccgtgaacaaatatcggggcactgccgggaacgctctgatggacggggcaagccagctcatgggagaaaatcgaactatgaccatccacaatggaatgttcttctcaacctacgatcgcgacaacgacggatggctgacctcagacccgagaaaacaatgctcaaaggaagatgggggcggctggtggtacaacagatgtcatgccgcgaacccaaacgggcggtactattggggaggtcaatacacctgggatatggccaagcacggaaccgacgacggcgttgtctggatgaactggaagggatcgtggtactccatgcggaagatgtcgatgaaaatcagaccgttcttcccgcaacag

SEQ ID NO: 153145 - DNA, 1473 bp, Artificial Sequence
  derived and/or modified sequence
atgaagcgtatggtcagctggtccttccacaagttgaagaccatgaagcacttgttgcttctgctgctgtgcgtttttttggtcaagtcgcaaggtgtcaatgacaatgaggagggattcttctccgcacgtggacaccgcccgttggacaagaagcgtgaagaggccccctccttgcgtccagcccctccccccatctccggaggtggttaccgtgcccggcccgcgaaagccgccgccacccaaaagaaggttgaacgaaaggcacctgacgctggcggttgtctacatgcggaccctgatttaggtgtcctgtgcccgacaggctgccagctccaggaggccctgctccagcaggagcgacccatccgcaactccgttgatgagctcaacaacaacgtagaggcggtctcccagacatctagcagcagctttcagtacatgtacctcctaaaggacctttggcaaaagcgacagaagcaggttaaggacaacgaaaacgtagtcaatgagtattcaagcgaactggagaagcaccagctctacattgacgagaccgtcaactctaacatccctacaaacctacgcgtgctccggtcgatactggagaacctgcggtccaaaatccaaaagcttgagagcgacgtgagcgcccagatggagtactgtcggaccccttgcaccgtctcctgtaacatcccggtcgtctccggcaaggagtgcgaagagatcatccgcaagggcggtgagacctctgagatgtatctgatccagcccgattcctctgttaaaccttaccgggtgtactgcgacatgaacaccgaaaatggaggatggacagtgatccagaatcgccaggatgggtccgtcgacttcggccgtaagtgggacccttataagcaggggttcggcaacgtcgccactaacaccgacggtaaaaactattgtggactcccgggtgaatactggctcgggaacgacaaaattagccaactcaccagaatgggaccaacggaactgttgattgaaatggaggactggaagggagacaaggtcaaggctcactacggcggcttcacagttcaaaatgaagcaaacaaatatcagataagtgtcaacaagtaccgtggaactgctggtaacgccttgatggatggtgcttcccagttgatgggcgagaaccgcacaatgaccatccacaacggtatgttttttagtacatacgaccgcgacaacgatggttggttgactagtgacccgcggaagcagtgctcgaaggaagatggaggcggatggtggtacaaccgatgccacgctgcgaacccaaacggacgctattactggggcggccagtacacttgggatatggcgaagcatggtactgacgatggggttgtttggatgaactggaagggttcgtggtactcgatgcggaagatgtcgatgaagatcaggccctttttccctcagcag

SEQ ID NO: 153146 - DNA, 1473 bp, Artificial Sequence
  derived and/or modified sequence
atgaaacggatggtttcgtggagctttcacaagctcaagactatgaagcacctgctcctgttgctgttgtgcgtctttctggtgaagagccagggggtgaacgacaacgaagagggattcttcagcgcgcggggccatagaccgctggacaaaaagagagaggaggctccatccctcagacctgccccgcccccgatctcgggagggggctaccgcgcacgtccagcaaaagcagccgccacccagaagaaagtggagaggaaggccccggacgccggcggatgcctgcatgcggaccctgacctcggcgtgctgtgtcccaccggttgccagcttcaggaagccctcctgcagcaagagcggccaatccggaattctgtcgacgagctcaataacaacgtggaagcagtgtcgcagacgtcatcctccagcttccaatacatgtacctgctgaaggatctgtggcagaagcgccaaaagcaggtgaaggacaacgaaaatgtcgtgaacgaatactcatcagaacttgaaaaacaccagctgtatatcgatgagactgtgaattccaacatcccgaccaacctgcgagtgctcagatccatcctcgaaaatctgcgctctaagatccagaaacttgagagcgatgtgtccgctcaaatggagtactgccgcactccttgcactgtctcatgcaatattcctgtcgtgtccgggaaggagtgtgaagaaattatccgcaagggcggcgaaacctcggaaatgtacctgatccaaccggattcatcagtgaagccgtaccgcgtctactgcgacatgaatactgagaatggaggatggactgtcatccagaaccgccaggacggatcggtggacttcggacgcaagtgggacccgtataagcagggatttggaaatgtcgcaactaacaccgatggaaaaaattactgcgggttgccaggagagtattggcttggaaacgataagatctcgcaactgacgcggatggggccgaccgagctcctgatcgaaatggaagattggaaaggagacaaggtgaaggcccactacggaggtttcaccgtgcagaatgaagcgaacaaataccaaatctccgtgaacaagtacagaggcaccgccgggaacgcgttgatggacggcgcgagccagctgatgggtgaaaatcggaccatgactatccataacggcatgttcttcagcacctacgatagggacaacgacggatggctcacctccgatccccggaaacaatgctcgaaggaggacggaggaggttggtggtacaaccggtgtcatgctgctaacccaaacggtcgctactactggggtggccaatacacttgggatatggccaaacacggaacggatgacggagtcgtttggatgaactggaagggatcgtggtactcgatgagaaagatgagtatgaagattaggccattcttcccgcagcaa

SEQ ID NO: 153147 - DNA, 1473 bp, Artificial Sequence
  derived and/or modified sequence
atgaaacgtatggtgtcctggtcattccataaactgaagacgatgaaacacctgctgctgcttctgctgtgcgtatttttggtgaaaagccaaggagttaacgacaacgaagaaggtttcttttcagctcgcggtcatcgtccactggataagaaacgcgaggaagcgccgtctctgcgccctgcgcctcctcctatcagcggtggtggctatcgagcacgcccggccaaggccgcggccacccaaaaaaaggtcgagcgcaaagcgcctgatgctggtggttgtctgcatgcagaccccgatctgggcgttctgtgtcctaccggatgccagctgcaagaggccttactgcagcaggagcgccctattcgtaatagcgtggacgagctgaataacaacgtggaggcggtgagccagacttccagctcatcttttcaatatatgtatttgctgaaagacctgtggcagaagcgccagaaacaggttaaggataacgaaaacgttgtgaacgagtactcttctgaactggagaagcatcaactgtacattgacgagactgtcaactcaaacattccaacaaatctgcgcgtcctgcgctccatactggaaaatctgcgcagcaaaattcaaaaattggaaagcgacgtgagtgcccaaatggaatattgtcgcaccccctgcacggtcagctgcaatattccggttgtcagcggcaaggagtgtgaggagattatccgcaaaggtggcgaaacctctgaaatgtatctcatccagccggacagcagcgtgaaaccataccgcgtgtactgcgacatgaacaccgagaatggcggttggacagtgattcaaaaccgccaggacggctcagtggactttggacgcaagtgggatccgtataaacagggtttcgggaatgtagcgacgaacaccgacggtaagaactactgcggtttgcctggcgagtattggcttggtaatgacaagatttctcaactgacccgaatgggtccgaccgaactgctgatcgagatggaggattggaagggtgacaaggtcaaggcccattacggtggtttcaccgtccaaaacgaggcaaacaagtaccaaatcagcgtcaataagtatcgcggcacggctggtaatgccctgatggatggtgcaagccagctaatgggtgagaaccgcacaatgactatccataacggcatgttcttttcgacctatgaccgcgataacgatggatggttgaccagcgatccgcgcaaacagtgtagcaaggaggacggcggaggctggtggtacaatcgatgtcacgcggccaaccccaacgggcgctactactggggtggccagtatacctgggatatggcgaaacatgggaccgatgacggcgtcgtctggatgaattggaagggcagctggtactcaatgcgcaaaatgagcatgaagattcgcccattcttcccccagcaa

SEQ ID NO: 153148 - DNA, 1473 bp, Artificial Sequence
  derived and/or modified sequence
atgaagcgtatggtgagttggtcatttcataaactaaaaaccatgaaacacctcttactgttgttgctatgcgtgttcctggtaaagtcccagggggtgaatgataatgaggagggcttcttctctgcgcggggccataggccattggataagaaacgcgaagaagctccatccctgaggccagcccctccacccatctctgggggcggttaccgggccagacctgccaaagcagcggccacccagaagaaagtggaacggaaagctccagatgctggcggctgtcttcacgcagaccctgacttgggtgtgctctgccccaccggttgccagctccaggaggctcttctgcagcaggagagacccatcaggaattcagtcgacgagctgaataataatgtggaggcagtatcacagacttcctcatcaagtttccagtatatgtacttgttgaaggatctctggcagaagaggcagaaacaggtgaaggataacgaaaacgtcgtcaatgaatattcatcagaacttgagaagcatcagctctacattgacgagaccgtcaatagtaacatccctactaacctgagagtcctgagaagcattttggaaaatctccggagcaaaatacaaaagttagagtccgacgtttctgctcagatggagtactgtcggacaccctgcaccgtgtcctgtaacattccagtggtgtccggaaaagagtgcgaagagataatcaggaagggcggcgaaacgagcgaaatgtatctgattcaaccagacagttctgtgaaaccctatcgagtctactgtgatatgaacacagagaatggcggatggaccgtgatccagaatcggcaggatggcagtgtggacttcggaaggaagtgggatccttataagcagggattcggcaacgtcgcaacaaatactgacgggaaaaattattgtggcttgcccggggagtattggttggggaacgacaagatctcacagttaactcgcatgggtccaaccgagcttctgatcgagatggaggactggaaaggcgacaaggtcaaggctcactacggaggctttactgtccaaaacgaggcaaacaaataccagatcagcgttaataagtacagggggaccgcaggaaatgctctgatggacggcgcttctcagctgatgggagagaaccgcacaatgactattcataacgggatgtttttcagcacatacgaccgggacaacgacggttggcttacctccgatcctcggaaacagtgctcaaaagaggacgggggaggctggtggtataacaggtgccatgccgccaaccctaatgggcgctactattggggcgggcagtatacttgggatatggcgaagcacggcaccgatgacggtgtagtatggatgaattggaaagggtcttggtacagcatgcggaagatgtccatgaagataaggcccttttttccccagcag

SEQ ID NO: 153149 - DNA, 1473 bp, Artificial Sequence
  derived and/or modified sequence
atgaaacgcatggtgtcctggagcttccacaagctgaaaactatgaaacatctgttgctgctgcttctctgcgtgttcctggtgaaaagccagggggtcaatgataacgaagaaggatttttctcagcgaggggacacagaccactggataagaagcgggaagaggccccgtcacttcggccagcaccgccacctatctcgggtggaggataccgggctaggcccgctaaggcggcagcgactcagaagaaggtcgaacgcaaagctccggacgccggaggatgtctgcatgccgaccccgaccttggggtgctgtgtcctaccggatgccagctgcaggaggcactgcttcagcaggaacgaccaatccgcaactccgtcgacgagcttaacaacaatgtcgaagcagtgtcccagacctcctcctcatcgttccaatacatgtacctgttgaaagatctgtggcagaagcggcagaaacaggtgaaagataacgagaacgtggtgaatgaatactcctccgaacttgagaaacaccagctgtatatcgacgaaactgtgaacagcaacatcccgaccaacttgcgtgtgctccgctcgatcctggaaaatctgcgatctaagatccagaagctcgagagcgacgtgagcgcacagatggaatactgcaggactccgtgtaccgtgtcttgtaacattccggtcgtgtcaggaaaggagtgcgaggaaatcattcgcaaaggcggcgaaacctccgaaatgtacctgatccaaccagactcatcagtgaaaccgtatcgcgtctactgcgatatgaatactgaaaatggaggatggaccgtgatccagaaccgccaagacggctcagtggacttcggccggaagtgggacccgtacaaacaaggattcggaaacgtggccaccaacaccgatggcaagaattactgtggactcccaggcgaatactggctgggcaatgacaagatctcccaactgactcgcatgggcccaaccgaactgctcatcgaaatggaggactggaagggtgacaaagtgaaggctcattatggaggattcactgtccagaatgaagcgaataagtaccagatcagcgttaacaagtaccggggcaccgcgggcaatgccctgatggatggggcctcgcagctgatgggagaaaaccgcaccatgacgatccacaacggaatgttcttcagcacctacgacagggataacgatggctggttgacttcggatcctagaaaacagtgttccaaggaggacggaggaggttggtggtataaccgctgccatgccgctaatccaaacggaagatactactggggaggccaatacacctgggacatggcaaagcacggcaccgatgacggagtggtgtggatgaactggaagggatcatggtacagcatgaggaagatgtcgatgaagatccgcccattctttccgcagcag

SEQ ID NO: 153150 - DNA, 1473 bp, Artificial Sequence
  derived and/or modified sequence
atgaagcggatggtgtcatggtcatttcacaagttgaaaacaatgaaacacctactgctgctgctgctttgtgtattcttggttaagtctcaaggtgtgaatgacaatgaggaagggttcttctccgcacgaggccatcggcccctggataagaagagagaggaagccccctcgcttcggcccgccccccctcccatctctggcggcgggtaccgggcacgcccggctaaggccgcagcgacccagaagaaagttgagaggaaagcgcctgacgcagggggctgtcttcacgctgaccctgatctcggcgtgttgtgccccactggatgccagctgcaggaggccttgctgcagcaggagcgccccatcagaaattcagtggacgaattgaataacaacgttgaagctgtgagtcagacatcatcctcttcgtttcagtacatgtatctgcttaaggatctgtggcagaaacgacagaaacaagtaaaggacaacgagaacgtggtgaacgaatacagctcagaattagaaaaacaccagctgtatatcgacgagactgtgaacagtaacatcccaaccaatttacgagtgctccgctccatcctggaaaacttgcggtctaaaatccagaaacttgagtcagatgtcagcgcacaaatggagtattgtaggacaccgtgtaccgtatcatgcaatatccctgtcgtatccgggaaggaatgcgaggaaatcatccgaaagggcggggagacatctgaaatgtacctgatccaaccagacagttccgtcaaaccctatagggtgtattgcgacatgaataccgaaaatggggggtggacagtcatacagaatcgacaggatgggagcgttgacttcggacgtaaatgggacccctataagcaaggattcggaaatgtggctacaaataccgacggcaagaattattgtggcttgcctggggagtactggctgggcaacgacaagatatctcagctgacccgcatgggacctactgaattactgatcgagatggaggattggaagggcgataaagtgaaagcccattacggtggtttcacagtacagaacgaagccaataaatatcagatttcagttaataaataccgtggcacagcaggcaacgcactcatggacggggcctctcagctgatgggtgagaatcgcactatgacgatacataacggcatgttcttttctacatatgacagagacaatgacgggtggctgactagcgaccctaggaagcagtgtagcaaagaggacggcggtgggtggtggtataaccgctgccacgcggcgaaccccaatggacgctattactggggggggcagtacacatgggacatggccaaacacggcacagatgacggggtggtttggatgaattggaagggttcttggtactcaatgcgaaaaatgtctatgaagattcgtcccttctttccacagcag

SEQ ID NO: 153151 - DNA, 1473 bp, Artificial Sequence
  derived and/or modified sequence
atgaaacgaatggtgtcatggtccttccacaaactgaagaccatgaaacacctgttactattgttgttgtgcgtgtttttggtgaagtcgcagggggtaaacgacaacgaagaaggtttcttctcagccagaggtcatagaccactagataagaaacgcgaggaggctccgtcattgcggcctgcaccccccccaatatctggagggggctaccgggccagacccgcaaaagctgctgctacccagaagaaggtggaaagaaaggcgccagacgctgggggttgcctgcacgcagaccctgatcttggcgtgctgtgtcccacagggtgtcagctccaggaggcgctcctgcagcaggagaggcctattcggaacagtgttgatgaattgaacaacaacgtggaggcagtaagccaaacgtcatcatctagctttcagtacatgtacctgcttaaagatttgtggcagaagcgtcagaagcaggtaaaggataacgaaaacgtggtgaatgaatatagcagtgaattggagaagcaccagctatacatcgacgagacagtgaacagtaacattcccacaaatttacgggtgctgaggtccatcctggaaaacctgcggagtaaaattcagaagttagaatccgatgtatctgcgcagatggaatattgtcggaccccttgcacggtaagttgcaatattcccgtcgtgagcggcaaggagtgcgaggagatcatacgcaaaggcggcgagacaagcgagatgtatctaattcaaccagattcctcagttaaaccttaccgggtatattgtgacatgaacaccgaaaacgggggctggacagtgattcagaaccgccaggacggctctgttgatttcggtcgcaagtgggatccttataagcagggatttgggaatgtagccacaaacacagatggcaagaactattgtggactgccgggtgaatactggctcggcaacgataaaatttcccaacttactcggatggggcccaccgagctgctgatcgaaatggaagattggaaaggagacaaggtcaaggcccactacggcggcttcacagtgcaaaatgaagccaataagtaccagattagcgtaaacaagtaccgtggaactgctgggaacgccctcatggacggcgcctctcagttaatgggcgaaaataggacaatgacgatccacaatggcatgttctttagcacctatgatcgtgataatgatgggtggctgaccagcgacccacggaagcagtgttcgaaagaggatggaggcggctggtggtacaatcggtgccacgcggctaatcccaatggcaggtattactggggcgggcagtatacttgggacatggccaagcacggcactgatgatggtgtggtgtggatgaattggaaaggcagctggtattctatgcggaaaatgagcatgaagatccggcctttcttcccacagcag

SEQ ID NO: 153152 - DNA, 1473 bp, Artificial Sequence
  derived and/or modified sequence
atgaaaaggatggtatcctggtcttttcataaattaaaaactatgaaacatttattattattattactttgtgtttttttagttaaatcacagggggtaaatgataatgaagaaggatttttttctgcaagaggtcatagaccattagataagaaaagagaagaagcaccaagtttaagaccagcaccaccaccaatatcaggaggaggttatagagctagaccagctaaagctgcagctactcaaaaaaaggttgaaagaaaagctccagacgctggtggatgtcttcatgcagatcctgatttaggagtactttgtccaacaggatgtcaattacaagaagcattacttcaacaagaaagacctattaggaattcagttgatgaattaaacaacaatgttgaagctgtttcacaaacatcttcctcaagtttccaatatatgtatttattaaaggatctttggcaaaaaagacaaaaacaagttaaagataatgaaaatgtagttaatgaatattcatcagaattagaaaaacatcaactttatattgacgaaacagttaattcaaacattccaactaatcttagagtattaagatctattcttgaaaatttaagatctaagatacaaaagttagaatctgatgtttcagctcaaatggaatattgtagaactccatgtacagtctcttgtaatattccagttgttagtggaaaagaatgtgaagaaattattagaaaaggtggagaaacatctgaaatgtatttgattcaacctgattcttcagttaaaccatatcgagtttattgtgacatgaatactgaaaatggtggttggactgttattcaaaatagacaagatggaagtgttgatttcggaagaaaatgggatccttataaacaaggattcggaaatgtagcaacaaatactgatggtaagaattattgtggacttccaggagaatattggttaggaaatgataaaattagtcaattaacaagaatgggtccaactgaacttttaattgaaatggaagattggaagggagataaagttaaagcacattatggagggtttacagttcaaaatgaagcaaataaatatcaaatctctgttaataagtatagaggtacagccggaaatgcacttatggatggtgcatcacaattgatgggagaaaaccgtacaatgactattcataatggtatgtttttcagtacttatgatagagataatgatgggtggttaacttctgatccaaggaaacaatgttcaaaggaagatggtggaggatggtggtataatagatgtcatgctgctaacccaaatggtagatattactggggaggacaatatacttgggatatggctaaacatggaacagatgatggtgttgtttggatgaattggaaaggatcttggtattctatgcgaaaaatgtcaatgaaaataagaccattttttccacaacaa

SEQ ID NO: 153153 - DNA, 1473 bp, Artificial Sequence
  derived and/or modified sequence
atgaagcgtatggtgagctggagctttcataagctcaaaacgatgaagcaccttctgcttcttctgctttgtgtgtttttggtgaagtcgcaaggagtcaacgacaacgaagaaggctttttctctgcacggggtcacaggccccttgataagaaacgagaagaagcaccatcccttcgacctgcacccccacctatctctggtggtggctacagagctaggccagctaaagcagcagcaacccagaaaaaggtggagagaaaagcgccagatgcaggtggttgtctgcacgcggatccagatcttggagtgctgtgcccaaccggatgtcagctgcaagaggcactgctgcagcaagagcgcccaattcgaaattctgtggatgaactcaacaacaacgtcgaagcggtgtcgcaaaccagctcctcctcgtttcaatacatgtaccttctcaaagacctgtggcagaagcgccaaaaacaagtgaaagataacgaaaacgtggtcaatgaatactcctcagaacttgagaaacaccaactttacatcgacgaaactgtcaactcgaacatcccgactaatctgcgcgtgctccggtcgatccttgagaacttgcggagcaagattcagaaacttgaatcggacgtgtcagcacagatggagtactgtaggactccttgcactgtgtcctgtaatatccctgtcgtgtccggtaaagaatgtgaggaaatcataagaaagggtggagaaactagcgaaatgtaccttattcaaccagacagctccgtcaagccttaccgggtgtattgtgacatgaatactgaaaatggaggctggactgtgatccagaacagacaggatggaagtgtggatttcggtcggaaatgggatccatacaaacagggctttggaaacgtggcaactaacactgatgggaagaattactgtggactgccaggagaatactggctggggaatgacaagatttcacaactgacccgaatgggtccaacggagcttctgattgagatggaagattggaaaggggacaaggtcaaagcacactacggaggctttaccgtccagaacgaggctaacaaataccaaattagcgtcaacaagtacagaggtaccgcgggaaatgcccttatggatggagcatcccaacttatgggcgaaaatcgtaccatgactattcataatggtatgttcttctcaacctacgaccgcgacaatgacgggtggctcacctccgatcctaggaagcaatgtagcaaggaagatggaggaggctggtggtataatcggtgtcacgcagctaatcctaatggtcgttattactggggcggacaatatacctgggacatggcaaagcacggtacggatgatggggttgtctggatgaactggaaggggtcatggtactccatgagaaagatgtcaatgaagattcggcccttttttcctcaacaa

SEQ ID NO: 153154 - DNA, 1473 bp, Artificial Sequence
  derived and/or modified sequence
atgaagcgcatggtctcatggtcctttcacaaactcaaaacaatgaagcacctgctcctgcttctgttatgcgtctttctggtgaaaagtcaaggggtgaacgataatgaagaaggattttttagtgcccgcgggcacagaccactcgataaaaagagggaagaggcaccatccttaaggcccgctccccctcctatctcaggcgggggatacagggctcggcccgcaaaagcagccgctacccaaaaaaaagtagaacgcaaagccccagacgcaggaggctgccttcatgctgatccagaccttggagtgctttgccccactggctgccagctgcaagaggcccttctgcagcaggaaagaccaatcagaaactctgtcgatgaacttaacaataatgtggaagccgtaagccagaccagctcgagctcgtttcagtacatgtacctgctcaaggatctgtggcaaaaacggcagaagcaggttaaggacaacgagaacgtagtaaatgagtactcgagtgagctcgaaaagcaccaactgtacattgacgaaactgtcaacagtaatatccctaccaatctacgtgtgttacgcagcatccttgagaacctccgctcgaagatccaaaagctcgaaagtgacgtcagcgctcagatggaatactgtagaactccatgcactgtcagttgcaacatcccagtagtgagtggtaaagagtgtgaagagatcatccgcaaagggggcgaaacatctgaaatgtatctgattcagcccgatagcagcgtcaagccatacagggtgtactgtgacatgaataccgagaacggcggatggaccgttatacagaatagacaggatggtagtgtggactttgggagaaagtgggacccgtataaacagggattcgggaatgtggctacaaacactgatggcaagaactactgcggcctgcccggagaatattggttgggaaacgataagatctcccagttgaccaggatgggaccaaccgagctgctcatcgagatggaagattggaaaggagataaagtgaaagctcattacggcggcttcacagtgcaaaacgaggctaacaaatatcaaatctcagtgaacaaatatagaggtactgcgggcaatgcgctgatggacggggctagccagctgatgggagaaaacagaacaatgaccatccacaacggaatgtttttcagcacctacgaccgggacaatgatggatggcttacttctgatcccaggaagcaatgtagtaaagaggacggtggcggttggtggtataataggtgtcacgccgccaacccgaatggcaggtattactgggggggacaatacacttgggacatggctaagcacggaaccgacgatggagtggtgtggatgaattggaagggaagctggtactccatgcgtaagatgtcaatgaagatccgccctttcttcccccagcag

SEQ ID NO: 153155 - DNA, 1473 bp, Artificial Sequence
  derived and/or modified sequence
atgaagagaatggtgagctggtcttttcataaacttaagaccatgaaacacttactgctgctgctgctttgcgtcttcctcgtcaagagccaaggcgtgaatgataacgaagaaggtttcttttctgcaaggggccatcgacctctggacaaaaagcgagaagaggcaccatccttgcgacccgccccaccacccatctccggcggcggctaccgagcacgtcccgccaaggcggccgctacacagaagaaggtcgaaaggaaagctcccgacgctgggggctgccttcatgctgaccctgacctcggagttttgtgccctaccggctgccaacttcaggaggcactcctgcaacaggaaagacccattagaaatagcgtagacgagctgaacaataatgtcgaggcggtctcgcagaccagtagttcctcatttcagtatatgtatcttctaaaggatctctggcagaagcgccagaagcaagtgaaagacaatgagaacgtagtgaatgaatacagctctgaactggagaagcaccagctctatatcgacgagactgtcaactcgaacatccctaccaacttgagagtgctacgaagcattcttgagaaccttaggagtaagattcagaaactggagagcgacgtgagtgctcaaatggaatattgcaggaccccttgtacggtgtcctgcaacatccccgttgtcagtggtaaggaatgtgaggaaatcattcgtaaagggggtgaaacttccgagatgtatctgatacagcccgattcttccgtgaagccatacagagtttattgcgacatgaacaccgaaaacggcgggtggaccgtgatacagaacaggcaggacggcagcgtagattttggacgaaagtgggatccatacaagcagggcttcggcaacgtcgccaccaatactgacgggaaaaactattgcggacttcccggtgagtattggcttggcaacgacaagattagccaattaacgcgaatgggcccaaccgagcttctgatcgaaatggaagactggaagggcgacaaagtgaaggcgcactatggcggatttacagtgcaaaacgaagccaataagtatcagatctccgtcaacaaatatagagggactgcgggcaatgcgctgatggacggggctagtcagttgatgggggagaatcgtacaatgacgatacacaacggcatgtttttctccacgtatgaccgagataatgatggatggctgacttcggacccaaggaaacagtgctcaaaggaggatggggggggctggtggtacaacaggtgccatgcggctaatccaaatggcagatactattggggcggccaatatacctgggatatggctaaacatggtactgacgatggcgttgtgtggatgaattggaagggctcctggtacagcatgaggaagatgagcatgaagataaggccattttttcctcaacaa

SEQ ID NO: 153156 - DNA, 1473 bp, Artificial Sequence
  derived and/or modified sequence
atgaagaggatggtgtcctggtctttccacaaactgaaaacgatgaagcatctgctgctcctcctcctctgtgtgtttctggtcaagtctcaaggggtgaatgacaacgaagagggattcttcagcgccaggggacaccgccccttggacaagaagcgcgaggaagcgcctagcttgcggccggccccgcccccgatctccggaggaggataccgcgcgcggccagctaaggcggccgctactcagaaaaaggtggaaagaaaggctccagacgccgggggctgtctgcatgcggatccggacctgggtgtgctctgtccaactggctgtcagctccaagaggccctgctccagcaggaaagaccaatccggaactccgttgacgaactgaacaacaatgtggaagccgtgtcccaaacttcatcgtcatcctttcagtacatgtacctgcttaaggacctgtggcagaagcggcagaagcaggtgaaggataacgagaacgtggtgaacgagtacagcagcgagttggaaaagcatcagctttacatagacgaaaccgttaactccaatattccgactaatctgcgagtgctgcggtccatcttggagaacctgcggagcaagatccagaagctcgaatccgatgtgtccgcccagatggaatactgtcgtaccccatgcacggtgagttgtaatatcccggtggtgtcaggaaaggaatgcgaggagattatccggaaaggcggagaaacctccgaaatgtacttgatccagccagattcatcagtgaagccgtatcgggtctactgcgatatgaatactgagaatggaggatggaccgtgattcagaacagacaggacggatcggtggactttgggcgaaagtgggacccttacaagcagggatttggaaacgtggcgaccaacaccgatggtaaaaactactgcgggctgcccggagaatactggctgggcaatgacaagatctctcagcttactaggatgggtcctaccgaactgttgatcgagatggaagattggaagggagataaggtgaaggcacactacggtgggttcactgtccagaacgaggcaaacaaataccagatcagcgtgaacaagtaccggggcaccgcgggcaatgccctgatggacggagcctcgcagctcatgggagagaacagaaccatgaccatccataacggcatgttctttagcacttacgatcgcgataacgacgggtggctgacttcagaccccagaaagcagtgctcgaaggaggacgggggaggatggtggtacaaccgctgccacgctgccaacccaaatggacgctactactggggcggacagtacacttgggacatggccaaacacggaaccgacgacggagtggtgtggatgaattggaaaggatcctggtactccatgcggaaaatgagcatgaagatccgcccgttcttcccgcagcag

SEQ ID NO: 153157 - DNA, 1473 bp, Artificial Sequence
  derived and/or modified sequence
atgaagcgaatggtgtcttggtcttttcacaaattgaaaaccatgaagcaccttctccttctcctgctctgcgttttcctggtgaagagtcagggagtgaacgacaacgaggagggcttcttctctgcccggggccacagacccctcgacaagaagagggaagaggcaccgtcactgcgaccggcgcccccaccaattagtggaggcggctatagggcccgccctgccaaggccgccgccacacagaagaaggtcgagcgcaaagcccccgatgctggcggttgcctgcatgcggatccagatttgggtgtactctgcccaactggctgtcaactgcaggaggccctcctgcagcaggaacgacctattcgcaattcggtcgatgaactgaacaacaacgtggaagcagtgagccagaccagtagttcgagcttccaatatatgtatcttctaaaggatctctggcaaaagcggcagaagcaggtgaaggacaacgagaacgtggtcaacgagtacagttccgaactggagaaacaccagctttacattgatgaaaccgttaactccaacatacccaccaatctgcgcgtactccggtccatactggagaatctacgaagcaagattcagaaactggagtctgatgtgtccgcacagatggaatattgtagaacaccatgtactgtctcatgcaatatacccgtggtcagtggaaaggagtgtgaggaaatcattcgcaagggtggagagacgtctgagatgtatctaattcagcctgactccagtgtgaagccttaccgggtatattgtgatatgaacaccgaaaacggagggtggacagtgatccaaaataggcaggatgggagcgtcgatttcggacggaaatgggatccgtataagcaggggtttgggaatgttgccacaaacaccgatgggaaaaactactgcggcctccctggcgaatactggttaggcaacgacaaaatatcacagctaacgcggatgggtcctacagagctgctgattgaaatggaggattggaaaggggacaaggtgaaagcccactacggcgggttcaccgtgcagaatgaggctaataaatatcagatatccgtgaataagtacagaggtacagccggaaatgcactgatggatggtgcttcacaactgatgggcgagaataggacaatgacaattcataacggcatgttcttctcaacatatgatcgtgataacgacggctggcttaccagtgatccacggaagcaatgtagtaaagaagacggcgggggctggtggtataacagatgccacgccgctaatccaaacggacgttattactggggtggacaatatacttgggatatggccaagcatggaaccgatgatggggttgtatggatgaattggaagggttcttggtatagtatgcgaaagatgagcatgaagatcagacccttttttccacaacag

SEQ ID NO: 153158 - DNA, 1473 bp, Artificial Sequence
  derived and/or modified sequence
atgaaacggatggtgtcttggtcatttcataaactcaagaccatgaagcatctcctgctgctcctcttgtgtgtttttctcgttaagagccagggggtaaatgataatgaagaagggttcttttccgcacgcggtcacaggccacttgataagaaacgagaagaagctccttcacttagacctgcccctccgccaatatcgggcggtggttacagagcgcgtccagcaaaggccgcagcgactcagaagaaagtggaacgcaaggcacctgacgcaggcggatgtctgcacgcagaccccgatctgggggtgttgtgtcctactggatgtcaactccaggaggccctgctccaacaggaaagaccgattagaaactccgtcgatgagctgaacaataacgtcgaggcggtgtcacagacctcgtcctctagctttcagtacatgtaccttcttaaggatctttggcaaaagcgacaaaagcaagtgaaagacaatgagaacgtagtgaatgagtactctagcgaattggagaagcatcaactgtacatcgacgagactgtcaatagcaatatcccgaccaaccttagggtgcttagatcaatcctcgaaaacttgcgctcgaagattcagaaactggaatccgatgtgtcggcacaaatggaatattgtaggactccttgcaccgtgtcgtgtaacattcccgtcgtgtccggtaaggagtgtgaagaaatcattcgcaaaggaggcgaaacctccgaaatgtaccttattcaacctgacagcagcgtgaagccttaccgcgtttactgcgatatgaacactgagaacgggggatggactgtaattcaaaatagacaagacggttccgtggatttcggaagaaagtgggatccatacaagcagggctttggtaacgtggcaaccaataccgacggcaaaaactactgcggactgcctggagaatactggcttggaaacgataagattagtcagctgacccggatggggccaaccgagcttttgatagaaatggaagattggaagggagataaggtcaaggcacattacggcggatttaccgtccagaacgaggctaataagtaccaaatctcagtgaacaaatatcgcggaactgcgggtaacgccctgatggatggtgcttcgcaactgatgggagaaaacaggactatgacgatccataatggcatgttctttagcacctatgaccgagataacgatggttggttgacttcggacccccgtaagcagtgctcgaaagaagatgggggaggttggtggtacaatcgttgccacgccgcaaacccaaatgggagatactactggggcggacagtacacctgggatatggcaaaacatggaacggatgacggggttgtgtggatgaactggaagggttcgtggtactctatgcggaagatgtccatgaaaattcggccgttcttcccccaacaa

SEQ ID NO: 153159 - DNA, 1473 bp, Artificial Sequence
  derived and/or modified sequence
atgaagcgcatggtgagctggtccttccacaaacttaagaccatgaagcaccttttgctgttgttgctctgcgttttcctcgtcaagtcgcaaggggtgaacgacaatgaggaaggattcttttcggccagagggcaccggccgctggacaagaagagggaagaagccccgtcactgcgcccggccccaccgcccatcagtggaggaggataccgggcaagacccgccaaggccgcggctacccagaagaaggtggaacggaaagctccggatgcaggaggatgccttcacgcggacccagatctcggggtgctgtgtcctaccggctgccaactgcaagaagcactcttgcagcaggaacggcctatccgaaatagcgtggatgagctgaacaacaacgtggaggctgtgtcgcagacttccagctcgtccttccaatacatgtacctgctcaaagacctctggcagaagagacaaaagcaggtgaaagataatgaaaacgtggtgaatgaatactcctctgagcttgagaagcatcaactgtacattgacgaaaccgtgaactccaatatcccaactaacctgcgcgtcctgcgcagcatactggaaaacctgcggtcgaaaatccagaaactggaatcagacgtgtccgcacaaatggagtactgcaggacgccgtgcactgtgtcgtgcaacatcccggtggtgtcaggcaaggagtgcgaagaaatcatccgcaaggggggagaaacctctgagatgtacctcatccagccggacagcagcgtcaaaccgtaccgcgtatactgtgatatgaacacggagaacggagggtggacggttatccagaatcggcaggacggttctgtggatttcggacggaagtgggatccctacaagcagggatttggcaacgtggccactaatacggacggaaagaattactgcgggctcccgggtgaatattggcttggaaacgacaaaatctcccaactcactcgcatgggccctaccgaattgctgatcgaaatggaggactggaaaggggacaaagtgaaggcccactatggggggttcactgtgcagaacgaagcgaataagtaccaaatcagcgtgaacaagtaccggggcaccgctgggaatgccctgatggacggagcttcccagttgatgggagagaatcggaccatgactatccacaacggaatgttcttctccacttacgaccgggacaacgatggctggttgacttcagacccgcggaagcagtgtagtaaggaagatggagggggctggtggtacaaccgctgccacgccgccaacccaaacggacgttattactggggaggacagtacacctgggatatggccaaacacggtaccgacgacggagttgtctggatgaattggaagggttcgtggtactcaatgagaaaaatgtccatgaaaattcggccattctttccacagcag

SEQ ID NO: 153160 - DNA, 1473 bp, Artificial Sequence
  derived and/or modified sequence
atgaagcggatggtgtcctggtcatttcataagctgaaaacgatgaaacatctgctcctgcttctcttgtgcgtgtttctggtcaagagccagggcgttaatgataacgaagaaggatttttctcggccaggggtcaccgcccgcttgataagaaacgtgaagaagcaccttcgctgcggcccgcaccaccaccgatatcgggaggtggctaccgcgcacggcctgccaaggcagcagcaacccaaaagaaggtcgaacgcaaggcgcctgatgcaggtggctgtctgcatgctgaccccgacctcggggtgctctgtcctacgggctgtcaactgcaagaggccctcttgcaacaggagaggcctattaggaacagcgtggatgagctgaacaataatgtcgaagcggtgagccagacctcatcatcctcctttcaatacatgtatctgctgaaagatctgtggcagaagaggcagaagcaagtgaaggacaatgagaacgtggtcaatgagtacagttcggagctggaaaagcatcagctttacattgatgaaacggtgaacagcaatatccctaccaaccttcgagtgctgagatcaatcctcgagaacctgagatctaagattcagaaacttgaatcggatgtgtcagcgcaaatggagtactgtcgaactccatgcactgtgagctgtaacatacccgtggtgtctggaaaagaatgtgaagagattatcagaaaagggggcgaaacctcggagatgtacctgatacagccggattcgagcgtgaagccataccgggtgtactgtgatatgaatactgaaaacggaggatggaccgtcatccaaaatcggcaagacgggtccgtcgattttggaagaaagtgggatccttacaagcaaggattcggaaacgtggctacgaacaccgacgggaaaaactactgcggccttcctggagaatactggctgggaaacgacaagattagccaacttactcggatgggtcccactgaacttcttatagaaatggaagattggaagggcgataaggtgaaagcgcattacggcggatttaccgtgcaaaacgaagcaaataagtaccagatctcggtcaacaaataccggggaaccgcaggtaacgcactgatggatggggcttcgcagttgatgggtgagaacagaaccatgaccattcataacggtatgttcttttccacctacgatagagataatgatggatggctgacctctgatccccgaaaacaatgttcgaaagaggacgggggtggatggtggtacaacagatgccatgccgcaaatccgaacggccggtactattggggtggacagtacacgtgggacatggctaagcacggaactgatgatggcgtggtgtggatgaactggaaaggatcctggtactccatgagaaagatgagcatgaagattcgaccgttttttccacagcaa

SEQ ID NO: 153161 - DNA, 1473 bp, Artificial Sequence
  derived and/or modified sequence
atgaaaaggatggttagctggtcttttcacaaattaaaaacgatgaaacatcttcttttattattactgtgcgtgtttttggttaagagccaaggagtaaacgataatgaagaaggctttttttccgcccgcggtcatcgaccgcttgataaaaaacgggaagaggcaccttcgttgagacctgctccgcctcccatctcaggaggaggttaccgcgcaagaccagcaaaggctgccgcgacgcaaaaaaaagtggaaagaaaagcgccagatgcgggcggctgcctgcatgctgatccagatttaggcgtcctatgtcctactggctgtcagctacaagaagccctgctccagcaagaaagaccgattagaaactcagttgacgaactcaataataacgtagaagctgtcagccaaacatctagttctagttttcagtacatgtatcttctcaaagacctgtggcagaaacgacaaaaacaggtgaaagataatgaaaacgttgtaaacgagtattcatctgagttagaaaagcaccaactatatattgacgaaaccgtaaattctaacattcctacgaatttacgggtgctgcgaagcattttggaaaatctgagatccaaaattcagaaactcgagagcgatgtttcggctcaaatggagtactgtcgtacaccttgtaccgtcagctgtaacattcccgtggtcagcggcaaggaatgtgaagaaattatccgtaaaggaggcgagacgagcgaaatgtatctgattcaaccggactcttcggtaaagccgtatagggtctattgcgatatgaacacggaaaacggtggatggacggtcattcaaaatagacaggacggatcagtcgactttggacgaaaatgggatccgtataaacagggctttggtaacgtcgccaccaatacagatggcaaaaactattgcgggctacctggagaatactggctaggaaatgacaaaatctcacagttgacacgtatggggcctactgaattgttaattgaaatggaggactggaagggtgataaagtgaaagcacattacggtggtttcacggtgcaaaatgaagccaacaaatatcagatctcagtgaacaaatatcgtggaacagcgggcaatgcgttgatggacggcgcctctcaacttatgggcgaaaatagaactatgaccatccataacgggatgtttttttcaacatatgatagagacaatgacggatggcttacgtcggatcctcgcaagcagtgttccaaggaagatggaggagggtggtggtataatagatgccacgccgccaacccgaacggcagatattattggggtggacagtatacatgggatatggccaaacatggtacagatgacggcgtagtttggatgaactggaaaggctcatggtattccatgcgcaaaatgtctatgaagatccgcccttttttcccgcaacag

SEQ ID NO: 153162 - DNA, 1473 bp, Artificial Sequence
  derived and/or modified sequence
atgaagaggatggtcagttggtccttccataagctgaaaactatgaagcaccttctcctgctcctgctgtgcgtgtttctcgtcaagtcacaaggggtgaacgacaacgaggaaggctttttctctgccaggggacataggccccttgacaaaaagcgagaagaggcacccagcttgcgtccggcccctccaccaatttcaggcggaggataccgcgcccgcccggcaaaggccgcggcaacccagaaaaaagtggaaagaaaagctcccgatgctggaggctgcctgcacgccgacccggacctgggagtgctgtgccctacgggatgccagctgcaagaagcgctcctgcaacaggagcggccgatccgcaactccgtggatgagctcaacaacaatgtggaggcggtgtcgcagacctcctcgtcctccttccagtacatgtacctcctgaaggatctctggcaaaaacgccagaagcaggtgaaggacaacgagaatgtcgtcaacgagtactcttcagaactggaaaagcaccaactgtacatcgacgaaactgtcaactctaacattccgaccaatctgcgcgtcctcagatcaatcctcgagaatctcagaagcaaaatccagaagctggaatctgatgtctccgcccaaatggagtattgcagaacgccttgcactgtgtcatgcaacatcccagtggtgtcgggaaaggaatgcgaagaaatcatcaggaagggaggtgaaacctcagagatgtacttgatacaaccagactccagtgttaagccgtaccgggtgtactgcgatatgaataccgagaacggtggatggaccgttattcagaaccggcaagacggttcagttgatttcgggcggaagtgggacccttacaaacaaggattcgggaacgtcgcgactaataccgatggaaagaattactgtggattgccgggagaatactggctcggaaatgacaagatctcgcagctcacgcggatgggccctaccgagttgctgatcgagatggaggactggaaaggagataaggtcaaggctcactacggcggatttactgtgcagaacgaagccaacaagtaccagatttcggtcaacaaataccgcggaactgcaggaaatgcactgatggacggagcctcacagctgatgggcgaaaatagaactatgaccatccataacggcatgttcttttcaacttacgacagggacaatgatggatggttgacttctgatccacgcaagcagtgtagcaaggaggacgggggtggctggtggtacaacaggtgtcatgcggcgaacccgaacgggagatactattggggtggacagtacacgtgggatatggctaaacacgggactgatgacggcgtggtgtggatgaactggaagggttcgtggtacagcatgcggaagatgtccatgaagatcagaccgtttttcccgcaacaa

SEQ ID NO: 153163 - DNA, 1473 bp, Artificial Sequence
  derived and/or modified sequence
atgaagcgcatggtcagttggtctttccataaactaaagaccatgaagcacttgctactgctcctgttgtgcgtgtttctggttaagagccaaggggtaaacgataatgaagagggcttctttagcgctcgtggccaccggcctctggacaaaaaacgggaggaggcaccgagcctacggccagctccccctccaatttccggcggaggatatcgggcacgacctgcaaaagctgccgcaacacagaagaaagtagagcgcaaagctcctgacgctgggggctgcctgcatgcagatccagatttgggggtcctgtgccctactggttgccagctccaggaagccctgcttcagcaggagcgacccattcgtaattctgtggacgagttgaataataacgtggaggcagtaagtcagacaagtagctcctcttttcagtacatgtatctgctcaaggatttgtggcagaaacggcagaagcaggtcaaggacaacgagaatgttgtgaatgagtattctagtgaactggaaaaacaccaattgtatatcgacgagactgtaaacagcaacatccctacaaatttacgagtcctacgatctatccttgagaacctacgcagcaaaatccagaaactggagtcagacgtctccgcacagatggaatactgtaggaccccgtgcacagtgtcctgcaatatccctgtcgtgagtgggaaggaatgcgaggaaatcatcagaaagggtggggaaacctccgaaatgtatcttatccaacctgattcgtctgtgaaaccttatcgggtctactgcgacatgaatacagagaatggtggatggactgtgatccagaacaggcaggatggatcagtcgacttcgggagaaagtgggacccatacaagcagggttttggcaatgtggctaccaacaccgacggcaagaactattgcggcttgcccggggagtattggcttggtaacgacaaaattagccagttgactagaatggggcccacggaattattaattgaaatggaagattggaaaggggacaaggtcaaagctcactacggtggatttactgtgcaaaatgaagcgaacaagtaccagattagtgttaataaataccgcggtactgcgggaaatgccctgatggacggcgcaagtcaactaatgggggagaatcgtaccatgactatccacaacggcatgttctttagcacatatgacagagataatgatgggtggctgacctccgaccccaggaagcagtgtagtaaagaggatgggggaggctggtggtataatcgctgccatgcggctaatcctaatggcagatactactggggcggacagtatacctgggatatggccaagcatggcaccgatgacggcgtcgtgtggatgaattggaaaggaagttggtactccatgcggaagatgagtatgaagattaggccctttttcccgcaacaa

SEQ ID NO: 153164 - DNA, 1473 bp, Artificial Sequence
  derived and/or modified sequence
atgaagagaatggtgtcctggtcctttcacaaactcaaaacaatgaagcacctgctgcttttgctcctctgtgtgtttctcgtcaagtcacagggtgtcaacgacaacgaagagggcttcttctcagcccgcggtcaccgccctctcgacaaaaagcgcgaggaggctccatctctccgccccgcgccccctcctatctccggcggtggctatagagctcgcccagctaaagcggctgctacacagaaaaaggtggaaaggaaggctcctgacgctggtggatgccttcacgctgacccagatctcggtgttctgtgccccactggatgtcagctgcaggaagcgctgctgcagcaggaaaggccgatcaggaactcagtggacgaattgaataataacgtggaagcggttagccaaacgagctcatcatcctttcagtacatgtacctgctcaaagatttgtggcagaagagacagaaacaggtgaaggacaacgaaaatgtagtgaacgaatactcctctgagctggaaaagcaccagttgtacatcgacgagaccgtgaacagtaacattccaacaaatctgagggtcttgagaagcatcctcgagaatctcaggagtaagattcaaaaactggaaagcgacgtcagtgcgcagatggaatattgtagaaccccttgcaccgtaagttgtaatatccccgtcgtgagtggcaaggagtgtgaggagattatacgcaagggtggtgagaccagcgaaatgtatctgatacaacccgattcctccgttaaaccatatagggtctactgcgacatgaacacggagaacggcggttggactgtaatacaaaacaggcaggatggctccgtagatttcggcaggaaatgggatccatataaacaaggattcggaaatgttgctactaacaccgacggcaagaactactgtggtctcccaggagaatactggctcggcaatgacaaaattagccagctgaccaggatgggccctaccgagctgctgatcgagatggaagattggaaaggcgacaaggtaaaagctcattatggcggatttaccgtacagaatgaggctaataagtaccagatctctgttaacaagtaccgcggaacagccggtaatgctttgatggatggtgcctcacagttgatgggcgagaacagaactatgactatccataatggcatgttctttagcacttatgatagggacaatgatggatggctgacgtccgaccctcgcaagcaatgctctaaagaagacggaggaggatggtggtacaaccgctgccatgccgctaatcctaacggtcgctactactggggtggccagtatacttgggacatggcgaagcatggcacagacgacggcgtggtgtggatgaactggaagggatcctggtactcaatgaggaaaatgtcaatgaagatcagaccttttttcccccaacag

SEQ ID NO: 153165 - DNA, 1473 bp, Artificial Sequence
  derived and/or modified sequence
atgaagaggatggtgagctggtcgtttcataagctgaaaactatgaagcacctgctgctgttgttgctttgcgtgttcctggtgaagtcccaaggagtgaatgataacgaagaaggtttcttttcagcccgtggtcatcggcctctggataagaaacgagaagaagcccctagcctccgccctgcaccacctccaatttcgggaggcggataccgcgcgcgaccagccaaggcagccgcaacccagaagaaagtggaacgtaaggcacccgatgccggaggctgtctccatgctgatccagatctgggagtcctttgcccaaccggctgccagcttcaagaagcactgctgcaacaggagcgccccataagaaacagcgtcgatgaactcaataacaacgtggaagcagtctcacagacctcctcgtcatcctttcagtatatgtacctcctgaaggatctgtggcaaaaaaggcaaaagcaagtaaaagataacgagaacgtggtgaacgaatacagctcggaactggaaaagcatcagctctacattgatgaaaccgttaattccaacattccaaccaacctgagagtgctccgctcaattctggaaaacctgcggtccaagattcagaaactggagtcagatgtgagcgcacaaatggagtactgtagaactccatgtaccgtgtcgtgtaacatccctgtggtgtcgggaaaggaatgtgaggagatcattaggaagggaggagaaacctcggaaatgtacctcatccaacctgattcctcagtcaagccttacagggtttattgcgatatgaacaccgagaatgggggatggacggtgattcaaaatagacaagatggttctgtggatttcggtcggaaatgggacccatacaagcaaggatttgggaatgtcgcaactaacaccgatggtaagaattactgtgggctgccaggggaatactggcttggaaatgacaagatttcacaacttacgcgaatgggtcctactgaacttctgatcgaaatggaggactggaagggtgataaggtgaaggcccattacggtggctttactgttcaaaatgaagcaaacaagtaccaaatatcggtgaataagtacagagggaccgcaggaaacgctcttatggatggtgcatcacagcttatgggcgaaaatcgaaccatgactatccacaacggaatgttcttctcgacctacgatagggataatgacgggtggctgacttcggatcctaggaagcaatgtagcaaagaagatggtgggggttggtggtacaaccggtgtcacgcagcgaatccaaatggcagatactactggggcggacaatacacctgggatatggccaagcatggtactgatgatggagtggtgtggatgaattggaaaggatcctggtactccatgaggaagatgtcgatgaagattcgccctttcttccctcagcaa

SEQ ID NO: 153166 - DNA, 1473 bp, Artificial Sequence
  derived and/or modified sequence
atgaaacgcatggtgagctggtcgtttcacaaactcaaaaccatgaaacatctcctgctcctgctgctgtgcgtgtttctggtgaagagccaaggagtgaatgacaacgaagagggcttcttctcggcacgcggacatcggccactcgacaaaaaacgggaggaagcgccgtctctgcgccccgcaccgcctccaatctccggcgggggatacagggcccggcccgcaaaagccgcggcaactcagaagaaggtcgaacgcaaggcccccgatgctgggggatgtctgcacgccgacccggatctgggtgtgctgtgtccgaccggttgccagctccaggaagccctcctgcagcaggaacgcccaatccgcaactcggtggacgagctgaataacaatgtggaagcggtttcccagacctcctcttcctcatttcaatacatgtaccttcttaaggacctgtggcaaaagcgccaaaaacaagtgaaggacaatgagaatgtcgtgaacgaatactcctcagaactcgagaagcaccagctctacatcgacgaaactgtgaattcaaacatcccgactaaccttagggtcttgagaagcatccttgagaacctgcgctcaaagatacagaaactggaatcggatgtgtcagctcagatggagtactgccgcactccatgcactgtgtcgtgcaatattcccgtcgtgtccggaaaggaatgcgaggaaatcatccggaagggcggggagacgagcgagatgtacctgatccagccggactcttccgttaagccgtacagagtgtattgtgacatgaatactgaaaacggtgggtggaccgtgattcagaatcggcaagacggctcggtggacttcggcagaaagtgggatccttacaagcaagggtttggaaatgttgcgaccaacaccgacggcaagaactattgcggtttgccaggcgaatactggctgggaaacgacaaaatctcgcagcttacccggatgggtccgaccgagttgctgatcgaaatggaggattggaaaggtgataaggtgaaggctcactacggcggattcactgtgcaaaacgaagccaacaagtaccaaatcagcgtgaacaagtaccgcggaactgcgggaaacgcactgatggacggagcgtcacagttgatgggagaaaaccgcactatgactatacacaacggaatgttcttctcgacgtatgatcgggacaatgatggatggctgactagcgacccgaggaagcagtgttcaaaggaagatggaggtggatggtggtacaatagatgccatgcagcgaatccaaatgggcggtactactggggaggtcagtacacctgggatatggctaagcatggaacggatgacggagtggtgtggatgaattggaaaggctcgtggtactccatgcggaaaatgtcgatgaagatcaggcctttcttcccacaacaa

SEQ ID NO: 153167 - DNA, 1473 bp, Artificial Sequence
  derived and/or modified sequence
atgaaacgcatggtctcctggtcatttcacaagttgaagacaatgaagcatctcttgcttctcttgctgtgtgttttcctcgtcaagtcccaaggagtcaacgacaatgaggagggcttcttctccgcaaggggacataggcccctggataaaaaacgtgaagaagccccctctctcaggcctgccccaccccccatctctggcggaggataccgcgctcgccccgcaaaggctgcagcaacccagaagaaggttgaaagaaaggctcctgacgctggaggctgccttcatgccgacccagacctcggcgtgctgtgccccactggatgtcagctccaggaggccctgcttcagcaggaacgccctatccgcaactctgtggatgaactgaataataacgtagaggctgtaagtcaaacctcttcttcctccttccagtatatgtatctcctcaaagatctttggcagaaacgtcaaaagcaggtgaaggacaatgagaacgtggtcaacgagtacagcagtgaacttgagaagcatcagctttatattgacgagaccgtgaattctaacatacccaccaatctcagggtgctccgttccatactcgagaacctgaggtctaagatccaaaagctggaaagcgacgtgtctgcccaaatggagtactgtcgcacaccttgcaccgtgtcctgcaatattccagttgtgtccggaaaagaatgtgaggaaattatcaggaaaggtggtgagacatctgagatgtaccttatccagccagattcctctgtcaagccctacagggtttactgtgatatgaatactgaaaacggaggctggactgtgattcaaaaccgccaggacggttcagttgatttcggacgcaagtgggacccttacaagcagggtttcggaaacgtggccaccaacaccgacggaaagaactactgtggtctgcccggagagtactggttgggcaatgacaaaataagtcagttgactagaatgggacctaccgagctgttgattgagatggaagactggaagggtgacaaggtaaaagcccactatggtggattcactgtccaaaacgaggctaacaagtatcagatatccgtgaataagtaccgtggcactgccggcaacgctttgatggatggcgcttcccaactcatgggcgagaaccgtaccatgacaatccataatggtatgttttttagcacctacgaccgtgacaacgacggttggctgacaagcgaccccagaaagcagtgctccaaggaagacggaggaggctggtggtacaaccgctgccacgccgcaaacccaaacggtcgttattattggggtggccagtacacttgggacatggctaagcacggaaccgacgatggtgtcgtctggatgaactggaagggttcctggtacagcatgcgtaagatgtccatgaagattcgtcccttcttcccacaacaa

SEQ ID NO: 153168 - DNA, 1473 bp, Artificial Sequence
  derived and/or modified sequence
atgaaacggatggtgtcatggtcttttcacaagcttaagactatgaagcacctcctcctgttgctcctgtgcgtctttttggtcaaatcacaaggcgtgaacgacaacgaagagggtttcttctccgcgagaggtcatagaccgctcgacaagaagcgggaagaggctccttccttacgtccggcccctccgcccatatcaggagggggataccgtgcccgacccgcaaaagccgctgcaactcagaaaaaggtcgagaggaaagcccccgatgcaggagggtgtctgcatgccgatccagatctgggtgttctctgtccaaccggctgtcagctgcaggaggcactgctgcagcaggagagacccatacggaattccgtcgacgaactgaacaataacgtagaagctgtgtcccagacgagcagcagcagcttccaatatatgtatctgctgaaggacttgtggcaaaagcggcaaaagcaggtgaaggataacgagaacgtggttaacgaatattcttcagaacttgagaagcatcagctgtacatcgatgaaacggtcaactctaatatccccaccaatcttagggttctgaggtctatcctggagaacctccgatccaaaattcagaaactggaatctgatgtgtccgcccagatggagtactgccggaccccctgcacggtgtcctgcaatatcccagtcgtcagtgggaaagaatgcgaagagatcatccgcaagggcggagagacttccgagatgtacctcatccagcctgactcctctgttaaaccgtatcgcgtttattgtgacatgaacacagaaaatggggggtggacagtgatacagaatcggcaagacggatcagtggatttcggccgtaaatgggacccatacaaacagggattcggcaatgtggcgactaacactgacggcaagaattactgcggcctccccggagagtactggctcggaaacgacaaaatcagtcagctcacccggatggggccaacagaacttctgatagaaatggaagactggaagggtgacaaggtgaaggcccactacggaggcttcacagtgcaaaacgaagctaacaagtaccagatttccgtaaataaataccggggaactgccggaaatgccctgatggacggcgcctcccagttaatgggggagaatcgaacgatgaccatccataacggaatgttcttctccacgtacgacagggacaacgacgggtggctcacttccgatccacggaagcagtgttctaaggaagacggaggggggtggtggtacaaccgatgccacgccgccaaccctaatgggcgctattactggggcggccagtacacttgggacatggccaagcatgggacggacgacggagtggtgtggatgaactggaagggcagctggtattcaatgcggaagatgagcatgaagatccggccattttttcctcaacag

SEQ ID NO: 153169 - DNA, 1473 bp, Artificial Sequence
  derived and/or modified sequence
atgaaaagaatggtcagctggtctttccataaactgaagaccatgaaacacctgttgctgcttcttttatgtgtgtttctggtcaaaagccagggagtgaacgacaacgaggagggatttttctccgcacgggggcatcgacctctggataagaaaagggaggaagcacctagcctcagacccgctcctccacccatcagcggaggagggtaccgggccaggccagccaaggctgcggctacacagaaaaaagtcgagaggaaggctcctgacgccggcggatgtttgcacgcagaccccgatcttggcgtgctgtgtcctacaggatgccagctccaagaagcactgctccagcaggagaggcctattcgcaactccgttgatgagttaaacaataacgttgaggctgtaagtcaaaccagttcatctagctttcagtatatgtacctcctgaaagacttatggcagaaacggcagaaacaggtgaaagacaacgagaacgtggtgaacgaatacagcagcgaattggagaaacatcagctgtacatagatgagacagtcaatagcaacatccccacaaaccttagggtgctgaggagtatccttgagaatttacggtcaaaaatccagaagctcgaatccgacgtatctgctcagatggagtattgtcggacaccatgtaccgtgtcatgcaatatacctgtggtgtccggcaaggagtgtgaggagataattcggaagggcggtgagaccagcgagatgtatctcattcagcccgatagcagcgtcaagccttatcgcgtttactgcgatatgaataccgaaaatggcggctggaccgtgatccagaacagacaggatggctccgtagatttcggtcggaagtgggatccttataagcaggggtttggcaacgtggctaccaacacggatggtaaaaattattgtggattgccaggtgagtactggctcgggaacgacaagatcagccagctcacgcggatgggcccaactgagctgctgattgagatggaagactggaaaggagacaaggtcaaggctcactatgggggttttaccgtgcagaatgaggctaataagtaccagattagcgtgaataaatacagggggaccgctgggaatgccttgatggatggcgccagtcagctgatgggtgaaaatcgcacaatgacaatacataacggaatgttcttttccacatatgatagggataacgatggatggttgacgtcagatccgaggaagcaatgttcaaaggaagatggtgggggttggtggtacaaccggtgtcatgccgcaaacccaaacggtcgttattattggggggggcagtatacttgggacatggcaaagcatggaacagatgatggcgtggtgtggatgaattggaaagggtcgtggtactccatgaggaagatgtcgatgaagattaggccctttttcccccagcag

SEQ ID NO: 153170 - DNA, 1473 bp, Artificial Sequence
  derived and/or modified sequence
atgaagcgcatggtgagctggtctttccataaattaaagaccatgaagcatttgttgctattactcctctgcgtctttcttgttaagtctcagggagtgaatgataatgaggagggcttcttttctgctaggggtcacagaccgttggataagaaacgagaagaagcaccttcattacgtccagcgcccccacccatctccggcggcggttatcgagcccgtcccgccaaagccgcagctacacagaagaaggtagaacgcaaagcacccgatgctggcggatgcttacacgctgaccctgatctcggtgttttgtgtccaacgggttgtcaactgcaggaggctcttttgcagcaggaacggccaataagaaactcggtcgacgagttgaataacaatgtcgaggcggtgtctcagaccagctcatcctcctttcagtacatgtacctgctgaaggacctttggcagaagcgtcagaaacaggtgaaggacaatgagaacgttgtcaacgagtactctagcgagcttgaaaaacaccaattatatattgatgaaaccgtaaattctaacatcccaacaaacctgcgggtcctccgttctatcttggaaaacttacgaagtaagatccaaaagttggagtcagatgttagcgctcagatggaatactgccgaaccccctgcaccgtgtcttgtaacatcccagtcgtaagtggaaaagagtgcgaggaaattatcagaaagggtggtgagacctcagagatgtatttgatccagccggattcctcagtgaagccgtaccgggtttattgcgatatgaacacggaaaacggtggctggacggtcatccagaaccgtcaggatggatcggttgattttgggagaaagtgggatccctacaagcagggcttcggaaacgtagccaccaacactgacggcaagaactattgcggcttgcctggagagtattggctaggtaacgataagatctctcaactcacacggatgggcccgacagagctgttgatcgaaatggaggactggaagggcgataaggtcaaggcgcattatggtggttttaccgtgcagaacgaggcgaacaagtatcagatttccgtcaataagtacaggggaaccgctggtaatgcattgatggacggagcatcacagttgatgggagaaaatagaactatgaccattcacaacggaatgtttttttctacctatgatcgggataatgacggttggctgacatcggatccccggaagcaatgctctaaggaagatggcggcggttggtggtataaccgatgtcatgcggccaacccgaatggacgttactactggggtggtcagtacacctgggatatggcaaagcatgggaccgacgacggcgttgtgtggatgaattggaaaggttcgtggtattcaatgcgaaagatgtcaatgaagattcgcccgttcttccctcagcag

SEQ ID NO: 153171 - DNA, 1473 bp, Artificial Sequence
  derived and/or modified sequence
atgaaacggatggtgtcctggagcttccataagctgaaaactatgaagcacctcctgcttctgctgctgtgcgtgttccttgtgaagtcccaaggcgtgaatgacaatgaggaaggattcttctccgcacggggacatagaccactcgacaagaaacgagaagaggccccatccctgcgccctgcaccgcctcctatctccggtgggggatacagagccagacctgcgaaggcagcggccacccagaaaaaggtggagagaaaagctcccgacgccgggggatgcctgcatgctgatcctgatctgggtgtgctgtgtccaaccgggtgtcagctccaggaggcgctgcttcagcaggaacgccctattcgtaactcggtggacgaacttaacaataatgtggaagcagtttcacagacctcgtcgtcctcgtttcagtacatgtaccttctcaaagacctttggcagaaaagacagaagcaggtcaaggataacgagaacgtggtgaacgaatactcgagcgaacttgaaaagcaccaattgtacatcgacgaaaccgtgaactccaacattcccactaacttgagagtgctgcgttcgattcttgaaaatcttcgctccaagattcagaagctcgagtcggatgtgagtgcccaaatggaatactgtcgcacgccctgcactgtgtcgtgcaatattcctgtggtgtcaggaaaggaatgtgaagagattattcgaaagggcggtgaaacctctgaaatgtacctgatccagcctgattcgtccgtgaaaccttacagggtctactgcgacatgaacactgagaacggaggatggactgtcattcagaatcggcaagacggtagcgtggattttggccgcaaatgggacccttacaaacaaggtttcggtaacgttgcaacgaatactgacggaaagaactactgtggacttcctggtgaatactggttgggcaacgataagatttcgcagctgacccgaatgggccccaccgaacttctcattgaaatggaagattggaagggtgacaaggttaaggcacactacggaggttttaccgttcaaaatgaagccaacaaataccaaatttcggtcaacaagtatagaggtaccgcggggaacgccttgatggacggagcatcccaacttatgggcgaaaatagaacgatgaccattcacaatggcatgtttttctcaacttatgacagggataatgatggatggctcacctcggatcctaggaagcaatgttccaaggaggacggtggtgggtggtggtacaacagatgtcatgcagctaaccctaacggcaggtactactggggtgggcaatacacttgggatatggcaaagcacggaactgatgatggagtggtgtggatgaactggaagggctcctggtactcgatgagaaagatgtccatgaagatcaggccgttttttcctcagcaa

SEQ ID NO: 153172 - DNA, 1473 bp, Artificial Sequence
  derived and/or modified sequence
atgaagcggatggtgtcatggtcctttcacaaacttaagactatgaaacatctcctgcttctcctcctctgtgttttcctcgtgaaatcccagggtgtcaacgataacgaggaaggatttttctcagcgaggggacaccggccgctcgataagaagcgggaggaagctccgtcccttcgcccggctccaccaccaatctcgggcggcggataccgggcccgcccggcgaaggcagccgcaacccagaagaaggtcgaaaggaaggccccagacgctggtggctgcctgcacgctgatcctgacctcggggtgctctgccccacgggttgccaactgcaggaggcgctgttgcaacaagaacgcccaatccgcaactcagtggatgagctgaacaataacgtcgaggctgtcagccaaacttcctcgagctcattccagtacatgtacctgctcaaagacctgtggcagaagcggcagaagcaggtcaaggacaacgagaatgtcgtgaacgaatactcttccgaacttgagaagcaccaactttacatcgacgaaactgtgaactcaaacatccctacgaatctgcgcgtgctgcgctccatcctggagaacttgcgctcaaagatccaaaaactggaatcagacgtgagcgcacagatggaatactgccgcactccgtgcaccgtcagctgcaatatcccagtggtgtcaggtaaggagtgtgaggaaatcattaggaagggtggcgaaactagcgaaatgtaccttatccagcctgatagctcagtgaaaccgtacagagtgtactgcgacatgaatactgaaaacggaggatggaccgtcatccaaaaccgccaggatggatcggtggacttcggtcggaagtgggacccatacaagcagggattcggcaatgtcgcgaccaacactgacggcaagaactactgcggactgccgggagagtattggttgggtaacgacaaaatcagccagctgactcgcatgggcccaactgaattgctgatcgaaatggaggactggaagggtgataaagtcaaggcgcactatgggggatttaccgtccagaatgaggcgaataagtatcagatctccgtcaataagtacagaggtaccgccggaaacgccctgatggatggagcctcccagctcatgggtgagaataggaccatgaccatccacaatgggatgttcttctctacctacgacagggacaacgacggatggctgacttccgatccccggaagcagtgttccaaggaggacggaggcggatggtggtataacagatgccatgcagccaacccaaacggccgctactactggggaggacaatacacgtgggatatggccaagcatggaaccgatgacggtgtcgtgtggatgaactggaaaggatcgtggtactccatgaggaaaatgtcaatgaagatccggccgttctttccgcaacaa

SEQ ID NO: 153173 - DNA, 1473 bp, Artificial Sequence
  derived and/or modified sequence
atgaagcggatggtgtcatggagtttccacaagctaaagacgatgaagcatctcctgttattgctgttgtgcgtctttctggtcaagagccagggggtgaatgacaacgaggaggggttttttagcgcgagaggtcacaggcccctggataaaaaacgcgaggaagccccctctctgaggccggcccccccaccaatcagcggcgggggctatagggctaggcccgccaaggccgcggctacccagaagaaagttgaacgcaaagctcccgacgctggcggatgccttcatgccgacccggacctgggggtactgtgtccaacgggctgtcagttacaggaggccctgctccagcaggagaggcccattagaaatagcgtcgacgaattaaacaacaatgttgaagccgtgagccagaccagtagtagtagcttccagtacatgtatctgctgaaggatctatggcagaagagacagaagcaggtaaaggataacgagaatgtggtcaacgagtatagttcagagctggagaaacatcagctttacattgacgagacagttaattccaatatacccacaaatctgcgagtgcttagatcgatcctcgaaaaccttaggtccaagatccagaagctcgaatccgatgttagcgctcagatggaatactgtagaactccttgcacggttagctgtaatattccagtggtgtcgggcaaggagtgtgaggagatcatcaggaagggtggagagacctccgagatgtacctcatccagcccgactcatctgtgaagccttaccgcgtgtattgcgacatgaacacggaaaacgggggctggaccgtgatccaaaaccggcaggatggctctgtcgactttggccgcaagtgggacccatataagcagggattcggtaacgtcgctactaacacggacggaaagaactattgtgggcttcccggcgaatactggctcggaaatgataagatcagccagctgacacggatggggcctactgaacttctgatcgaaatggaagattggaagggggacaaagtgaaggcccactacggcggttttaccgttcagaatgaagccaacaaataccagatctctgtcaataaatatcgtggaaccgccggaaatgcacttatggatggagcttcacagttaatgggagagaatcgcaccatgactatccacaacggaatgtttttcagcacatacgatcgtgacaacgacgggtggctgacttccgacccccgtaagcagtgcagcaaggaggatgggggtgggtggtggtataaccggtgccatgcagcaaacccaaacggcagatattactgggggggacagtatacctgggatatggctaaacacggaacagacgatggggtagtttggatgaattggaagggtagctggtatagcatgcgcaagatgtccatgaagattcgccctttctttccgcagcaa

SEQ ID NO: 153174 - DNA, 1473 bp, Artificial Sequence
  derived and/or modified sequence
atgaaaagaatggtcagttggagctttcacaagctcaagacaatgaagcatctgctcctactgttgctgtgcgtctttttggtgaaatcgcagggtgttaacgataacgaagagggtttcttttctgcccgcgggcacagacccctggataaaaaacgagaggaagcaccatctttacgccctgcccctccacccatcagtggaggtggctatagggcaagacctgctaaagcagctgctacacagaaaaaagtggagagaaaggcacctgacgccggaggctgcctccacgccgaccccgatttgggcgtcctgtgtccaaccggctgccaactgcaagaagctttgctgcagcaggagagacctataaggaactccgttgacgaactcaataacaacgtggaagcagttagccagacgtcctcatcctctttccagtacatgtacctgctcaaggatctctggcagaagagacagaaacaggtgaaagacaacgaaaacgttgtgaatgagtacagctctgagctagaaaagcaccagctgtatattgacgaaacagttaattcaaatattccaacgaatctgagggtgttgcggtcaatcttggagaatctcaggtcgaagatacaaaagctggaatctgatgtaagtgcccaaatggagtactgcagaactccttgcaccgtgtcttgcaatattccagtagtgtccggcaaagagtgcgaggagataattagaaagggcggcgaaacttctgagatgtacctgatccagccggattctagcgtgaagccgtatcgagtctactgtgatatgaacaccgaaaatggtggctggaccgtaatccagaacaggcaggacgggtcagtggatttcgggagaaagtgggacccatacaaacagggatttggcaacgtcgccacgaacaccgacggaaaaaactattgcggcctgccgggcgagtactggctaggaaatgacaaaatttcccagttgacgagaatgggtcccactgagttgctcattgagatggaggattggaagggggacaaagttaaggcacactacggaggatttactgtgcaaaacgaagctaataagtatcagatttcagtgaataaataccgtggtactgctggcaacgctctcatggacggtgcgtcccagctcatgggcgagaatagaacaatgacaatacataatggaatgttcttttccacctacgacagggataatgacggctggttgacttctgatccccgaaagcaatgctctaaagaggatgggggtggctggtggtacaaccgctgccacgccgccaatcctaatggcaggtattactggggcggccaatacacctgggacatggctaagcatggcacagacgacggcgttgtctggatgaactggaaggggtcttggtactccatgcgtaagatgtctatgaagatccggcctttctttcctcagcag

SEQ ID NO: 153175 - DNA, 1473 bp, Artificial Sequence
  derived and/or modified sequence
atgaaacgtatggtgtcctggtcattccataagctgaagactatgaaacatttactgttgttgctgttgtgcgtcttcctggttaagtcccagggagtgaatgacaacgaagagggcttcttttctgccaggggccatcgtccactggacaaaaagcgcgaggaggccccctcattaaggcctgcccctccgccaattagtggaggaggatacagagctagaccagctaaagccgcagctacacagaaaaaggtggaacggaaagcacccgatgccggtggttgcctccatgccgatccagaccttggggtactttgcccaacaggatgccagctgcaggaggctctgctgcagcaagaaaggccaatcagaaactctgtggacgagctgaacaataacgtggaggccgtgtcccagacctccagttcatcattccagtacatgtaccttctcaaggatctctggcagaaaaggcaaaagcaggtgaaggataatgagaatgtggttaatgaatatagttccgaactggagaagcaccagctctacattgatgagaccgtgaactctaatattccaaccaatctgcgcgtgcttcgatcaatattggagaatttgaggtctaagattcagaagctggaatcagacgtgtcagctcagatggagtattgcagaaccccctgcaccgtgagctgcaatataccagtggtcagtggaaaggaatgtgaagagattatccgtaaggggggagaaacatctgagatgtatctcatccagccagattcttctgtgaagccatatagggtgtattgcgacatgaataccgaaaacggaggctggactgtaattcagaaccgccaggacggaagcgtggattttggacgaaagtgggacccctacaaacagggcttcgggaacgtcgccacaaatacagatggcaagaactattgtggcctgcccggcgaatactggctgggcaatgataagatttctcagctgacgcggatggggccaacggaactcctaattgagatggaggactggaaaggagataaggtcaaggcacattacggaggcttcaccgttcagaatgaagcaaacaagtaccagatatccgtaaataagtaccgtggtactgccggaaatgcccttatggatggggccagccaactcatgggcgagaatagaaccatgacaattcataacggcatgttctttagcacatatgaccgagacaacgacggctggctcacttctgaccctagaaagcaatgttcgaaggaagatggcgggggttggtggtacaaccggtgtcatgctgccaaccctaacggacgctactattggggtggtcaatacacatgggacatggcgaagcatggaacagacgatggagttgtttggatgaactggaaaggctcttggtattcaatgcgtaagatgagcatgaagattcggccttttttcccccaacag

SEQ ID NO: 153176 - DNA, 1473 bp, Artificial Sequence
  derived and/or modified sequence
atgaagagaatggtgtcgtggtcgtttcataagctgaaaactatgaagcatctgcttcttcttctgctgtgcgtgttcttggtcaaatctcagggggtcaacgataacgaggaaggattcttctcagccagaggacacaggcctctcgacaagaagcgggaagaagctccatcactcagaccggcgcccccgcctatctcgggaggaggctacagagcccgcccagcgaaggccgcggcgactcagaagaaggtcgaacggaaggctcctgacgcaggcggatgtttgcacgcagatccggacctgggcgtgctctgcccgactggatgccaactccaagaggccttgctccaacaagaaagaccgatccgcaattcagtggatgagctgaacaataatgttgaggcagtgtcgcaaacttcctcctcgtccttccagtacatgtatcttctgaaggacctgtggcagaagcgccaaaagcaggtcaaggataacgagaacgtggttaacgaatactcatccgaactggaaaagcaccagctgtatatcgacgaaacggtgaattcgaacatcccgaccaatcttagggtgctgcgctcaatcctggagaatctgcgctccaaaatccagaaactggagagcgacgtgtcagcccagatggagtactgtcgcactccttgcaccgtctcatgcaatatcccggtggtttcgggaaaggagtgcgaagaaatcatacggaagggaggagaaactagcgaaatgtacctgatccagcccgatagcagcgtcaagccataccgcgtctactgcgacatgaacactgaaaatggaggatggactgtcattcaaaacaggcaagacggatcggtggattttgggcgcaagtgggacccatacaaacagggcttcggaaatgtggccaccaataccgatggaaaaaactactgcggattgccaggcgaatactggttgggtaatgataagatcagccaactgactcggatgggacccaccgagctgctgatcgagatggaggattggaaaggagacaaggtcaaggcccactacggaggattcaccgtccaaaacgaagctaacaaataccagatcagcgtaaacaagtatcgggggactgccggaaacgctcttatggacggcgcatcacagctgatgggagaaaatcgcactatgactatccataatggaatgttcttttcgacttacgatcgcgataacgacggttggctgacctcggaccctcgcaaacaatgttcaaaggaggacggaggcggatggtggtacaatagatgccacgccgccaaccctaatggtaggtactactggggaggccaatacacctgggacatggcgaaacatgggaccgatgatggggtggtgtggatgaactggaagggatcgtggtactcaatgcggaagatgtcgatgaagattagacctttctttcctcaacaa

SEQ ID NO: 153177 - DNA, 1473 bp, Artificial Sequence
  derived and/or modified sequence
atgaaaaggatggtatcttggtcttttcacaaactcaaaacaatgaagcacctccttctgctgctgctgtgtgtattcttagtaaaatctcagggggttaatgacaacgaagaaggatttttctccgcaagaggacacaggccactggataaaaaaagagaggaagccccatctctgcgcccagcccctccccccatttctgggggaggatatagagctcggcccgccaaagctgctgccacacaaaaaaaagtcgagcgcaaggcacccgatgctggggggtgtttacatgccgaccccgacctaggagtcctgtgtcccacagggtgccagctccaggaagcactgctacagcaggaacggcccattcggaatagtgtggatgaattaaataacaacgttgaagctgtcagtcagacttcttcatcatccttccagtatatgtatcttctcaaagacctctggcagaaacgacagaaacaggtgaaagataatgagaatgtggtcaacgaatactcttcagaattggaaaaacaccagctctatatcgatgaaacagtcaattctaatatacccacaaatctacgagtactaaggagtattctcgagaatctcagatcaaaaattcagaagctagaatctgatgtctccgcacagatggaatattgcaggacgccttgtactgtgagttgtaacattcctgtagtgtctgggaaagagtgcgaggagatcatccgaaaagggggagaaacgtcagagatgtacctaatacagccagatagtagtgtgaaaccatatcgcgtgtattgtgatatgaacacagaaaacggaggatggacagtaatacagaatagacaggacggatcagtggatttcggaaggaaatgggatccttacaaacaggggtttgggaatgtagccacaaacacagacgggaaaaattattgtgggctccctggggaatactggttagggaacgataaaatctcccagctcacacgcatgggaccaactgaattacttatcgaaatggaggattggaaaggggataaggtgaaagctcattatggggggtttacagttcagaacgaagctaacaaatatcagattagtgttaataaatatcggggaactgccgggaatgctctgatggatggggcctcccagctcatgggagagaataggacaatgactatacataatgggatgtttttctccacatatgatagggataacgatggatggcttacatccgatcccaggaaacagtgctcaaaagaagatgggggagggtggtggtacaacaggtgtcacgcagccaaccctaatggacggtattattggggggggcagtatacttgggatatggctaagcatgggacagatgatggagtggtgtggatgaattggaaagggtcgtggtactccatgcgaaaaatgagtatgaaaatacgaccctttttcccccagcaa

SEQ ID NO: 153178 - DNA, 1473 bp, Artificial Sequence
  derived and/or modified sequence
atgaaacggatggtatcctggtcatttcacaagttaaaaacaatgaaacatctgttgttactgttactttgtgtgtttttggtaaaatctcagggagtgaacgataatgaggaaggattctttagtgctaggggacaccgcccgcttgataaaaaaagggaagaagctccatcccttcgacctgcccccccacccatctctggagggggatacagggctcggccagccaaagccgcagctacacagaaaaaagtggaaagaaaggccccagatgccgggggatgtctgcacgccgatccagatctcggggtgctgtgtccaacagggtgtcagctccaggaagcattactccagcaggaaagacctataaggaactcagtggatgaactaaataacaacgtggaggctgtgtcccaaacttctagttcttcttttcagtatatgtatcttcttaaagatctatggcagaaacggcagaagcaggtaaaagacaatgaaaatgtggttaatgaatacagttccgaactcgaaaaacatcagttatatatcgatgaaacagtaaactccaacataccaacaaacctgcgggtactccgttctattcttgaaaatttgagaagtaagatccagaaactagaatcagatgtgtctgcccagatggaatactgcaggacaccttgtactgtttcatgtaacatccccgtagtgagtgggaaagagtgtgaggaaattatacggaaagggggggaaacttccgagatgtaccttatacagcctgatagttcagtgaaaccttatagagtgtactgtgatatgaatactgaaaatgggggatggactgtgatccagaatcggcaggatggaagtgtggactttgggcgaaaatgggatccatataaacaggggttcgggaacgttgccacaaatacagatggaaaaaactattgtgggcttcctggagaatattggctgggaaatgataaaatttcccagctcacacgcatggggcccactgagcttcttatagaaatggaagattggaaaggagataaagtgaaagcccactatggggggtttacagttcagaacgaagccaataaatatcagatatcagtgaataaataccggggaactgctggaaatgctttaatggatggggcatctcagcttatgggagaaaataggacgatgactatccacaacggaatgttcttcagtacatacgatcgagataatgatggatggcttacttccgaccctcgcaaacagtgttccaaagaggatgggggaggatggtggtacaaccggtgtcacgccgctaatcccaacgggcgctactattgggggggacagtatacttgggatatggcaaaacatggaacagatgatggagtggtctggatgaattggaaaggatcttggtattctatgcgcaaaatgtccatgaaaattcggcctttttttccccagcaa

SEQ ID NO: 153179 - DNA, 1473 bp, Artificial Sequence
  derived and/or modified sequence
atgaagcgaatggtgagctggtcgtttcataagctgaaaactatgaagcacctcctgcttctcctactgtgcgtcttcctagtgaagtcccagggggttaacgataacgaagaaggtttcttctccgcccggggtcataggccactggacaagaaacgcgaagaggccccaagcttgagaccagctcccccacccatttccggaggcggatatcgggccaggcctgccaaggccgcagctacccagaaaaaagtggaacggaaagcccccgacgctgggggttgcctacatgcagacccagatttgggcgtgctgtgcccaacagggtgccagttgcaagaggccctcttgcagcaggaaaggcccatacggaattcagtggacgaactgaacaataacgtggaggcagtcagtcagacatcgtcttcttccttccagtacatgtatctgcttaaggacctgtggcagaaaaggcagaagcaggtcaaggataatgaaaacgtggtcaacgagtactcttccgaactggagaagcaccagctgtatatcgatgaaacagtcaactcaaacatccctaccaacctgcgagtgctgcgttctatcttggagaacctgaggagcaagatccagaagttggagagcgatgtgagtgcccagatggagtactgtagaacaccatgcacggtcagctgcaatatccctgtggttagcggcaaggagtgcgaagaaatcattaggaaggggggggaaacctcagaaatgtacctcatccaacccgactcttccgtcaagccataccgagtctactgtgatatgaacacagaaaatggcggatggaccgtcatccagaataggcaggatggctcggtagactttggtaggaagtgggacccatacaaacagggctttggtaacgtcgccactaataccgatggcaaaaactactgtggcttgcctggggaatattggttggggaacgacaagatttcacaactgacccgcatgggaccaactgaactcctgatcgaaatggaagattggaagggagacaaagtaaaggcccattatggtggatttactgtacagaatgaagcgaacaagtaccagataagcgtgaacaagtacagaggaaccgccgggaatgcactcatggatggggcctcccagctcatgggagaaaaccgcaccatgacaatccacaacggcatgttcttttccacttacgatcgagataacgacggatggctgacttcagatcccagaaaacagtgcagtaaggaagacggcggcggttggtggtataaccggtgccacgccgcgaacccaaacggccgttattactggggtggtcagtacacctgggacatggccaaacacggcactgacgacggcgttgtgtggatgaattggaaagggtcttggtactctatgcgcaagatgtcaatgaaaattcggccttttttcccacagcag

SEQ ID NO: 153180 - DNA, 1473 bp, Artificial Sequence
  derived and/or modified sequence
atgaaaagaatggtctcgtggagttttcacaaactcaaaacaatgaaacatttactcctgttattgctgtgtgttttcctcgttaagtcacaaggagtaaatgataacgaagaaggcttcttctccgctagagggcataggccacttgataagaagagagaggaagctccgtctttgcgtcccgcaccaccacccatttcaggtggaggatatcgtgctcgaccggctaaggctgctgcaactcaaaagaaagttgaacgcaaagcacctgatgccggagggtgcttgcacgctgaccctgacctgggagtcctctgtccgactggttgccagctccaggaagcattgcttcaacaggagaggccgattaggaactccgttgatgaattgaacaacaacgtcgaagctgtttcccaaacgtccagctctagttttcagtacatgtatctattgaaagatctttggcaaaagcgtcagaagcaggttaaggacaacgaaaatgtcgtgaatgaatattcctctgaattggaaaaacatcaattgtatattgatgaaacagtcaactcaaatattcctaccaacctaagggtacttcgaagcattttagaaaatcttcgatccaagatacaaaagctagagagcgatgtgagtgcacaaatggagtattgtaggactccctgcacagtatcatgtaatatacctgttgtgagtggtaaagaatgcgaagagattatccgaaaagggggggagacctcagaaatgtatttgatccaaccagatagtagcgttaaaccatatagggtgtactgtgatatgaatactgaaaacgggggatggaccgttatacaaaacagacaggatggctctgtggatttcgggagaaagtgggatccatacaaacagggcttcggaaatgtcgctacaaatacagatggtaagaactactgcggactccctggagagtattggttaggaaacgataaaatctctcagttgaccagaatgggaccgaccgagcttttgattgaaatggaagattggaaaggcgacaaggttaaagcacactatggggggttcacagtgcagaatgaggctaacaagtatcagattagtgtcaataaatacaggggaacagcaggaaacgcattgatggacggggcttcacagttaatgggggaaaatcgtactatgaccattcacaatggtatgttctttagcacctatgacagggataatgatgggtggttgacatctgatccaaggaagcaatgctcaaaggaagacggaggaggctggtggtacaacagatgtcacgctgccaaccccaatggacgttattattgggggggacaatacacttgggatatggctaaacatgggacagatgatggagtagtttggatgaattggaagggctcatggtattcaatgcgaaaaatgtcaatgaagattcgtccatttttccctcagcaa

SEQ ID NO: 153181 - DNA, 1473 bp, Artificial Sequence
  derived and/or modified sequence
atgaaaagaatggtttcctggtcgtttcataagctgaaaaccatgaaacatttgctcttgttgcttctgtgtgtctttctggtgaagtcgcaaggagtcaacgataacgaggaaggatttttctcggcaagaggacaccgccctctcgataagaagcgcgaagaggcgccttcactgcggcctgcccctccacctattagcgggggaggttaccgtgcaagacctgcaaaagccgcagctacgcaaaagaaggttgagagaaaagcgcccgatgccggaggatgtctccatgcagatccagaccttggagtgctctgtcccaccggctgccagctgcaggaagcacttcttcagcaagaaagacctattagaaattctgtcgatgaactgaataacaacgtcgaggccgtctcacagacctcaagctcgtcctttcagtacatgtacctcctcaaagacctttggcagaagaggcagaagcaggtcaaggataatgaaaacgtggtcaacgaatactcctcggaactggagaagcaccaactctacatagacgaaaccgtgaactccaatattcccactaatcttcgagtgttgagatcgatcctggagaaccttcgaagcaagattcagaaacttgagtcagatgtttcagcccaaatggagtattgtaggaccccttgcacggtatcatgtaacattcctgtcgtctcgggaaaggagtgtgaagaaatcattcgcaagggaggagaaacctccgagatgtacttgattcaacctgatagctcggtcaagccctaccgcgtgtactgtgatatgaatactgaaaatgggggatggaccgtcatccaaaacagacaagacggcagcgtggattttggtagaaagtgggacccgtacaagcaaggatttggtaacgtcgcgaccaatactgatggtaagaattactgtggcctgccaggagagtactggcttggtaatgataagatttcgcagcttacgcggatgggccctaccgaactccttatcgaaatggaggattggaaaggtgataaggtgaaggcacactacggtggcttcaccgtgcagaatgaagcaaataagtaccaaatttcggtgaacaagtatcgcggtactgctgggaatgcactcatggacggtgcatcgcaacttatgggtgaaaaccggaccatgacgattcataatggcatgtttttcagcacctacgaccgagataacgatggatggctgacctccgacccaagaaaacagtgctcgaaggaggatggcggaggatggtggtacaacagatgtcatgcagccaatccaaacggtagatactactggggaggccagtacacttgggatatggcgaaacatggaactgacgatggagtcgtgtggatgaattggaagggctcctggtacagcatgcgcaagatgtcaatgaagattcgacccttcttcccacagcaa

SEQ ID NO: 153182 - DNA, 1473 bp, Artificial Sequence
  derived and/or modified sequence
atgaaacgtatggtttcgtggtcgttccataaactgaaaaccatgaagcaccttctcctccttcttctttgcgtatttctcgttaaatcgcaaggcgtgaacgataatgaggaaggtttctttagcgcacggggtcaccgacctctcgacaaaaagcgagaagaagccccctccctgaggccagcacctcctccaatctctgggggagggtacagagcgcggcccgcgaaggcagcagctacccaaaagaaggtggaacgcaaggctccagatgcaggaggctgtctccatgcagacccagacctgggtgtgctttgcccaaccggatgtcagctgcaggaagcgcttctgcaacaagaaagacctattcggaactcggtcgatgaacttaacaataatgtcgaggccgtgtcccagacttcatcatcatccttccagtacatgtatctgctgaaagatctctggcagaagaggcaaaagcaggtgaaggataacgagaacgtggtgaatgagtattcgtccgaactcgaaaagcaccaactgtatattgacgaaactgttaactccaacatcccaacgaacctgcgggtgcttagatcaatcctggagaaccttagaagcaaaattcaaaagctcgaatcggacgtgtcagcgcagatggaatactgcagaaccccttgtaccgtctcgtgtaatatccctgtcgtgtccggaaaggaatgtgaagagatcattagaaagggaggggaaaccagcgaaatgtaccttattcaacccgatagctccgtgaaaccttaccgagtctactgcgacatgaacaccgagaacggaggttggaccgtgattcaaaataggcaagatggttctgtcgatttcggtcgcaagtgggatccatacaaacaaggatttgggaacgtggccactaatacggatggaaagaactattgtggtctgccaggagagtactggcttggaaatgacaagataagtcagcttactagaatgggcccaaccgagctgcttattgaaatggaggattggaagggagataaggtgaaggcacattatggagggtttaccgtgcaaaatgaagcaaacaaataccaaatatcggtgaacaaataccgggggacggcaggaaatgcactgatggatggggccagccagctcatgggggagaacagaactatgaccattcataatgggatgtttttctccacttacgaccgcgataacgacggttggttgacttccgacccgcgaaaacagtgttcgaaggaagatggaggggggtggtggtacaacagatgtcatgcagctaaccctaacggccggtactactggggtggccagtacacttgggacatggccaaacacggcactgatgatggtgtcgtgtggatgaattggaaaggcagttggtactcgatgagaaagatgagtatgaaaatcaggccttttttcccccagcag

SEQ ID NO: 153183 - DNA, 1473 bp, Artificial Sequence
  derived and/or modified sequence
atgaagcgcatggtgtcatggtcgttccataagctgaagacgatgaagcacctgctgttactattgctttgcgtgttcctggttaagtcccaaggcgtaaatgataatgaagagggcttcttcagtgctaggggccaccgaccgttggacaagaagcgtgaagaggctccaagcttgaggccggccccgccgccgatcagtggcggcggctatcgggcccgaccggctaaagcggccgcaactcagaagaaagtcgaacgtaaggccccggacgctggcggctgcctgcacgcagaccccgacttgggagtgctatgcccgacaggatgtcagctgcaagaggcgctgcttcagcaagaacgtccgatacgcaatagtgttgacgaattgaataacaatgtcgaagccgtcagccaaacctcttcctcttcctttcagtacatgtacctgctgaaagatctctggcaaaaaaggcagaagcaggttaaggacaatgagaatgtggttaatgagtatagttcggagctggaaaagcatcaattgtacatagacgagacagtaaacagcaacatacccacaaacctacgcgtgttgcgatctatattggagaatttgcgttcgaagatacagaagttggaaagcgatgtgtctgctcagatggagtattgtcgcacgccctgcacagtaagctgcaatataccggtcgtttcgggaaaggagtgtgaagagatcattcgtaaaggcggagaaacgagcgagatgtacctgatccagcccgacagtagcgttaaaccatatcgcgtgtactgcgacatgaacacagagaatggaggctggaccgtgatccaaaatcgtcaggacggaagtgtcgatttcggccgtaaatgggacccctacaagcagggcttcggcaatgtagccaccaacacggacggaaagaactactgcggtctaccgggcgaatactggctgggcaacgataagatctcacaactcacccggatggggccaacagagctactcatcgagatggaagactggaagggtgataaggttaaagctcattatggtggcttcacagtccaaaacgaggctaacaagtaccagatttcagtaaacaagtatcgaggtacagccggtaacgccttaatggatggcgcgagtcagctgatgggcgagaaccgaacgatgacaattcacaatggaatgttctttagcacctatgacagagataacgacggctggttaaccagcgacccgcgtaagcagtgctctaaggaagatggaggtggatggtggtataaccgctgccacgcggctaatcctaatggacggtattactggggcggacagtatacatgggatatggcgaagcacggtacggatgacggtgttgtttggatgaattggaagggaagctggtactcgatgaggaagatgagcatgaagatccggccctttttcccacagcag

SEQ ID NO: 153184 - DNA, 1473 bp, Artificial Sequence
  derived and/or modified sequence
atgaagcgcatggtgtcttggtccttccacaaactaaagaccatgaagcaccttctgctcttgttgctgtgcgtgttcttagttaagagccagggagtaaatgataatgaagagggattcttcagcgctaggggccaccggcccctggataagaagagagaggaggcgcccagcctgaggccggcgccacccccaatttctggtggggggtaccgtgcacgcccagctaaagccgccgcgacccagaaaaaggtggagaggaaggctcccgatgccggtggttgtctacacgctgatcccgacctgggtgtactctgcccaacaggttgtcagctgcaggaagctttacttcaacaggaaaggcctatacgcaacagcgttgacgagcttaataataacgttgaggccgtgagccagacctcctcaagttccttccaatacatgtacctgctgaaggacctgtggcaaaaaaggcagaagcaggtgaaagacaacgagaacgttgttaatgaatactcctctgaactggagaagcatcagctgtacatcgatgagacggtaaactccaacattcctactaacctccgcgtactccgctctattctggaaaacctgaggtcaaagattcagaagctcgaaagtgatgtcagtgctcagatggaatattgtcgaacgccttgtacagtgtcatgcaacatacccgtggtgtccggcaaagaatgcgaggagattattcgcaagggcggagagacatctgaaatgtacttaatccagccggattcctcggtgaagccatacagggtctattgtgacatgaacactgagaacggggggtggacagttatccagaatcggcaggatggctccgtcgacttcggtaggaagtgggatccctacaaacaaggcttcggaaatgtcgccacaaacactgatggaaagaattactgtggcctccccggcgagtactggctgggcaatgacaagatatcccagctcacgaggatgggtcctaccgaactgctgatcgagatggaggactggaagggggacaaagtcaaggcccactacggaggatttaccgtccagaacgaagctaacaagtaccagataagtgttaataagtatcgcggcacggccggaaacgcattgatggacggagcgtcacagctgatgggggaaaaccgtacaatgactattcataacgggatgttctttagcacctatgacagggataacgatggatggctgacttctgaccctaggaagcagtgcagcaaggaagacggaggcggctggtggtacaatcgctgccacgccgccaatccaaacgggaggtactactggggaggccagtacacctgggatatggcaaaacacgggaccgatgatggagtagtgtggatgaattggaaaggaagttggtattcaatgaggaagatgagcatgaagataagaccattttttccccagcaa

SEQ ID NO: 153185 - DNA, 1473 bp, Artificial Sequence
  derived and/or modified sequence
atgaaacgcatggtcagctggagcttccataaactgaaaaccatgaaacacctccttttgctgctgctttgtgtatttctggtgaaaagtcagggagtcaatgataacgaggagggctttttctccgccagaggtcaccggcctctggacaaaaagcgcgaggaggccccgagtctgcggcccgccccccctccaatatcaggggggggctatcgcgccagacccgccaaggccgcagctacccaaaaaaaagtcgagcggaaagctcccgacgccggcggatgtttgcacgcagacccagaccttggcgtgctgtgtcctacaggatgtcaactccaggaagccctgcttcagcaggagcggcccattcggaactctgtggatgaactcaacaacaatgtggaagccgtgtctcagacatcatccagcagcttccagtacatgtatctgctgaaggatttgtggcagaagcgccaaaaacaggtgaaagacaacgagaatgtggttaatgaatactcaagcgaactcgagaaacatcagctgtacatcgatgagactgttaattctaacatcccaacaaacctcagagttctgagaagtatactggaaaacttgaggtcaaagattcagaaactcgaatcagacgtatctgcacagatggaatactgccggacgccttgtacagtttcatgcaatatccccgtcgtgagcggtaaggagtgtgaggagatcattcgcaaaggaggtgaaacgtccgagatgtacctgatccaacccgattcttctgtgaaaccttaccgcgtgtactgtgatatgaataccgagaatggcggctggacagtgattcagaaccggcaggacggaagcgtggatttcggacggaagtgggatccctacaaacaggggtttggaaatgtcgccacgaataccgatgggaagaactactgcggtctgcctggcgagtattggttgggtaatgataagatcagtcagttgaccaggatgggccctacagaactgttgatcgaaatggaagactggaagggcgataaggtcaaggctcactacggtggctttacagtgcagaacgaggccaataagtatcagatttcagtaaataagtaccgaggaactgccggaaatgcactgatggacggcgctagccaactgatgggagagaaccggaccatgacgattcataatggaatgttctttagcacatatgaccgggacaacgatggctggttgaccagtgatcctaggaagcagtgttcaaaagaggatggcggcggctggtggtacaatcggtgtcacgctgctaacccgaatggaaggtattattggggaggccaatatacttgggacatggctaagcatggtactgatgacggcgtcgtctggatgaattggaaggggtcctggtactccatgagaaagatgagtatgaagattagaccgttttttccccaacaa

SEQ ID NO: 153186 - DNA, 1473 bp, Artificial Sequence
  derived and/or modified sequence
atgaagaggatggtgtcttggtcatttcacaaactgaagacaatgaagcacctgctgctgctgcttctgtgcgtgtttttggtcaagtctcagggcgtgaacgacaatgaggagggcttctttagtgcgcggggtcacaggccactggacaagaaacgcgaagaggcgccaagtttgagaccggcaccaccgccaatatccggtggaggatatagggcccggccagccaaagccgccgctacccagaaaaaggtagagagaaaagcccccgacgcaggtggatgtctccatgcagacccggatcttggcgtgctgtgccccactggatgccaactccaggaggccctgctccagcaagagaggccaatcaggaactcagtggatgagctgaataataacgtggaggcagtctctcagacctcaagttcctctttccagtacatgtatctgctcaaggacctgtggcagaagcgacagaaacaggtgaaggataatgaaaacgtggttaatgaatattcctccgaactggagaagcaccagctgtacatcgacgagactgtgaactccaacatccctacaaacctccgggtattgagatctatcctcgagaatctgcgctcaaaaattcagaaactggagtccgacgtttccgctcagatggagtattgcagaaccccctgcacggtgtcttgtaacattcctgtggtctctgggaaagagtgcgaagaaattatcaggaaaggaggagagacaagtgaaatgtatctcattcagcctgatagctccgtcaaaccttatagggtatactgtgatatgaatactgaaaatggaggctggaccgtgatccaaaatcgccaggacggctcagtcgacttcggtcggaaatgggatccatacaaacagggctttggaaacgtggcaacaaataccgacggaaagaattactgcggcctgcccggggaatactggctgggtaatgataaaatctcccagctgacacggatgggcccaactgagctccttattgaaatggaagattggaaaggagacaaggtgaaggcacactatggtgggttcacagttcaaaacgaggcaaacaagtaccagattagtgtgaacaaatataggggcaccgctgggaatgctctgatggacggggcaagtcagctgatgggtgagaataggacgatgaccattcacaatggcatgttcttctcaacctatgatcgggacaacgatggctggctgacttctgatcctaggaagcagtgctctaaggaggatgggggagggtggtggtacaaccgctgccacgcagccaacccaaatgggcggtattactggggcggccagtatacttgggatatggccaaacacggtacggacgatggcgtggtctggatgaattggaaggggtcctggtattctatgcgcaaaatgtccatgaagatccggccctttttcccgcagcaa

SEQ ID NO: 153187 - DNA, 1473 bp, Artificial Sequence
  derived and/or modified sequence
atgaaaaggatggtgagttggtcttttcataaactgaagactatgaagcatcttctgctgctgctactttgtgtgtttttggtcaaatctcagggagttaacgacaacgaggagggcttcttctccgcacgtgggcacagacctctggacaagaagcgtgaggaggcgccaagtctgcggcccgctccccctcccatatcaggaggcggataccgggctaggcccgccaaagctgccgctacacagaagaaggtggagaggaaggctccagacgcaggagggtgcctgcacgccgaccccgaccttggggtgctttgtcccaccgggtgccagcttcaagaagcattgctccagcaggaaagaccaataaggaacagcgtggatgagctgaataataacgtggaggcagtaagtcaaacatcttctagctcatttcaatacatgtacctgctgaaggatctctggcagaaaaggcaaaaacaagtcaaggataacgaaaatgtagtgaacgaatacagctccgagctggagaagcatcagctatacatcgatgaaaccgtcaattctaacatacccacaaacctccgggtgctccgcagcatcctcgaaaacctgaggagcaaaatccaaaaactggagtcagacgtatcagcacagatggaatattgtcgcacgccttgcactgtgagctgcaacattccggtggttagcggaaaagagtgcgaagagataatccggaaagggggtgagaccagcgaaatgtacctgatccagccagacagttctgtcaaaccctaccgggtgtactgcgacatgaatacagaaaacggaggatggacagtcatccagaacagacaagatggatccgtggacttcgggcgcaaatgggatccttataaacagggattcgggaacgtcgcgacaaacactgatggaaagaactattgcggtctgcccggagagtactggctgggaaatgataagatcagtcagctgaccaggatgggacctactgaattactgatcgaaatggaagattggaagggtgataaagtaaaggcacactacggcggctttacagtgcagaacgaggcaaacaaataccagatcagcgtgaacaagtacagaggaaccgccggcaacgctcttatggatggcgcgagccaactgatgggagagaaccgcaccatgaccatccacaacggaatgttctttagtacatacgatagggataacgacggctggctgacaagcgatcctaggaagcagtgctcaaaggaggacggcggaggctggtggtacaacaggtgccacgcggcaaacccaaatggaaggtactactgggggggccaatatacttgggacatggccaagcacgggacagacgatggcgtcgtgtggatgaattggaagggttcatggtactctatgaggaagatgagcatgaaaattcggccgttttttcctcagcaa

SEQ ID NO: 153188 - DNA, 1473 bp, Artificial Sequence
  derived and/or modified sequence
atgaaacgaatggtttcgtggtcgtttcataaactaaaaacgatgaaacatctactattactattattatgtgtatttctagtaaaatcgcaaggtgttaatgataatgaagaaggttttttttcggcgcgtggtcatcgtccgttagataaaaaacgagaagaagcgccgtcgttacgaccggcgccgccgccgatatcgggtggtggttatcgtgcgcgtccggcgaaagcggcggcgacgcaaaaaaaagtagaacgtaaagcgccggatgcgggtggttgtttacatgcggatccggatttaggtgtactatgtccgacgggttgtcaattacaagaagcgctactacaacaagaacgaccgatacgaaattcggttgatgaattaaataataatgtagaagcggtatcgcaaacgtcgtcgtcgtcgtttcaatatatgtatctactaaaagatctatggcaaaaacgtcaaaaacaagtaaaagataatgaaaatgttgttaatgaatattcgtcggaactagaaaaacatcaattatatatagatgaaacggtaaattcgaatataccgacgaatttacgtgtactacgatcgatattagaaaatttacgatcgaaaatacaaaaactagaatcggatgtttcggcgcaaatggaatattgtcgtacgccgtgtacggtatcgtgtaatataccggtagtatcgggtaaagaatgtgaagaaataatacgaaaaggtggtgaaacgtcggaaatgtatctaatacaaccggattcgtcggttaaaccgtatcgagtatattgtgatatgaatacggaaaatggtggttggacggttatacaaaatcgtcaagatggttcggttgattttggtcgtaaatgggatccgtataaacaaggttttggtaatgttgcgacgaatacggatggtaaaaattattgtggtctaccgggtgaatattggctaggtaatgataaaatatcgcaactaacgcgtatgggtccgacggaactattaatagaaatggaagattggaaaggtgataaagttaaagcgcattatggtggttttacggtacaaaatgaagcgaataaatatcaaatatcggttaataaatatcgtggtacggcgggtaatgcgttaatggatggtgcgtcgcaattaatgggtgaaaatcgtacgatgacgatacataatggtatgtttttttcgacgtatgatcgtgataatgatggttggttaacgtcggatccgcgtaaacaatgttcgaaagaagatggtggtggttggtggtataatcgatgtcatgcggcgaatccgaatggtcgatattattggggtggtcaatatacgtgggatatggcgaaacatggtacggatgatggtgttgtatggatgaattggaaaggttcgtggtattcgatgcgaaaaatgtcgatgaaaatacgtccgttttttccgcaacaa

SEQ ID NO: 153189 - DNA, 1473 bp, Artificial Sequence
  derived and/or modified sequence
atgaagcgcatggtttcgtggtctttccacaagttgaaaaccatgaaacacttgctcctcctgttgctgtgcgtctttctggtcaagagccagggggttaacgataatgaggaaggcttcttttcagccaggggccaccgtcccttggacaaaaagcgggaggaggctccaagcttgcgcccggctccgcctccgatttcaggtgggggatatcgtgctcgcccagcgaaggctgcagcaacccagaagaaagttgagcgcaaggcacctgatgccggagggtgtttacacgcagatcccgacctgggcgttctgtgtccaactggttgccagctccaggaggcactactgcaacaagagcgccccattcggaactcagtcgatgaactcaacaacaacgtggaagctgtttcacaaacttcatcatcctcttttcagtacatgtacctgctgaaggatttatggcagaaacgacagaagcaggtgaaggacaatgagaatgtcgtgaatgagtattccagtgagttggaaaagcatcagttatacattgacgaaacagttaacagtaacatcccgaccaacctgagggtcctgcgcagcatcctcgagaacttgcggtcaaagattcagaagctcgaatccgacgtgagtgcccagatggagtattgtcggaccccgtgtacagtgagctgcaacattcccgttgtctccggcaaagaatgtgaggaaatcatacggaaaggaggtgagacctccgaaatgtatctgatacagccagattcctccgtgaagccttatagggtttattgcgacatgaacaccgaaaatggagggtggaccgtcatacagaacagacaggatggttccgtggattttggaaggaagtgggatccgtataaacagggattcgggaacgtggctaccaacaccgacggaaagaactattgcggactcccgggcgaatactggctgggtaatgataaaatatctcagctcaccaggatggggccaactgagctgctgattgaaatggaagattggaaaggcgacaaagtcaaagctcattacggtggcttcacagtccaaaatgaagccaataagtatcaaatttctgtgaacaaataccgaggcacagctggcaacgctctgatggacggtgctagccaacttatgggtgagaatcgcaccatgacaatccataatggcatgttcttttctacctacgaccgggataatgacgggtggctgacttccgatccacgaaagcagtgtagcaaagaggacggcggtggatggtggtacaatcgttgtcatgctgccaaccctaacggccgatactactggggaggacaatatacctgggacatggccaagcatggaactgatgatggagtggtctggatgaactggaaggggtcctggtatagtatgcggaagatgagtatgaaaattcgtccattctttccacagcag

SEQ ID NO: 153190 - DNA, 1473 bp, Artificial Sequence
  derived and/or modified sequence
atgaagcgcatggtgtcatggtcatttcataagctgaaaaccatgaaacacctgctgctcctcctgctctgcgtctttctggtcaaatcccagggagtcaacgacaatgaggaaggattcttcagcgcccgcggccacagaccgctggacaaaaagcgcgaggaggcgccaagcctgcggcctgctccaccgccgatctcaggtggcgggtaccgagcccgcccggctaaggccgccgctacccagaagaaagtggagcggaaggcgcctgatgccggaggatgcctgcatgcagacccggacctgggggtgctgtgtcccaccggatgtcagctgcaggaggcactgctgcagcaagagcgtcctatccggaattccgtggacgaattgaataacaacgtcgaggcagtgagccagacttcgtcctcctcttttcagtacatgtatttgcttaaggacctgtggcagaagcgccaaaaacaggtgaaggataatgaaaacgtcgtgaatgaatactcctccgaactggagaaacaccagctctacattgatgagactgtcaactctaacattccaaccaacctgagggtgctgcgctcaatcctggaaaacctgcggagtaaaatccaaaagttggaatcagatgtctcggcacaaatggagtactgtcggactccatgcaccgtgagttgcaatatccccgtcgtgtcgggaaaggaatgcgaagaaatcatcaggaaaggcggcgaaacttcagagatgtacttgatccaaccagacagctcagtcaagccgtatagagtgtactgcgacatgaacacggagaatggggggtggactgtcatccagaatcggcaagacggaagcgtggactttggaagaaagtgggacccgtacaagcaggggtttgggaatgtcgcgactaacaccgatggcaagaactactgcggcctccccggagaatactggctggggaacgacaaaatctcccagctgaccagaatgggaccaacggagctcctgatcgaaatggaggattggaagggagataaagtgaaagcgcactacggcggatttactgtccagaatgaggcaaacaagtaccaaatctcggtgaataagtaccgcggaaccgcgggcaatgctctgatggatggagcatcacaactgatgggagaaaaccgaactatgactatccacaacgggatgtttttctccacttacgacagggacaacgatggttggctcacctccgacccgcgcaagcagtgtagcaaggaggacggtggagggtggtggtacaatcggtgccatgcggccaacccgaacggtcgctactactggggagggcagtacacctgggatatggccaagcacggaaccgacgacggcgtcgtctggatgaattggaaaggctcgtggtactcgatgaggaagatgtccatgaagatcaggcctttcttccctcaacaa

SEQ ID NO: 153191 - DNA, 1473 bp, Artificial Sequence
  derived and/or modified sequence
atgaagcgaatggtgagttggtcctttcataagctgaagacaatgaagcatttgctgctgcttctgctgtgcgtatttcttgttaaatcacagggcgttaacgacaatgaggaaggcttctttagtgccagaggtcaccgccccctggacaagaaacgcgaagaggcgccttctctgcgccccgcaccacctcccatttctggtggaggctaccgggcgagacccgccaaagccgctgcgactcagaaaaaagtcgagcggaaagcccctgatgcaggtgggtgcctgcatgcagatccagatcttggcgtcctttgcccgaccgggtgtcagctgcaggaggcccttctgcagcaggagcggccgatcaggaactccgttgacgagttgaataacaacgtggaggctgtaagccagacatcaagcagcagcttccagtatatgtatctgttaaaggacctgtggcagaagcggcagaagcaagtgaaagacaatgaaaacgtggttaacgaatattcctccgaattggagaaacaccaactgtacatcgatgagacagtcaacagcaacataccgacaaacctgcgggtgctcaggagtatactggaaaatttgcgctcgaagatccagaagttggagtctgatgtgagtgcccagatggagtattgcaggacaccatgcaccgtctcttgcaacattcctgtggtatccggcaaagaatgcgaagagatcattaggaaggggggagaaacttccgagatgtacttaatccagcccgacagctcggtgaaaccctacagagtctactgcgatatgaataccgagaacggcgggtggaccgtgatccagaataggcaggacgggtcagtggatttcgggcgaaagtgggacccctataaacaagggttcggcaacgtggctactaatactgatggaaagaactattgtggtttgcccggcgaatactggctcggaaacgacaaaatctcccagcttactcggatggggcccactgagctgctgatcgaaatggaagattggaagggggacaaagtgaaggcccattacggtggtttcaccgtgcagaacgaggccaacaagtatcagatatccgtgaacaaatataggggaactgcaggcaatgccctgatggacggggcatcacaattaatgggcgagaacagaactatgaccatccacaatggtatgtttttcagtacgtacgatcgcgacaatgatgggtggttgacctctgatcctaggaagcagtgctccaaggaagatggcggcggttggtggtacaatcgctgtcacgcagcaaatcctaacgggaggtattattggggtggccagtatacatgggatatggccaaacacggcactgacgacggggtcgtgtggatgaattggaaaggctcctggtacagcatgcgaaagatgagcatgaagatcagacctttttttccacagcag

SEQ ID NO: 153192 - DNA, 1473 bp, Artificial Sequence
  derived and/or modified sequence
atgaagaggatggtgtcgtggtcctttcataaactgaagactatgaagcacctcttactgctgttattgtgcgtgttcctggtgaagtcacagggggtgaatgacaacgaggaggggtttttcagtgcacgtggacatcgcccgctggataagaaaagagaggaagcgccctccctaagacctgccccacccccgatctctggggggggctatcgcgcaagacccgccaaagctgccgccactcaaaagaaggtggaaagaaaggcccctgacgccggcgggtgtctgcatgcggatccagatctaggtgttctctgccccactggttgccagttgcaagaggcattattgcagcaggagcggcctattcgcaacagcgtagatgagctaaacaataatgtggaggctgtgtctcaaacctccagctccagttttcagtatatgtatctcttgaaagacttgtggcagaaacgacagaagcaggtcaaggacaatgagaacgttgtaaacgagtacagttccgagcttgagaaacaccagctctatatcgatgagacagtgaattcaaacatccctactaatctgagagtgctccgttcaattctggagaacttgcgttccaagatccagaagttagagtccgacgtgtctgctcagatggagtactgtcgcaccccgtgtactgtctcatgcaacatccccgtggtgtctggcaaggaatgcgaggagatcatcagaaagggtggggaaactagcgagatgtacctgattcagcctgactctagcgttaagccctaccgcgtgtactgcgatatgaatactgaaaacggcgggtggacagtcattcaaaaccggcaagatggaagtgtggattttggaaggaaatgggacccttataagcaaggattcggcaatgtggcgaccaatacagatgggaaaaactattgcggactgcccggggaatactggctgggcaacgataagatctctcagctcacccgaatgggtcctactgaactactgatagagatggaggactggaagggtgacaaggtgaaggcgcactacggtggattcactgtccagaacgaggcaaataagtatcagatctccgtcaacaaatacagaggtaccgcaggaaacgcactcatggatggagctagccagcttatgggtgaaaacagaaccatgactattcataatgggatgttcttctctacctacgatcgtgataatgatggttggcttactagtgatcccagaaagcaatgttctaaggaagatggtggaggatggtggtacaatcgctgccatgcagctaatcctaacggtagatattactgggggggtcagtacacatgggacatggccaagcatggaacggatgacggcgtggtgtggatgaattggaagggaagctggtacagcatgaggaagatgtcgatgaagattaggccatttttcccccagcaa

SEQ ID NO: 153193 - DNA, 1473 bp, Artificial Sequence
  derived and/or modified sequence
atgaagaggatggtgagctggtcgttccacaaactcaaaacgatgaagcacctactactgctcctgctgtgcgtattcctcgttaagtcacagggcgtgaatgacaacgaggaaggtttcttcagcgcaagggggcatcgccctcttgataagaaaagagaggaggcgcctagtctaagacctgccccgcctcccattagcggggggggctaccgggcaagacccgctaaggccgccgcgacgcagaaaaaggtagagcgcaaggcccctgacgctggaggatgtttgcatgccgacccagacttgggtgttttatgcccgactgggtgtcagctccaggaggcattgctacagcaggagcgaccaatacggaacagcgtggacgaactgaataataacgtggaggcagtctctcaaaccagctctagcagctttcagtacatgtacctgctcaaagatctatggcagaagagacagaaacaggtgaaagataatgagaacgttgtaaatgagtattcctcggaactagagaagcaccagttgtatatagatgagaccgtcaactcgaatattcccacaaacctgagagtgctgcggtcgatcctggagaatcttcgttctaagatccaaaaactagaatcagacgtcagcgctcagatggaatactgcagaacgccctgtaccgtcagttgcaacatacccgtggtttctgggaaggaatgcgaagaaattatccgaaaaggcggcgagacttcagaaatgtatctgatacagcctgacagttccgtgaaaccataccgagtgtactgcgatatgaacacagaaaatggtggctggaccgtcatccagaatcgccaagacggaagcgtggatttcggccgaaagtgggatccctataaacaaggcttcggcaatgtggccacaaatacggacggcaaaaattactgcggactgcccggcgagtattggctgggaaacgataagattagtcagctgactcgtatggggccaaccgaactcctgatcgagatggaggactggaagggcgataaagtgaaggcacattatggcggctttaccgtgcagaacgaggctaacaagtaccagatctccgtgaataaataccggggaactgcgggaaacgctctaatggatggcgcatctcagcttatgggagagaatcggacaatgacaatccacaatggaatgttcttctcaacatatgatcgggacaatgatgggtggttgaccagtgatcctaggaaacaatgctcaaaggaagacggaggtgggtggtggtataacagatgccacgccgctaaccctaacggtcggtattactgggggggccaatatacatgggacatggccaagcatggcactgatgatggggtggtctggatgaactggaaaggctcttggtactcgatgcgcaagatgtccatgaagattagaccattctttccgcagcag

SEQ ID NO: 153194 - DNA, 1473 bp, Artificial Sequence
  derived and/or modified sequence
atgaagaggatggtgagttggagcttccacaaactgaaaacaatgaaacacctgctcctactactcttgtgcgtcttcctcgtcaaatctcagggggtaaacgacaacgaagaaggttttttttctgcccgcggacaccgccctctggataagaagcgagaagaagcaccaagcctgcgcccagcccccccacccattagtggcggaggatatagagcccgtcccgctaaagccgctgctacacagaaaaaagtggaaagaaaggccccagacgctgggggatgcctgcatgcagatccagatcttggcgtcctgtgcccaaccggctgtcagctacaggaagccctcttgcagcaagagcggccaatacgcaatagtgtggatgagctaaataataacgtcgaggccgtatcccagacctcgtcctcatcattccaatatatgtacctcctgaaagatctctggcagaagcggcagaagcaagtcaaagataacgagaacgtggtgaacgagtatagttccgaattggagaagcaccaattatatattgacgagaccgtgaactcaaatatccctacaaacctccgggtactgcgctcaattcttgaaaatcttcggtctaagattcagaagttggagtctgatgtatcagcacaaatggaatactgtagaacaccctgtacagtcagttgtaatatccctgtggtaagtggcaaggagtgtgaggaaatcatccgcaaagggggcgaaaccagcgagatgtacctcatccaacccgacagttcagtcaaaccttaccgcgtgtactgcgatatgaacaccgagaatggaggctggaccgtcatccagaatagacaagacggatctgttgacttcggccggaagtgggatccttacaagcaaggcttcggaaacgttgccacaaacaccgacgggaaaaactactgcggccttccgggagagtactggctgggcaacgataagatttcacagctcacccggatgggacccactgagctcttgatcgagatggaagactggaagggtgacaaggtcaaggctcattatggagggttcaccgtgcagaacgaggccaataagtatcagatctccgtgaacaaataccgaggtacggctgggaatgccctgatggatggtgcgtcacaattaatgggagaaaacaggaccatgactattcacaatggaatgttttttagcacgtatgacagagataatgacggttggctcacctccgatcctaggaagcaatgctctaaggaagacgggggaggatggtggtacaaccgatgccacgcagcgaaccccaacggcaggtattactggggaggtcaatatacatgggatatggccaagcacggcactgatgacggggttgtgtggatgaactggaagggaagttggtactctatgagaaagatgagcatgaaaattcggccattctttcctcagcag

SEQ ID NO: 153195 - DNA, 1473 bp, Artificial Sequence
  derived and/or modified sequence
atgaaaaggatggtgagctggtcttttcacaagctcaagactatgaagcacctccttctgctcctgctctgtgtgttcctggtgaagagccaaggagtgaatgacaacgaggaaggctttttctccgcacggggccatagacctctggataagaagcgggaagaggcaccaagcctgcgacctgcaccccctccaatctccggcggaggatacagagcacggcctgcaaaagcagcagcaacgcaaaagaaggtggaacgcaaagcaccagatgcgggaggttgtctccacgcagatccggaccttggagtgttgtgcccaaccggttgccaactccaagaagcgctcctccagcaggaaagaccaattaggaattccgtggatgagctgaataacaacgtcgaagccgtctcccaaacttcctcatcatcctttcagtacatgtacctcctgaaagatttgtggcagaagagacaaaaacaggtgaaggataacgagaatgtggtgaatgagtattccagtgaacttgaaaagcatcagctttacattgatgaaaccgtgaattcaaatatcccaactaacctccgtgtgcttcgtagcattctcgaaaaccttcgctcgaagattcagaagctcgaatcagacgtgtccgcccaaatggaatactgccgcaccccttgtaccgtgtcctgtaacatacctgtggtgtccggaaaggagtgcgaggagataatcagaaaaggaggcgaaactagcgagatgtacctgatccagcccgactccagcgtgaaaccatacagagtgtactgtgacatgaataccgaaaacggtggatggactgtgatacagaataggcaagatgggagcgtcgatttcggcaggaaatgggatccatacaagcaaggttttggtaacgtcgctactaacaccgatggtaagaactactgcggactgccaggtgaatactggttggggaatgacaagattagccagcttacgcgtatgggaccaacggaactgctgattgaaatggaggactggaaaggagataaggtgaaggcccattacggaggtttcactgtgcagaacgaggctaataagtaccaaatttcagtgaacaagtacagagggaccgccgggaacgcacttatggatggagcatcacaactgatgggagaaaaccgcactatgactatccataatggcatgttcttctccacctacgatcgcgataatgacggctggctgacttccgacccgcgcaagcagtgttcaaaggaggacggcggtggttggtggtataaccggtgccatgccgccaatcctaatggccgctactactggggcggtcagtacacttgggatatggcaaaacacggaactgacgatggagtggtgtggatgaactggaagggcagctggtactccatgcgtaaaatgtcgatgaagattagaccgttctttcctcaacaa

SEQ ID NO: 153196 - DNA, 1473 bp, Artificial Sequence
  derived and/or modified sequence
atgaagcgaatggtgtcttggtccttccacaaactgaaaacaatgaagcaccttctcttgcttttgctctgtgtctttctggtcaagtctcagggagtcaacgacaacgaagaaggcttcttttccgcccgggggcaccggccactcgacaagaaacgagaggaagctccctcattacgaccggcccctccccctatttcaggcggaggctacagggcccgacctgcaaaggcagccgccactcaaaaaaaagttgagcgcaaagcccccgacgcgggcgggtgccttcatgccgacccagatctaggtgtcttgtgccctacagggtgccaacttcaggaagcactgctacaacaggagaggccaatacggaacagcgttgatgagctcaacaacaacgtggaggccgtaagccaaacaagtagttcatctttccagtacatgtatcttctgaaagacttatggcagaagagacagaaacaggtaaaagataacgagaatgtggttaacgagtactcaagtgagctggaaaaacatcagctctatatcgacgagacggtgaactccaacattccaaccaacctgcgagttctgagatcaatcctggagaacctgaggtccaaaattcaaaagcttgagtcagacgtatccgcccaaatggagtattgccgcactccttgtacagtcagttgcaatattcccgtcgtctctggtaaagagtgtgaagaaatcattaggaagggtggggagactagcgagatgtatcttatccagccggatagcagcgtaaagccctacagggtttactgcgacatgaacactgaaaacgggggatggactgtgatccaaaaccgccaggatggtagtgtagactttggtagaaaatgggacccatataagcaaggatttggcaacgtggcaactaataccgatgggaagaattattgcgggctgccaggtgagtattggcttggcaacgacaaaatatcccagctcactcgtatggggcctaccgaactgctgatcgaaatggaggactggaagggagataaggttaaagctcactacggcggttttactgtacagaacgaggcaaataagtaccagatctccgtcaataagtataggggcactgctggtaatgccctgatggatggagctagccaactgatgggtgagaatagaacaatgactattcataacggcatgttcttttccacgtatgaccgagataacgacggatggcttacctcagatccacgaaaacagtgctctaaagaagatgggggagggtggtggtacaaccgatgtcatgctgccaatccaaatgggcgttattattggggaggtcagtatacttgggatatggccaaacacggtaccgatgacggtgtggtgtggatgaattggaaagggtcttggtattccatgaggaaaatgtctatgaaaatccgaccattttttccacagcag

SEQ ID NO: 153197 - DNA, 1473 bp, Artificial Sequence
  derived and/or modified sequence
atgaagcgcatggtgtcttggtcttttcacaaattaaagaccatgaagcacctgctgcttctgctcctgtgcgtgtttcttgtaaagtcacagggcgttaacgataatgaagaagggttcttctctgcacggggacatagacccctggataaaaaacgcgaagaggccccatcactaaggcctgccccccccccaatctcaggtggggggtatagggcccgcccggctaaagccgccgccactcagaaaaaagtggagcggaaagcgcccgatgccggaggctgcctgcacgccgatccagacttgggagttctttgtcctaccggatgccagttacaggaggcgctgttacagcaggagcggccgatcagaaactctgtcgatgaattaaacaataacgtggaagctgtgtcacagaccagctctagtagcttccagtacatgtatctgttaaaggacttgtggcagaaaagacaaaagcaggtaaaagataacgagaatgtggtcaatgaatatagttccgagctcgagaagcaccaattgtacatagacgaaactgtgaactccaacattccgacgaacctacgggtccttcgctctatcctggagaacctgagatccaaaatccagaagctggagtcagacgtgtccgcccaaatggaatattgtcggacgccatgtaccgtctcatgcaatattccagtcgtctcaggtaaggaatgtgaggaaattattcgaaaagggggggagacctccgagatgtacctaattcagcctgacagcagcgttaagccataccgcgtctattgtgacatgaataccgaaaacggggggtggacagtgatccagaaccggcaagacgggtctgtcgactttggccgcaaatgggatccctataagcagggctttgggaacgttgctactaacactgacgggaagaattattgtgggctcccaggggagtactggttggggaatgataagatctcgcagcttacacgcatgggcccaactgaactactgatcgaaatggaagattggaagggtgacaaagttaaagcacattatggagggtttacagttcagaacgaggctaataagtaccaaatctccgtgaacaagtacaggggtacggccggtaatgccctcatggatggtgcaagccagttaatgggagagaatagaacgatgacaattcataatggaatgttttttagtacgtatgatagagataatgacggatggctaacttctgatccacgaaaacagtgctctaaggaggacggcgggggttggtggtacaatagatgtcacgcagccaacccgaatgggcgctattactggggcggccagtatacctgggacatggccaagcacggcacagacgacggagtggtctggatgaactggaagggcagctggtacagcatgcgcaaaatgtctatgaagatacgaccatttttcccccagcaa

SEQ ID NO: 153198 - DNA, 1473 bp, Artificial Sequence
  derived and/or modified sequence
atgaagagaatggtgagctggagttttcacaagcttaagactatgaagcatctgttgctgttgctgctgtgtgtcttcctggtgaaatcccagggcgtgaacgacaatgaagagggctttttttctgccagaggccacaggcccctggacaagaagcgggaggaggcgccaagcttgcggccagctccaccaccaatctctggggggggctatcgggcaaggccagctaaagccgctgccacccagaaaaaggtggaaagaaaggcaccagacgctggaggatgtcttcacgccgaccctgatcttggcgtgctctgtcctaccgggtgccaacttcaggaggctctgctgcagcaggagcgccccatacgaaacagcgtcgatgagctcaataacaacgtggaggctgtcagccagacatcctcctcctctttccagtacatgtatctgctcaaggatctctggcaaaagcgccagaagcaggtgaaggacaacgaaaatgtcgtgaacgaatattcaagtgagttggagaagcatcaactgtacatagacgaaactgtcaactctaacattccaaccaatctccgggtgctgcgcagtatcctcgagaaccttcggagcaaaatccagaaattggagtctgatgtgagcgcccagatggaatattgcagaaccccatgtactgtcagttgtaatatccccgtcgtgtccgggaaagaatgcgaggagattattaggaaagggggcgagactagtgagatgtacctgatccagcctgatagttccgtcaaaccttacagagtttactgcgacatgaacacggaaaacggcggctggactgtgattcaaaaccggcaggatgggtcagtggatttcggtcgcaagtgggacccctacaagcaaggatttggaaacgtcgctacaaatacggacggaaagaactattgtggtttgcccggcgagtactggctgggcaacgataagatctcacagttgacacggatgggccctactgagctgctcatcgaaatggaagactggaagggcgataaggtgaaagcccactatggagggtttaccgtgcagaacgaagcgaacaagtaccagataagcgtgaataagtacagaggaacagccgggaatgccctgatggatggggcatcccagctgatgggcgagaatagaacaatgacaattcataacggaatgtttttcagtacttatgatcgcgacaacgatggatggctgacgtcagacccccggaaacagtgctccaaagaggatgggggcggctggtggtacaatagatgccatgccgcaaacccaaatgggaggtactactggggggggcagtatacttgggatatggctaaacacggaaccgacgacggagtggtgtggatgaattggaaaggatcctggtacagtatgcgcaaaatgtccatgaagatacgacctttcttccctcagcaa

SEQ ID NO: 153199 - DNA, 1473 bp, Artificial Sequence
  derived and/or modified sequence
atgaagagaatggtgtcctggtcattccataaacttaaaacgatgaagcacctcctcctgcttctgctttgtgtctttctggtgaagtcccaaggtgtcaatgacaatgaggaaggttttttctcggccagggggcatcgacctctggataagaagagagaagaagccccgtcactccgacccgctccacctcctatttccgggggaggatacagggcacgccctgccaaggcagcggcaactcagaaaaaggtggaaaggaaggcacctgacgcaggaggttgtctccacgcggatcccgaccttggagtgctttgtcccaccggatgtcaactccaagaagcactcctgcagcaggagcgccctattaggaattcggtggacgaacttaacaataatgtggaggcagtgtctcagacctcctcgtcatcgttccaatacatgtatctcctcaaggatttgtggcaaaagaggcagaaacaggtgaaggataacgaaaacgtcgtgaacgaatacagcagcgagcttgaaaagcaccaattgtacattgatgagactgtgaactcaaacataccaaccaatcttcgagtccttcgctcgattcttgaaaacttgagatcaaagatacaaaaacttgagtccgacgtgagcgcacaaatggaatattgtagaactccatgtactgtgtcgtgcaatattcccgtggtgtccgggaaggaatgcgaagagatcatccggaagggcggagaaacttccgaaatgtacttgattcaaccggattcatcagtgaagccataccgcgtgtactgtgacatgaacaccgagaacggcgggtggactgtgattcaaaaccggcaggatggcagcgtggattttgggcgaaagtgggatccgtataagcaaggctttggtaacgtggcaactaataccgacggtaagaactactgcggattgccaggcgagtactggcttgggaacgataagatctcgcagctcacccggatggggcctaccgagcttctgatcgagatggaggactggaaaggagacaaggtgaaagcccactacggggggtttaccgtgcagaacgaagcaaacaagtaccaaatctcggtcaacaaataccggggcaccgccggaaatgcacttatggatggagcatcgcaacttatgggtgaaaatcgaacgatgaccatccataacggcatgttcttttccacctacgacagggataacgatggttggctgacgtccgatccacgcaaacagtgttccaaggaagatgggggcgggtggtggtacaaccgttgtcatgccgccaatcccaatggccgttactactggggtggtcagtatacttgggacatggccaaacatggaaccgatgatggagtcgtttggatgaattggaagggtagctggtactccatgagaaagatgagcatgaagattcggcctttctttccacagcaa

SEQ ID NO: 153200 - DNA, 1473 bp, Artificial Sequence
  derived and/or modified sequence
atgaagaggatggtttcctggtcgtttcataaactgaaaaccatgaagcatcttctgctgcttctcctgtgtgtgttcctcgtgaagagccaaggtgttaatgataacgaagaaggctttttcagcgcaagaggacaccggccccttgataagaaacgcgaggaagcaccctctcttcggcccgccccacccccaatatcaggaggcggttatagggcaaggcccgcaaaggcagccgccacccagaagaaagtggagcgaaaggcacctgatgcaggtggctgtctccacgccgatcctgatctgggagtgctttgtccaaccggttgccaactgcaagaggcactgctccagcaagagcgtcctatcagaaactcagtcgatgaactcaataacaatgtggaagcagtgtcacagacttcgtcatcgtccttccaatacatgtacctgctgaaggatctgtggcaaaaacgccaaaagcaggtgaaggataacgaaaacgtggtgaatgaatactcctcagagctggaaaagcaccaactttacattgacgagactgtgaatagcaatattcctaccaatcttcgcgtccttaggtcaattctggagaatctgcggtcaaaaatccagaaacttgagtccgacgtgtcagctcagatggagtactgtagaaccccatgtactgtgtcctgcaacatacctgtggtatcaggaaaggaatgtgaggaaatcattaggaaggggggtgaaacttctgaaatgtacctgatccaaccggatagctcagttaaaccatacagagtgtactgtgatatgaacaccgagaacggagggtggactgtcatccagaaccggcaagatgggagcgtggattttggacggaaatgggacccatacaagcaaggcttcggtaatgtcgccactaacaccgatggtaagaactactgtggtttgcccggtgaatactggcttggcaacgataagatttcgcaactgacccggatgggacccaccgagctgttgatcgagatggaagattggaagggggataaagtgaaggcgcattacggcggatttaccgtccaaaacgaggcaaacaagtaccaaatttcggtgaacaaataccggggaacggcgggcaatgcacttatggacggtgcatctcagctcatgggagagaaccgcaccatgaccattcataatggcatgttcttcagcacctacgatcgcgataacgatggatggcttactagcgaccctcgtaagcagtgttccaaggaggatgggggcggctggtggtacaacagatgtcacgccgcaaatccaaacggtcggtactactggggtggacaatacacctgggatatggcaaagcatggtactgacgatggagtggtgtggatgaattggaaagggtcctggtacagtatgcgcaagatgtcgatgaaaatcagaccattctttcctcagcag

SEQ ID NO: 153201 - DNA, 1473 bp, Artificial Sequence
  derived and/or modified sequence
atgaagcggatggtcagctggtcgtttcacaagctgaaaactatgaaacacctcctgctcctgctgctgtgcgtatttctggtgaagtcccagggagtgaatgataacgaggagggttttttctcggcgcggggccaccggccgctggacaagaagagagaagaagctccaagcctgcggccagccccgccaccgatcagcggaggtggctacagagcgcgccccgctaaagccgccgccacgcagaaaaaggtcgagcgcaaggcgcctgacgcgggtggttgtctgcacgcagatcctgacctgggggtgctgtgtcccaccggctgccagctccaggaagccctcctgcagcaggagcggcctatcagaaatagcgtcgacgaacttaacaacaacgtcgaagcggtgtcacaaacctcctcgtcgtcgttccaatacatgtacttgctgaaggatctgtggcaaaagaggcaaaaacaggtgaaggataacgaaaacgtggtgaatgaatactcgtcagaactggaaaagcaccaactgtatatcgacgaaaccgtgaattcaaacatcccgaccaacctgagggtccttaggagcattcttgagaacctcagaagcaagatccagaagctggagtccgatgtctccgcgcaaatggagtactgtcgcaccccttgcaccgtgtcgtgcaatatcccggtggtgtccgggaaggagtgtgaagagattatacggaaaggcggagagacgtccgagatgtatctgattcaacctgatagctccgtcaagccttaccgcgtgtactgcgatatgaacactgaaaatgggggctggaccgtgatccagaatagacaggacggtagcgtggacttcggacggaagtgggatccatacaaacagggattcggtaatgtggcaactaacactgacggtaagaactactgcggactgcccggcgaatactggctgggtaacgataagatctcgcagttgactagaatgggcccaactgagctgctgattgaaatggaagattggaagggagacaaggtgaaagcccattatggaggatttacggtgcagaatgaggcgaataagtaccagatctctgtcaataagtatagaggaaccgcgggcaacgccctgatggacggcgcgtcccagctcatgggggagaacaggactatgaccatccacaacggtatgttcttcagcacctacgaccgggataacgacggctggctgacctcagacccgcgcaagcagtgctccaaggaagatggaggaggctggtggtacaatagatgccatgcagcaaatccaaacggacgctattactggggaggacaatacacgtgggacatggccaagcacggcacggacgacggagtcgtctggatgaattggaaaggttcatggtactcaatgcgaaagatgtctatgaagatccggccgtttttcccacagcag

SEQ ID NO: 153202 - DNA, 1473 bp, Artificial Sequence
  derived and/or modified sequence
atgaagcgcatggtgtcatggtcgttccataagctgaaaaccatgaagcatttgctcctcctgctgctgtgcgtgttcctcgtgaagtcgcaaggagtgaatgacaacgaggagggctttttctcggcccgcggacaccgcccactggacaagaagcgggaagaagccccatcgctgcgcccagcaccgccaccgatcagcggaggaggataccgcgcaagaccagctaaagcggctgccactcagaagaaggtggaacgaaaagcacctgatgcgggaggctgcctgcatgccgacccggatctgggggtgctgtgcccgacgggctgccagctccaggaggcgctcctgcagcaggaaagaccgatccggaattcggtggatgagctcaacaataacgtggaagccgtgagccagacttcatcctcatcatttcagtacatgtacctgctcaaagacttgtggcagaagagacagaagcaggtgaaggacaacgaaaacgtcgtgaatgagtactcctcggagttggaaaagcaccaactctacatcgatgaaactgtcaacagcaacattcctactaatctccgagtcttgcgctcgatcctcgagaacctccggagcaagattcaaaagctggaatccgacgtctcagcacagatggagtactgcagaaccccttgcacggtttcctgcaacatcccggtcgttagcggaaaagaatgcgaagaaatcatccgcaagggcggagaaactagcgagatgtatcttatccaacctgattcttccgtcaaaccctaccgggtgtactgcgacatgaacacggagaacggtggatggaccgtgatccaaaaccgccaggacgggtccgtggatttcggaagaaagtgggacccatacaaacagggatttggaaacgtggcgaccaatactgacggaaagaactactgtggactcccaggcgaatactggttgggaaacgacaaaatctcgcaactgacgcgcatgggaccgacggaacttcttatcgagatggaagattggaaaggggacaaggtgaaagctcactacggaggcttcactgtgcaaaatgaagcgaataagtaccagatctcagtgaacaaataccggggcaccgccggaaatgcactgatggacggggcatcgcaactgatgggagagaatcggaccatgaccattcacaacggcatgttcttttcgacgtacgatcgcgataacgacggatggctgaccagcgatcctcgcaagcagtgctcgaaggaggacggaggcgggtggtggtacaaccgctgtcatgcggcgaatccaaatggaaggtactattggggaggccagtacacctgggacatggcaaagcatggaactgacgatggcgtggtctggatgaactggaagggaagctggtatagcatgcgcaagatgagcatgaaaatcaggccgttctttccgcaacag

SEQ ID NO: 153203 - DNA, 1473 bp, Artificial Sequence
  derived and/or modified sequence
atgaagcgcatggtctcctggtcttttcataagcttaaaaccatgaagcacttattgctattgttactttgtgtttttttggtgaagagccagggtgtgaacgataatgaagaggggttcttcagtgcccggggccaccggccacttgataaaaaacgggaagaagccccttccctgcgtcctgcccccccaccaatctctggcggtggatatcgcgcccgacctgctaaagccgccgctacccagaagaaagttgaacggaaggcgcctgacgctggagggtgcctacatgccgatcccgaccttggagtgctttgtcctacagggtgtcagttgcaggaagcactgctccagcaggagcggcccattcgaaactccgtggatgaactcaataataacgtggaagccgtttcccaaacaagcagctcttctttccagtacatgtacctcctgaaggatttatggcagaagcgccagaaacaggttaaggataatgaaaatgtcgttaatgaatattccagtgaactcgagaagcatcagctgtatatagacgaaacagtgaacagcaatatacccaccaacctgcgcgtactgagaagcatactggaaaatctgcggtctaagatccagaagttagaaagtgacgttagcgcacagatggagtactgtcggacaccatgtaccgtatcctgcaatatccctgtcgtatctgggaaggaatgcgaggaaatcatacggaagggtggagagacttccgaaatgtatctgatacagccggactcatcagtgaaaccataccgcgtctactgcgatatgaatacagagaacggcgggtggacagtcatccagaataggcaagacgggtccgtggacttcggcagaaaatgggacccatacaagcagggcttcggcaatgtggctactaacactgacggtaagaactactgtgggctcccaggcgagtattggctcggaaacgacaagatttcccagctgacacggatgggacctactgagttgctcatcgagatggaggattggaagggcgacaaggtcaaagcccattatggaggcttcaccgtgcaaaatgaggccaacaagtaccagattagcgttaataagtatagaggaacagcgggcaatgccttgatggatggcgcttcccaactgatgggggagaatcgtacaatgaccattcataacgggatgtttttcagcacttatgaccgcgacaacgatggatggttgacatccgatcctcggaagcagtgcagtaaggaggacgggggcggatggtggtataatcggtgccatgcagccaacccaaatggccggtattattgggggggtcagtatacttgggatatggcgaagcatggtaccgacgatggggttgtgtggatgaactggaagggctcctggtactctatgcgcaagatgtccatgaagattcggccattctttccccagcag

SEQ ID NO: 153204 - DNA, 1473 bp, Artificial Sequence
  derived and/or modified sequence
atgaagagaatggtgtcctggtcattccacaagctgaaaaccatgaaacatctgctcctgctgctattgtgcgtgtttctggttaaatctcagggcgtcaatgataatgaggagggctttttctcagctcgcggccatagacctcttgataagaaacgtgaggaagctccgtccctacgaccagcgcctccaccaatcagtgggggtgggtaccgggctcgtcccgcaaaggccgccgccactcagaagaaggtagagaggaaagccccagacgctggaggttgcctgcacgctgatcctgatcttggcgtcctgtgccccaccggttgccagctgcaggaggctttgctgcaacaggaacgtccaatccgtaattccgtagacgagctgaataacaatgttgaggcagtgtcccaaactagttctagttcctttcagtatatgtatctgctcaaggatctgtggcagaaacgtcaaaagcaggtcaaggataacgagaatgtggtcaatgagtacagtagtgagttggagaagcaccaattatacatagacgaaacagtgaactccaatatccctacaaacctcagagtgctacgaagtatccttgagaatctgcggagtaaaatacaaaagttggagtcagatgtcagcgctcaaatggagtattgtagaacaccatgcacagtttcttgtaatatccctgtagtgtccgggaaggagtgtgaagaaatcatccgcaagggcggagagacttctgagatgtatctgattcagcccgacagcagtgtcaagccgtatcgcgtctactgtgacatgaataccgagaatgggggatggactgtcattcagaatcgacaagacgggtccgtcgactttggccgcaaatgggatccctataagcagggattcgggaacgttgcaaccaacaccgatggcaagaattattgtggcctgcctggagaatactggctcggcaatgataaaatttcccaattgacccgcatgggccctaccgaactgttgatcgagatggaggattggaagggcgacaaggtcaaagcccactacggaggttttacggtgcaaaatgaggcaaacaaataccaaatttctgttaataaataccggggcactgctggaaatgccttaatggatggggctagtcaactgatgggggagaacagaactatgaccatccacaatggcatgtttttttcaacatacgatcgcgacaacgacggctggctcaccagtgacccacgcaaacagtgctccaaggaggacggaggtgggtggtggtacaatcggtgccatgcggctaacccaaacgggaggtactattggggcgggcagtatacttgggatatggctaaacacgggaccgatgatggagtggtgtggatgaattggaagggatcttggtattccatgcgcaaaatgtctatgaagatcagacctttcttccctcagcaa

SEQ ID NO: 153205 - DNA, 1473 bp, Artificial Sequence
  derived and/or modified sequence
atgaaaaggatggtcagctggtccttccataaattgaagacaatgaagcaccttctgcttttgttactgtgtgtgttcttggttaagagtcaaggagtgaatgataacgaggagggctttttcagtgctcgtgggcaccgcccactcgataaaaagcgtgaggaagctccatccctgcgaccagcccccccaccgatctctggcgggggttatcgggccagacctgctaaagctgccgctacacagaaaaaagtggaacgaaaagcccctgacgcaggcgggtgcctgcacgctgatccggatttgggagtgctgtgcccaactgggtgtcaactgcaggaagccctgttgcagcaggagcgcccaattaggaattccgttgatgaacttaataacaatgttgaggctgtgtcacaaacgtcgtcttctagctttcagtatatgtatcttctgaaagatctttggcagaaaaggcagaaacaagtcaaggacaatgaaaatgtagtcaacgagtattcgagcgagctcgaaaaacatcagctttacatcgatgagaccgtcaactctaacattccaactaatctccgagtgttgaggagtattctcgagaacctgcggagtaaaatccagaagctcgaatccgatgtttctgcccagatggagtattgcaggaccccctgtacggtgagctgcaacatccccgtggtctcagggaaggagtgcgaggagataattaggaaaggcggagaaacatctgagatgtacctcatacagcctgattcatccgtgaagccttaccgtgtatattgcgacatgaatacggaaaatggaggctggaccgtgattcagaaccggcaggatggctctgtagattttggtaggaagtgggatccctataaacaggggtttggaaacgtggcaaccaacacagatggaaagaactattgcggattgccaggagaatattggctgggaaacgataagattagtcaactgacaagaatgggccccactgagctgttgatcgagatggaggactggaagggcgataaagtcaaggctcactacggtggattcaccgtgcagaatgaagcaaataaatatcaaattagcgtgaacaagtatcgcggaaccgcaggaaatgcccttatggacggcgcttcacagctcatgggcgagaatcggacaatgacgatacataatgggatgttctttagcacctatgatcgagataatgatgggtggctgaccagtgaccccagaaagcagtgtagtaaggaggacgggggtggctggtggtacaatcggtgccacgcagccaaccccaacggtagatactattggggcggtcaatatacatgggacatggctaaacacgggactgacgatggcgtcgtttggatgaattggaaagggtcatggtactctatgcgcaagatgtcgatgaagattagaccctttttcccgcaacaa

SEQ ID NO: 153206 - DNA, 1473 bp, Artificial Sequence
  derived and/or modified sequence
atgaaacgcatggtttcgtggagcttccacaagctgaaaactatgaagcatctgctgttgctgctgctgtgcgtgttcctcgtgaagtcgcagggagtgaacgacaacgaggaaggatttttctcggcgcgcggccaccgccctctcgacaaaaagcgcgaagaagcgccgtcactgaggccagccccaccacctatctcgggaggtggataccgggcacgtccggcgaaggcggcggcgacccagaaaaaggtggaacggaaggctcctgacgccggaggttgcttgcacgccgacccggacctgggagtcctctgtccgaccggctgccagttgcaggaggcactgctccagcaagagcgcccgatccggaattcggtggacgaactcaataacaatgtggaggccgtgtcgcagacctcctcctcgtcattccagtacatgtacctgctgaaagatctctggcaaaagagacaaaagcaggtgaaggacaacgaaaacgtggtgaacgagtactcgagcgaacttgagaagcaccaactttacatcgatgaaactgtgaactcaaacattccaactaacctgagggtgctccgctcgatcctcgagaacctgcggtccaagatccagaagctggagagcgacgtgtcggctcagatggaatattgccgcactccatgcaccgtgagctgcaacatccctgtggtgtccggcaaggagtgcgaggaaatcattcgaaaaggaggggaaacctcggaaatgtacctgatccaacctgactcgtcggtgaagccataccgggtgtactgtgatatgaacactgaaaacggcggttggactgtcatccagaaccgccaggacggaagcgtggacttcggacggaagtgggacccctacaaacagggattcggcaatgtggctaccaatactgatggaaagaactactgtggcctgcctggtgagtactggctgggtaatgacaagatctcgcagttgacgcgcatggggccaactgaactcctgatcgagatggaggactggaagggggacaaagtcaaagcccattacggaggattcactgtccaaaatgaagccaataagtaccaaatctccgtcaataagtaccggggcaccgcaggaaacgcgctgatggacggcgcttcacagctgatgggagaaaaccggactatgacgatccacaacggaatgttcttctcgacttacgatcgcgacaacgacggatggctcacttccgatcctaggaagcagtgcagcaaggaggatggaggcggctggtggtacaatagatgtcacgctgccaaccccaatggacgctactactggggtgggcaatacacctgggatatggccaagcatgggactgacgacggagtggtgtggatgaactggaagggaagctggtactcgatgagaaagatgtcgatgaagatccgcccgtttttcccgcagcaa

SEQ ID NO: 153207 - DNA, 1473 bp, Artificial Sequence
  derived and/or modified sequence
atgaaaaggatggtgtcctggtcgttccacaagttgaaaaccatgaagcacctgcttctgctcttgctgtgtgtgtttctggtgaagtcccagggggtgaatgacaacgaagaggggtttttctccgcacgcggacatcgcccactcgacaagaaacgggaagaggcacctagcctccgcccagcaccaccacctatcagcgggggaggctaccgagcaagaccggcgaaagcagctgccactcaaaagaaggtggaacggaaggcaccggatgcgggtggatgcctgcatgcagatcctgaccttggagtgctttgccctaccggttgccaactgcaggaagccctcctccagcaggagcggccaattagaaacagcgtcgatgaactcaataacaacgtggaagccgtttcccagacttcctcaagctcctttcagtatatgtaccttctcaaggatctgtggcagaaaaggcaaaagcaggtgaaggataatgagaacgtcgtcaacgagtactccagcgaacttgagaagcatcaactgtatatcgatgaaaccgtgaacagcaatattcctaccaacttgcgagtgcttagatccatactcgaaaaccttaggagcaaaatccagaagctggaatcagatgtgagcgcacaaatggaatactgtagaaccccctgcactgtgtcatgtaacattcccgtcgtgtcgggtaaagaatgtgaagaaatcattagaaagggaggtgagacttccgaaatgtacctgattcaacccgactcatcggttaagccttaccgagtgtattgtgatatgaataccgagaacggaggctggacggtcattcaaaacagacaggacggatcggtggattttgggagaaaatgggatccctacaaacaagggttcggtaatgttgccactaatacggacgggaagaattactgtgggctgccaggcgaatactggttgggcaatgataagatctcccagttgaccagaatgggacctaccgaactgctgatagaaatggaagattggaagggtgataaagtcaaagcacattacgggggatttaccgtgcagaacgaagccaacaagtaccaaatctcagtgaacaaataccgtggcactgcagggaacgcactgatggatggagcaagccaattgatgggagagaacagaaccatgactattcacaatggaatgttctttagcacgtatgaccgagataacgatggctggcttacttccgacccccgcaagcaatgttccaaggaagatggtggcgggtggtggtacaacagatgtcacgctgcaaatccaaacggtcggtactactggggtggtcaatacacttgggacatggcaaagcatggaactgatgatggtgttgtctggatgaactggaagggatcttggtattccatgcgcaagatgtctatgaagattcggcccttctttcctcaacag

SEQ ID NO: 153208 - DNA, 1473 bp, Artificial Sequence
  derived and/or modified sequence
atgaaaagaatggtaagctggtcgttccataagctcaagactatgaagcatctgctgctcctgttgttgtgcgtttttctggtcaagtcgcagggcgtaaacgacaacgaggagggcttcttctcggcgagaggccaccggccactggacaagaagcgcgaggaagcccctagcctccgaccggctccccctcctatcagcggtggaggatacagagccaggcccgcaaaagctgcagccacgcagaaaaaagtcgagcgcaaagccccggatgccggtggctgcctccacgctgacccagacttgggagtcctctgcccaaccggatgtcaactgcaggaagcgctgttgcagcaggaacggcctatccggaactcagtcgacgagcttaacaacaacgtggaagcagtctcccagaccagctcatcatccttccagtacatgtatctgctcaaagacctgtggcaaaagagacagaagcaggtgaaggacaacgagaatgtggtgaacgagtattcctcggaactggagaagcaccaactgtacatcgatgaaaccgtgaattcgaacatcccaaccaacctgcgggtgcttcgcagcattctggaaaatcttcgttcaaagatccagaagctggaatctgatgtgagcgcacaaatggaatattgtaggaccccttgcactgtgagctgcaacatcccggtggtatccggaaaggagtgtgaagaaatcatccggaagggtggggaaacttcagaaatgtaccttattcagccagattcttcggtgaagccgtaccgcgtttactgcgacatgaacaccgaaaatggtggatggactgtcatccagaatcgccaagatggatcagtggattttggacgtaagtgggatccgtacaaacagggcttcggaaacgtggcgacgaacactgacggaaagaattactgcgggcttccaggggagtactggcttgggaacgacaaaatctcccagctgaccagaatggggcccactgagttgctgatcgaaatggaggactggaagggcgacaaggtcaaggcgcactacgggggatttactgtgcagaatgaagccaataagtaccaaatctccgtgaacaagtaccgcggaaccgccggaaacgccctcatggacggcgcgtctcaactgatgggagagaatcgcactatgaccatccacaacggaatgttcttctcgacctacgacagagacaatgacggctggctgacgagtgatccgcgcaagcaatgctcgaaagaggacgggggagggtggtggtacaaccgctgccatgcagctaacccgaatggcaggtactactggggtggacagtacacctgggatatggcgaagcatggcactgacgatggcgtggtgtggatgaattggaaagggtcgtggtattcaatgcggaagatgtcgatgaaaatacgcccgttctttccgcaacag

SEQ ID NO: 153209 - DNA, 1473 bp, Artificial Sequence
  derived and/or modified sequence
atgaaacggatggtgtcctggtctttccataagctgaagactatgaaacacctgctcttgctgctgttgtgtgtgtttcttgtgaagtctcagggggtaaatgacaacgaggaaggcttcttcagtgccagaggccacagaccactggataagaaacgggaggaagcacctagcctgaggcctgctcctcctcctattagtggcggaggttatagagccaggcctgctaaggccgcagctacccagaaaaaggtggagaggaaggctcccgacgcaggagggtgcctccacgcagacccagatctgggagtactgtgtccgactggctgccagctgcaggaggccctcctacagcaggagcgcccaattcgcaattccgtggatgagctgaacaataacgtggaagcggtctcccagacttcatcctccagttttcaatatatgtacttgctgaaggatctgtggcagaaacggcaaaaacaggtgaaggacaacgaaaacgtcgttaacgaatattcgtcggaacttgagaagcaccagctgtatattgacgaaactgtaaactcaaacatacctaccaacctgcgcgtcctcaggtccattctggaaaacctgaggtccaagatccagaagttagaatcagacgtgtcggcgcagatggagtactgtcgtactccctgcaccgtgtcatgcaatattcctgtcgtgtcagggaaggagtgcgaagaaatcattcgcaaaggtggagaaactagtgagatgtatctgatacagcccgattcctctgtgaaaccttacagagtgtactgcgatatgaacaccgagaatggcggctggaccgttatccagaaccggcaagatggtagcgtcgacttcggacgcaagtgggacccttataagcaaggttttggcaacgtggctactaacaccgatggaaagaactactgtggactgcccggggagtactggctggggaatgataagatttctcagcttacccgcatggggcctacagaactgctcattgagatggaggactggaaaggggataaagtaaaggcacattacggaggcttcaccgtccagaacgaagcaaacaagtaccagataagtgtgaacaaatatcgcgggacagccggtaacgccctcatggatggcgctagtcagttaatgggggagaacagaacaatgaccattcacaacggcatgtttttctcgacatacgaccgggataatgacggatggctgacgagtgatccaagaaagcagtgctcaaaggaggatggcggaggatggtggtataacaggtgccacgccgcgaacccaaatggtaggtattattggggaggacagtacacgtgggatatggctaagcatggtaccgacgacggtgttgtgtggatgaactggaaagggagctggtattcaatgcgcaagatgtcgatgaaaattcgtcctttcttccctcagcag

SEQ ID NO: 153210 - DNA, 1473 bp, Artificial Sequence
  derived and/or modified sequence
atgaaacgaatggttagttggtccttccacaaactgaaaactatgaaacacctccttctgctgctgctgtgcgtgttcctggtgaaatctcagggtgttaacgacaacgaggagggctttttctcagcccgcggccaccgacctctggataaaaaaagagaagaagctccgagcctgcggccagcgccgccgccgatatcagggggaggctacagggcaaggcccgcaaaagccgctgcaacccagaaaaaggtggagcggaaagcacccgacgccggtggctgccttcacgccgaccctgacttgggggttctctgccccaccggctgtcagctgcaggaggctctattacagcaggaaagaccaatcagaaactctgtggacgaactgaataataatgttgaggccgttagtcagacttcctccagcagctttcagtatatgtacctgctgaaggacctttggcagaaaagacagaagcaggtcaaggacaatgaaaacgtagttaacgagtactctagcgagctcgagaaacaccagctgtatattgatgaaacagtgaacagcaacatccccaccaatctccgagtattacggtctatcctcgagaacttaagatccaaaatccagaaactcgagtctgacgtgtctgcccagatggagtattgccggaccccctgcaccgtttcctgtaatatccccgttgtatctggcaaggagtgtgaggaaattatcagaaaaggcggcgaaacatcagaaatgtacctgatccagcccgattcctcagtgaaaccatatcgcgtgtattgcgatatgaataccgagaatggcgggtggactgtaatacagaatcgccaagatggatccgtggatttcggacggaagtgggatccttataagcagggatttgggaacgtggcaaccaataccgacggcaagaattactgcggattgcccggcgagtattggctcggcaatgataaaataagccagttaaccagaatgggtcctaccgagctgctgattgagatggaggattggaagggtgataaggttaaggcacactatggtggttttactgtgcaaaatgaggcaaataaatatcagatctccgtgaacaagtacaggggaactgccgggaatgccctgatggatggcgcctcccagctgatgggggaaaataggaccatgactatccacaacggaatgtttttcagcacgtacgatcgtgacaatgacggatggctaacctctgaccctagaaagcagtgttccaaagaggatggagggggctggtggtacaacaggtgccatgcggcaaatccaaatggaagatactattgggggggccagtatacctgggatatggctaagcacggcactgacgatggcgtggtatggatgaattggaagggatcatggtactcaatgcgcaaaatgtcgatgaagatacggcccttttttccacagcaa

SEQ ID NO: 153211 - DNA, 1473 bp, Artificial Sequence
  derived and/or modified sequence
atgaagcggatggtcagctggtcctttcacaagctcaagaccatgaagcatctcttgctcctgcttctttgtgtgtttcttgtcaagagccagggagtgaatgataatgaagaaggtttcttttccgcaagaggccaccgacctctcgacaaaaagagggaagaagcgccttcacttcggccggcacctcctcctatttcaggtgggggataccgagcacgcccagccaaggcagcagccacccagaagaaggtcgaacggaaggcaccagacgccggaggatgcctgcacgcagatccagaccttggggttctctgtccaacgggatgccaacttcaggaagcgctcctgcaacaagaaagaccgatccggaattctgttgatgaacttaacaataacgtcgaagcggtgtcccagactagctcctcctcatttcagtacatgtaccttttgaaagatctttggcaaaaacgccaaaagcaggttaaggataacgagaatgtggtgaacgaatactcctcggaactggaaaagcatcagctctacatcgatgaaactgtgaactcaaacattcctactaacctgcgcgtgctccgttcaattcttgaaaaccttagatcgaaaattcaaaagctggaatccgatgtttccgcacagatggaatactgtagaaccccatgcactgtctcatgcaatattccagtcgtgtcgggaaaggagtgtgaagagatcattaggaagggtggcgaaacgtccgagatgtaccttatccagcctgactcgtccgtgaagccctaccgagtgtactgtgatatgaacactgaaaacgggggatggaccgtgattcagaaccgacaggatggaagcgtggactttggaagaaaatgggacccctacaagcagggtttcggaaatgtggcaactaatactgatggcaagaactactgtggattgcctggagaatactggctgggaaatgacaagatctcgcaactgacccgtatgggtcctacggagctgctgattgagatggaggactggaagggtgataaagttaaggcgcactacggaggttttaccgtgcagaacgaagcaaacaaataccagatctccgtgaataagtaccggggtaccgcaggtaatgcactgatggatggagcatcgcaactgatgggggagaatcgaactatgaccatacacaatggaatgttcttttccacttacgatagagacaatgatgggtggctgacctcagaccccaggaagcagtgttcgaaggaagatggaggtggatggtggtacaacagatgtcatgcagcaaacccaaatgggagatactactggggaggacaatacacttgggacatggctaaacatggaaccgatgacggtgtcgtgtggatgaactggaaagggagctggtactcgatgagaaaaatgtcaatgaagattagaccattctttcctcaacaa

SEQ ID NO: 153212 - DNA, 1473 bp, Artificial Sequence
  derived and/or modified sequence
atgaagcggatggtgtcttggagctttcacaagttgaagaccatgaagcatctgctactgctactgttgtgcgtgtttttggtgaaatcacaaggcgtcaacgacaacgaagagggctttttctctgcgaggggccacaggcccctggataagaagcgcgaggaagcgccctctttacggccagccccaccacccatctcaggtggcggctatcgggcgcgacccgccaaagcagcagctactcaaaagaaagttgagagaaaagcccccgacgcaggaggctgtttgcacgcagaccctgacctgggggtgctctgtcccacgggatgtcagttgcaggaagcactgctgcaacaagaacgcccaattcgcaattccgtggatgaactgaataacaatgtagaggcagtgtctcaaacgtcatctagcagcttccagtacatgtacctgctcaaggatctgtggcagaagaggcagaagcaggtgaaagacaacgagaacgtggtaaacgagtattcatctgagttagaaaagcatcagttatacatagacgaaactgtgaatagcaatattcctaccaatttgcgggtgttgagaagcattctggaaaatctgagatccaagatacagaaactggagagcgatgtctcagcccagatggaatactgcaggacaccttgtaccgtcagctgtaatatcccagtagtttctggcaaggaatgtgaggagatcatccgaaaaggaggagaaacgtctgaaatgtatttgattcaacccgacagtagcgtgaaaccttaccgggtgtactgcgatatgaatacagagaacgggggctggacggtgatacagaatcgccaggatggaagtgtggatttcgggcgcaagtgggacccttacaaacaggggtttggtaacgtcgcaactaataccgatggtaaaaactattgcgggctgcccggcgagtactggcttggcaacgacaagattagtcagctaactaggatgggacccactgaactacttattgagatggaggattggaagggggacaaggtcaaggcgcattatggcggcttcacagtacagaatgaggccaataaatatcagatcagcgtgaacaagtatagaggcactgccggcaatgcactgatggacggagcctcccagttgatgggtgagaacaggaccatgaccatacacaacggaatgtttttctctacttacgatcgggacaacgatggttggcttacctcagacccacgtaagcagtgcagcaaagaggacggaggcggttggtggtacaaccgttgtcacgctgctaatcccaacggtagatactactgggggggccaatatacctgggatatggcgaaacatggaacagatgacggggtggtttggatgaattggaaaggttcttggtacagcatgcgcaaaatgagcatgaaaataagaccatttttcccacagcag

SEQ ID NO: 153213 - DNA, 1473 bp, Artificial Sequence
  derived and/or modified sequence
atgaagagaatggtgtcctggagtttccacaaactgaagacaatgaagcacctcctgcttctcctgctctgtgttttcctggtcaaatcccagggtgtcaacgacaacgaggagggcttcttcagtgcccgcggccatcggccactggataaaaaacgggaggaggccccatcactgaggcccgcccctccccctatctcgggggggggctatcgggcacgccctgccaaggcagcagctacacaaaaaaaagtggagagaaaggccccagatgctggtggctgcctgcacgctgacccagacctgggggtcttgtgccccaccgggtgtcagctgcaggaagccctgctgcaacaggagagaccgatccgtaattctgtcgacgagttaaataataatgtcgaagctgttagccagaccagttcgtcatcatttcagtatatgtacctgctcaaggatctgtggcagaaacggcagaagcaggttaaggataacgaaaatgtggtcaacgagtacagctcagaactggaaaaacaccagctgtatatcgatgaaacagtgaatagcaacatcccgaccaatcttagggtgctgcggtccattctggagaacctgaggagtaaaattcagaagctggagagtgacgtttccgcccaaatggaatactgtaggacgccttgcacggtctcttgtaatatccctgtggtgagtggaaaagagtgtgaagagataatccggaaagggggcgagacttccgagatgtatctgatacagcccgactcttcggtgaagccatatagagtgtactgtgacatgaacaccgagaacggcgggtggaccgtgattcagaatcgtcaagacgggtcagtggacttcggcaggaaatgggacccctataagcagggattcgggaatgtcgccaccaacactgatggtaagaattactgcggcttacccggggaatattggctgggcaacgacaaaattagccagctcacccgaatgggaccaactgaattgttgattgagatggaagattggaagggagataaggtgaaagcacactatggcggcttcactgtccagaatgaggcgaataaatatcagatttcagtcaataaatatagaggcaccgccggtaacgccctgatggacggggcctctcagctgatgggggagaatcgcactatgaccatccataacgggatgtttttctcgacatatgaccgagataatgatggttggctcacctctgatccaaggaagcaatgtagcaaagaggacgggggcggctggtggtataatcgctgccatgcagccaatcctaatggccggtactattggggcggacagtacacgtgggatatggccaagcacggaaccgacgacggagtagtgtggatgaattggaaaggtagttggtacagcatgcggaagatgagcatgaaaatcaggcctttcttcccacaacag

SEQ ID NO: 153214 - DNA, 1473 bp, Artificial Sequence
  derived and/or modified sequence
atgaagagaatggtgtcatggtccttccataagttgaaaactatgaagcatctgttgttgctgctgctgtgtgtctttctggtgaaaagccagggggtgaatgataacgaggagggtttcttctccgcaagaggtcatcgacccctcgacaaaaagagggaagaggcgccatcactgcgcccagccccgcctccaatctcagggggaggataccgggcgcgtccggccaaagccgccgccactcagaaaaaggtggaacgcaaggcaccagatgctgggggatgtttgcacgctgaccctgacttgggcgtgctgtgcccaaccggatgccaactgcaggaggcactgctccagcaagaacgaccaatcagaaactcggttgatgagctgaataacaacgtggaggcggtgagccagacctcgagctcctccttccagtacatgtacctgcttaaggatctttggcagaagagacagaagcaagtcaaagacaacgaaaacgtggtgaacgaatactcgtcggagctggaaaagcaccagctctatatcgacgaaactgtcaactcaaacatacctacgaaccttagagtgctccgaagcatactcgagaatctgaggtccaaaatccaaaaactggagtctgacgtgtcggcccagatggaatactgccggactccatgtaccgtgtcatgcaatatcccggtggtgtcggggaaggaatgcgaagagatcattcggaaaggcggggaaacttcggaaatgtacctgatccagccggactcctccgtgaagccgtaccgcgtgtactgcgatatgaacacggagaacggcggatggaccgttatccagaatcggcaagatggctcggtggactttggccgcaagtgggacccgtacaaacagggcttcggcaatgtggccactaacactgatggaaagaactactgcggcctgccaggcgagtactggctcgggaatgataagatttctcaactcactaggatgggcccgacggaattgctcatcgaaatggaagattggaagggagataaagtgaaggcccactatggagggttcaccgtccaaaacgaggcgaacaagtaccaaatcagcgtgaacaagtacaggggtactgcgggaaatgccctgatggacggtgcgagccaactgatgggcgaaaatcgcaccatgaccatccataacggaatgttcttttctacctacgaccgcgataacgacggatggttgacctccgatccgcggaagcagtgctcaaaggaggacggaggtggatggtggtacaatagatgccacgcagcgaacccgaacggacgctactattggggagggcaatacacttgggatatggctaagcacggaaccgacgacggagtggtctggatgaattggaaaggtagctggtactccatgcgcaaaatgtcgatgaagatccgcccgttctttccccagcag

SEQ ID NO: 153215 - DNA, 1473 bp, Artificial Sequence
  derived and/or modified sequence
atgaagagaatggtctcttggagtttccacaaactcaagacaatgaagcacttgctgctcctcctcctctgtgttttccttgtcaagtcacaaggggtcaatgacaatgaggaaggatttttctctgctaggggccatcgacctcttgacaagaaacgcgaggaggcaccatccttgcggcccgccccgccgccaatttcaggcggcggctacagagcacgaccggctaaagcagccgccacccagaaaaaagtcgagagaaaggccccggatgccggcggatgcctgcacgctgatccagatctgggggtgctctgccccaccggatgtcagctgcaggaggctctccttcagcaggaaagacctatccggaattcagtcgatgagttaaacaataacgtggaggcggtgagccaaactagttcttcttcatttcagtatatgtacttgctgaaagacttatggcagaagcgacaaaaacaagtgaaagataacgaaaacgtcgttaacgagtatagtagcgagctggaaaaacatcagctatacattgatgagacggtgaattccaacatccccacaaacctgagagtgctgcggagtatccttgagaacctgcggtccaagatccaaaagctagaaagtgatgtttctgctcagatggaatattgccggaccccttgcaccgtgagctgtaacatcccagttgtctcgggtaaggagtgtgaggagattatcaggaaggggggtgagactagtgaaatgtacctcatccagcctgacagctcagtgaaaccatacagggtgtactgcgacatgaacactgagaacgggggttggaccgtgatccagaaccgacaagatggcagtgtggattttggtagaaaatgggacccctacaagcagggctttggcaatgtggccacgaacaccgacggaaagaattactgtggcctcccaggggaatattggttgggaaacgataaaatctcccagttaactcgcatgggcccaactgagctccttatcgaaatggaagattggaaaggggacaaggtgaaggcacactacggtggctttactgtgcagaatgaggccaataagtaccagatctctgtgaataaatacaggggaaccgccggtaacgccctgatggacggcgcctcccaactgatgggggaaaatcgaacgatgaccattcacaacggaatgttttttagcacatatgacagagataatgatgggtggctgacatccgatccacgtaagcagtgcagcaaggaagatggaggaggctggtggtataaccggtgccacgccgccaatcccaatggcagatactactgggggggtcagtacacgtgggacatggccaaacacggaaccgacgatggtgtcgtgtggatgaattggaaagggagttggtattctatgcgaaagatgtcaatgaaaatccggccatttttcccacagcaa

SEQ ID NO: 153216 - DNA, 1473 bp, Artificial Sequence
  derived and/or modified sequence
atgaaaaggatggtgtcgtggtcttttcacaagctaaagacaatgaagcatctgctcctgctgctgctctgtgtcttcttggtcaagtcccagggggttaacgataatgaggagggttttttcagcgcccgtggacaccggcctctcgacaagaaaagagaggaagcgcccagcctgcgccccgcccccccccccatttctggcggcggctacagagctcggccggctaaggcggcagcgacccagaagaaggtggagcggaaggccccagatgcaggcggttgcctccacgccgaccccgatctgggggtgctttgccctacggggtgtcagctgcaggaagcattgcttcagcaggagaggccaattaggaattctgtcgacgagcttaacaataatgtcgaagccgtctcccagacctccagctcttccttccaatatatgtaccttcttaaagatctttggcagaagcggcagaaacaggttaaagacaatgagaatgtcgttaatgagtattcatcagaactagagaagcatcagttatatattgacgagacggtcaactccaacatccctacaaatctacgggtcctgcggtcaatcctcgaaaatctcaggagcaagattcagaagctggagtctgatgtaagtgcacaaatggaatactgccggaccccgtgtacagtcagttgcaacattcctgttgtcagtgggaaagaatgcgaagagattatccggaaagggggcgaaacctccgagatgtatctgattcaacctgactcatcagtgaaaccttacagggtgtactgcgatatgaataccgaaaacggtgggtggaccgttatccagaatcgacaggatggctcagtagactttgggcgcaagtgggacccatacaagcagggcttcggtaacgtagcgacgaatactgacggtaagaattattgcgggttacccggcgagtactggctcggtaatgacaaaatttcccaactcactcgcatgggtcccaccgagctgcttatcgaaatggaagattggaaaggtgacaaagtaaaagcacattacggcgggtttacggtgcagaatgaagctaacaagtaccagatttcggttaataagtaccgcggcaccgctgggaatgctctcatggacggggcttcccagctcatgggagagaaccggacaatgaccatccataacgggatgttcttctcgacctatgatcgggacaatgatggttggctcacctctgatcctcgcaagcagtgctccaaggaggatgggggaggttggtggtacaaccgctgccacgctgcgaaccccaacggccgctactactggggcggccaatacacttgggacatggcaaagcacggcacagacgatggggtggtatggatgaactggaaggggtcttggtattccatgaggaagatgagcatgaagatccggcccttctttccgcaacag

SEQ ID NO: 153217 - DNA, 1473 bp, Artificial Sequence
  derived and/or modified sequence
atgaaaagaatggtcagttggtcattccacaagctcaagacaatgaaacacctactgttgctcctgctctgtgtttttttggtcaaatctcagggcgtgaacgacaacgaggaaggatttttcagcgcacgtggccatcgcccgctggataagaagcgggaagaggcacccagcctccggcccgcgccaccgccaatcagcggcggcggatatagggcacgtccggcaaaagctgccgccacacagaaaaaggtggaaaggaaagcccccgatgccggcgggtgcttgcacgccgatcctgacctgggagttctttgcccaaccgggtgtcagctgcaggaagccctgttgcagcaggaaagaccaatacgtaactcggttgatgagttgaataataacgtcgaagctgtctcgcagacttccagcagctcttttcaatacatgtaccttctgaaggatttatggcagaagcggcagaagcaggtaaaggataacgagaatgtggttaacgaatactctagcgagcttgaaaagcaccagctttacatcgacgaaacagtgaactcgaacattcccacgaacctgcgggttttgaggtctatcctggagaatttgaggtctaagatacagaaattggagtctgacgtgtccgcccagatggagtactgcagaacaccgtgtaccgtcagctgtaatattccagttgtatcaggcaaagaatgcgaggagatcattcgcaaaggaggggagacgagcgagatgtacctaatccagccagattcctcagtgaagccgtaccgggtatactgtgatatgaacactgagaacggcggttggacagttatccagaaccgacaggacggatccgtggactttggcaggaagtgggacccctacaaacagggtttcggaaatgttgccactaacacggatggcaagaattactgtggcctcccgggggaatactggctgggaaacgacaagatcagccaattaacacgcatggggcctacggagctgctgattgagatggaggactggaaaggcgacaaggtgaaagcccactatggcggattcacggtgcagaacgaggcgaacaagtatcagatttcagttaacaaatacagggggactgccggcaatgctctgatggatggtgcctcacagcttatgggcgaaaaccgaaccatgacgattcataatggcatgttcttctccacatacgatagggacaacgacggctggttgacctctgaccccagaaagcagtgcagcaaagaagatggcggcggctggtggtataatcgttgtcatgctgccaatcccaatggcagatattattggggaggacagtacacctgggacatggccaagcatgggacggatgacggtgtggtgtggatgaattggaaaggcagctggtatagcatgcgtaaaatgtctatgaagatccgacctttcttcccacagcag

SEQ ID NO: 153218 - DNA, 1473 bp, Artificial Sequence
  derived and/or modified sequence
atgaagcggatggtttcctggtctttccataagttaaagactatgaagcaccttctgctgttgctgctgtgtgtgttccttgtgaaatctcagggtgtcaatgataatgaggaagggttcttctctgccaggggtcatagaccactggataagaagcgggaagaggcccctagtctgcgcccggctccaccccccatttctggtggtgggtatagggcccgcccagccaaggctgcggcgacacaaaaaaaagtggaacgcaaggcgcctgacgcaggtgggtgcctacacgcagaccccgatctgggcgtgctgtgtcccacgggatgtcagcttcaggaagcattgcttcaacaggagagacccatacggaactcggttgatgaactgaataataatgttgaagcggtttcccagacatccagctcctcttttcagtacatgtatctcttaaaagatctgtggcagaagaggcagaagcaggttaaagataacgaaaatgtcgtgaatgagtactcttccgagctggaaaagcatcagctctatatcgacgaaaccgtgaattccaatattcccaccaatctgagggtgttgagaagcattctcgagaacttacggagcaaaattcagaaactggagtccgacgtgtcagcccaaatggaatactgtagaaccccttgtaccgtgtcgtgtaatataccagtggtgtctggcaaggaatgtgaggaaatcataagaaagggcggggaaacttctgagatgtacctgatccagcctgactcctctgtgaagccttatagggtgtactgcgatatgaacaccgagaacggcgggtggaccgtcatccagaaccgacaagatggatccgtcgacttcggacggaagtgggatccctacaagcagggctttggaaatgtggccaccaacaccgatggcaagaattattgcggtctacctggtgagtactggctgggcaacgacaagatttctcagctaacacgtatggggcccacagaactactgatcgagatggaggattggaagggggacaaagtgaaggctcactacggcggcttcaccgtacagaacgaggccaacaaataccagatttccgtcaacaaatatcggggaacagcaggaaatgccctgatggacggagctagccagttaatgggagaaaaccgtaccatgactattcacaacggtatgtttttcagcacgtacgaccgggacaatgatggatggctgacctctgaccctcgcaagcaatgctcaaaagaggatggcggtgggtggtggtacaatagatgccacgccgcaaaccccaatggacggtactattggggcggccagtacacctgggatatggctaaacacggtacagatgacggagtggtgtggatgaactggaaagggtcatggtattccatgcgtaagatgtctatgaagatacgacctttctttccacagcag

SEQ ID NO: 153219 - DNA, 1473 bp, Artificial Sequence
  derived and/or modified sequence
atgaagcggatggtttcctggtcatttcataaacttaagacaatgaaacatctcctcctacttctgctctgcgtgtttctagtgaagagccagggggttaacgataacgaggaaggattcttttcagcgcgaggccatcgccccctggataaaaagagagaggaggctccatccctacgaccagctccaccccccatctcagggggcggctacagagctcggcctgcgaaagcggctgctacccagaagaaagtcgaacggaaggccccggacgcaggaggttgccttcatgcagacccggacttgggagtgttatgtccaaccgggtgtcagctgcaagaagccctcctgcaacaggaaagacccatccggaactccgttgacgagctgaacaataacgtcgaagccgtaagtcaaacctcaagcagtagttttcagtatatgtatcttctgaaggatctctggcagaagcgacagaaacaagttaaggacaatgaaaacgtggtgaatgaatattcttcagagcttgaaaagcatcagctgtatatagatgaaaccgtgaattctaatatccctacaaacttacgtgtgctacgcagcattctcgaaaatctcaggtctaagattcaaaagttagagtcagatgtctcagcccagatggaatattgccggaccccgtgtaccgtgagctgtaatatcccggtagtctcaggaaaagagtgcgaagagatcattaggaaaggaggagagacatccgaaatgtacctcatccagcctgacagctctgtcaagccatatcgcgtctactgcgacatgaataccgagaatggaggatggacagtcatccagaatcgccaggatgggtcagtggacttcggtcgcaagtgggacccctataaacagggattcgggaacgttgccaccaacacggacggtaaaaattactgtgggttgccgggtgagtactggctgggcaacgacaagatttcgcagttgacccgtatgggtcccaccgagttgctgatagaaatggaggactggaagggagataaggtgaaggcacattacggaggctttaccgtacagaatgaagcgaataaatatcaaattagtgtcaataagtacagggggaccgcgggaaatgcgctcatggatggcgcgtcccagctaatgggggagaaccgtacgatgaccatccacaacggcatgttcttctccacttacgatcgtgacaacgacggatggttgacgtcagatccacgcaagcagtgttcaaaggaggacggtggtggatggtggtataaccgttgtcacgcagctaatcccaatggacgctactattgggggggtcagtatacgtgggatatggctaaacatggcacagatgatggtgtagtgtggatgaactggaaaggttcctggtactctatgcgtaagatgtcaatgaagattcgcccgttcttcccgcaacag

SEQ ID NO: 153220 - DNA, 1473 bp, Artificial Sequence
  derived and/or modified sequence
atgaaaaggatggtgtcttggtccttccacaaattgaagacaatgaaacacctattgttacttctgctgtgcgtgtttctcgtaaaatctcagggagtgaacgacaatgaagaagggtttttctccgcaaggggacatcggcccctagataaaaaacgagaagaagccccttcgctgcgacccgctccaccccctatttccggaggagggtatagagctaggcccgccaaagctgccgcaacacagaaaaaagtcgagaggaaggcccctgacgctggagggtgtctccacgctgatcctgacctcggagtcctctgccccacaggatgtcagttgcaggaagccctcttacagcaggaacggcccatccggaatagtgtcgacgaactgaacaacaacgtagaagcggtgtctcagacttcttcttccagtttccagtatatgtatttattaaaggatctctggcagaaacggcagaagcaggtgaaagataacgaaaacgttgttaacgaatattcctctgaactggaaaaacatcagctatacatcgatgaaactgtgaattctaacatacccacaaatctccgggtcttacgctctatactggaaaatctaagatctaaaatccagaaacttgaatctgacgtcagtgcacagatggaatattgcaggactccctgcacagtgtcttgtaatatccctgtggtgtcagggaaagaatgcgaagaaataataagaaaaggaggggagacatccgaaatgtatctaatccaacccgactcttctgtaaaaccctatagagtatactgtgatatgaacacagaaaacgggggatggactgtgatccagaatcgccaggatgggtcagtcgattttggaaggaaatgggatccttacaaacagggatttggaaatgttgcaactaatacagatgggaaaaactattgtgggctgccaggagaatattggcttgggaatgataaaatttcacagctaacacgcatgggacccacggaactcttaatcgaaatggaagattggaaaggggataaagtgaaagcccattacggagggtttacagttcagaacgaggctaataaataccagatctcagttaataaatatagggggacagcggggaatgctctgatggatggggcatctcagttaatgggagagaatcggacgatgacaatacataacgggatgtttttctctacatatgatagggataatgacgggtggcttacaagtgaccctcgcaagcagtgttcaaaagaagacggagggggatggtggtacaaccggtgccacgctgctaaccctaacggacggtattattgggggggacagtacacatgggatatggctaaacacggaacagatgatggggtggtgtggatgaactggaaagggtcttggtatagtatgcggaagatgtcaatgaaaattcgaccttttttcccacagcaa

SEQ ID NO: 153221 - DNA, 1473 bp, Artificial Sequence
  derived and/or modified sequence
atgaagcggatggtttcctggtctttccacaagcttaaaacaatgaagcacttgctcttgttgttgctctgcgtgtttctggtcaaatcccagggcgtgaacgataacgaggaggggttcttcagcgcccgggggcaccgacctttggacaagaaacgtgaggaagctccctccttacgccccgctccccctccgatttccggtggtggttaccgtgcgcgcccagccaaggccgctgcaacccagaagaaagtggagaggaaggctcccgacgccggcggctgtcttcacgctgaccccgatctgggcgtcctttgtcccactggctgccaactccaggaggccctgttacaacaggaacggcccatccgcaattcggtggatgagcttaacaacaacgtcgaggcggtttcccagacctcctcctcctcctttcagtacatgtatttgttgaaagatctgtggcagaagaggcagaaacaggtcaaggacaacgagaacgtcgtcaatgagtactcttcggaactggagaagcatcagctctacatcgatgagaccgtgaatagtaatatccctaccaacctgcgcgttctgcgtagtatacttgaaaaccttcgcagcaagatccagaagttggaatccgatgtctctgcccagatggaatattgtcgcacgccctgcaccgtctcctgtaatatccccgttgtgtcgggcaaggagtgcgaggagatcatccgtaaggggggtgagactagcgagatgtaccttatccagccggatagcagcgtcaagccgtaccgcgtctattgtgatatgaacaccgagaatggtggctggaccgtcatccagaaccgtcaggatggctccgtcgacttcgggcgtaaatgggacccctacaagcagggcttcggaaacgtagctactaacacggatggtaagaattattgtggtcttcccggtgagtactggcttggcaacgacaagatctctcagttgacacgaatgggtcccaccgagctgctcattgagatggaggactggaagggcgataaggtgaaagcccattacggcggattcaccgttcagaacgaggccaacaagtaccagattagtgtcaacaagtaccgcggcactgccggcaatgcccttatggacggggccagccagctgatgggcgagaatcgtactatgacaatacataacggcatgtttttcagcacctacgatcgagataatgacggctggctgaccagcgatccccgtaagcagtgctccaaggaagatggtggtggctggtggtacaaccgctgccacgctgctaacccaaacggtcgttattattggggtggtcaatacacgtgggatatggctaagcacggcaccgacgacggcgtcgtctggatgaactggaaaggaagttggtattccatgcgcaagatgtccatgaagattcgccccttcttcccccaacag

SEQ ID NO: 153222 - DNA, 1473 bp, Artificial Sequence
  derived and/or modified sequence
atgaagcgcatggtttcatggtcctttcacaaactcaaaacaatgaagcacttgctgttgctgcttttatgcgtgtttctcgtgaaaagtcagggcgtgaatgacaacgaggaaggatttttctccgcacgtggacaccgcccgttagataagaagcgcgaagaggcgccctcactcaggcctgccccaccacctatttccggaggaggttacagggcccggccagcaaaagccgcggcgactcagaaaaaagtggaacgtaaagcgcctgatgccggcggttgtttgcacgcggacccagatctcggggtcctctgtcccactggttgccagctgcaggaagccttgctgcaacaggagaggccgattcgcaactccgtagacgagctgaataacaacgtcgaggctgttagccagacatcatcgtcaagctttcagtacatgtatctcctcaaggacctctggcagaagcgacagaaacaggtgaaagacaacgagaatgtggtgaacgaatattcatccgaactggagaaacatcagttatacatcgatgaaaccgtgaactccaacatcccaaccaatttgcgcgtgctcagaagcattttggaaaaccttaggtcaaagattcagaaactggaaagtgatgtctcagctcagatggagtattgccggacaccctgtacagtctcttgcaacattcccgttgtcagtggcaaggagtgcgaggaaatcatcaggaaggggggcgagactagtgagatgtacctcatccaacccgactctagtgtgaagccctacagagtgtactgcgatatgaacactgagaatggcgggtggactgttatccagaatcgccaggatggaagcgtggactttggccggaaatgggacccttacaagcaaggtttcggcaacgtggccactaacaccgacggaaaaaactactgtgggctgccaggggagtactggctgggtaacgacaagatctcacagcttactaggatgggtcccactgaactcctgatagagatggaagattggaagggggacaaagttaaggcccactatggaggattcactgtgcagaacgaggccaataagtaccagatctccgtaaataagtatcgcgggaccgctggcaacgctctgatggacggcgcatcccagctgatgggcgagaaccggactatgaccattcataatggcatgttctttagcacgtatgacagagacaatgatgggtggctgaccagtgatccccgcaaacagtgtagcaaggaggacgggggaggctggtggtacaaccggtgccacgcagctaaccctaacgggcgctattattggggtggccagtatacctgggatatggcaaagcacgggactgacgacggcgtggtgtggatgaattggaagggctcttggtacagtatgaggaagatgtccatgaaaatacgcccgtttttcccacagcag

SEQ ID NO: 153223 - DNA, 1473 bp, Artificial Sequence
  derived and/or modified sequence
atgaagagaatggtctcctggagtttccacaaattgaaaactatgaaacatttactactcctgctgctttgtgtattcctggttaagtcccagggagtaaatgataacgaggaagggtttttttcagcacggggccatcggcccctcgataagaagcgcgaagaggctccctccctcaggccagcaccaccccccatcagtggcggaggatacagagctcgcccggcaaaggctgccgccacccagaagaaggtggagcgtaaagccccggacgccggtggttgcctacacgccgatccagatttgggcgtactgtgtcccacagggtgtcaactccaagaagcactgcttcagcaggagagacccattcgtaactctgttgatgagctgaataataacgtcgaagctgtcagccagacctcctcctcctccttccagtatatgtatctattaaaagatctctggcagaaacgccaaaagcaggtaaaagataatgaaaatgttgtgaatgagtatagcagcgagctggaaaaacaccagctatatatagatgagactgttaactcaaatatacctactaatctgagggttcttaggagcatccttgaaaatctccgatcgaaaatccaaaaactggagagcgacgtgtcagcccagatggagtattgccgaactccttgcactgtctcctgtaacataccggtggtttcaggtaaagaatgtgaggagatcatccggaagggcggcgagacatcggagatgtatctgatccagcctgacagtagcgtgaagccttacagagtatactgtgatatgaatactgaaaatgggggctggaccgtcatccagaaccgtcaggacggatccgtcgattttggccgcaaatgggatccatacaaacagggattcggtaatgtcgccaccaacacagacggcaagaattattgcggcctgcccggggagtactggctgggcaacgacaagatttcccagcttacacgaatgggcccaactgaactgttgatcgagatggaggactggaagggggacaaggttaaggcccactatggcggttttacagtccagaacgaggccaacaaatatcaaatttctgtgaataaataccggggaacagctggcaatgcattaatggacggagcatctcagctgatgggcgaaaatcgaactatgacgattcacaacgggatgtttttttccacatatgatagagataatgatggctggctgaccagcgacccgcggaaacagtgctctaaagaagacggcggcggatggtggtataatcgttgccacgccgccaatccaaatggacggtactactggggcggacaatacacctgggatatggccaaacatgggacggacgatggtgtcgtatggatgaactggaagggctcttggtactcaatgcgcaaaatgtccatgaaaattaggccatttttcccacagcag

SEQ ID NO: 153224 - DNA, 1473 bp, Artificial Sequence
  derived and/or modified sequence
atgaagcgaatggtatcttggagtttccataaactgaagacaatgaagcatcttctccttttgttgctctgcgttttcttagtaaaatcccaaggagttaatgataatgaagaaggatttttcagcgcacgtggacacagacctttggataagaagcgcgaggaggcaccaagcttgaggccagccccaccaccaatatctggtggcggatatcgtgcccgtccagcaaaagcggcagctacacagaagaaagttgaaagaaaagcaccagatgctggaggatgtttacatgcggatccagatctcggtgttctctgtccaactggatgccaacttcaagaagctcttcttcaacaggaaaggccgatccgtaattcagtggacgagcttaacaataatgttgaagccgtcagtcaaactagttcaagttcctttcaatatatgtacctcctaaaagatctctggcaaaagcggcaaaaacaagtcaaagataatgaaaatgttgtgaatgaatactcatcagaactcgaaaagcatcaactgtatatcgacgaaacggttaattcaaatataccaactaatctcagagtcttacgttcaattctagaaaacttaagatctaagatacaaaaacttgagtccgacgttagtgctcaaatggagtattgtcgcaccccatgcacggtctcctgcaacatcccagtcgtctcaggtaaagagtgtgaggaaattatccgcaaaggaggagagacttccgaaatgtatctcattcaacctgattcctcggtaaaaccatatagagtctattgtgatatgaacactgaaaatggagggtggactgtcattcagaatcgtcaagatggatcggtagattttggacgaaagtgggatccttataaacaaggattcggaaacgtcgccactaacactgatggcaaaaattactgcggactgcccggggagtattggctcggtaatgataaaatctctcagcttacccgtatgggaccaaccgaactattaatcgaaatggaggattggaaaggtgataaagtaaaagcgcattatggtggttttacagtccaaaatgaggctaataaatatcaaatttcagtaaataagtatcgagggaccgcaggtaatgcacttatggatggagcctcgcagttgatgggagaaaatagaaccatgacaattcacaatggaatgttcttttcgacttacgatcgcgacaatgacgggtggctgacttctgatccacgaaaacaatgtagtaaagaggatggcggaggatggtggtataaccgatgccacgctgcgaacccaaatggaagatactactggggaggacagtatacctgggatatggctaagcatggtacggatgacggagttgtctggatgaattggaaaggatcgtggtattcgatgcgtaaaatgtctatgaaaatcaggccgttctttccacaacaa

SEQ ID NO: 153225 - DNA, 1473 bp, Artificial Sequence
  derived and/or modified sequence
atgaagcggatggtgtcctggagcttccacaagctgaagactatgaagcacctgcttctgctcctgctgtgcgtattcctggtcaaaagtcaaggagtgaacgacaatgaagaggggttttttagcgcacggggacataggcccttggacaagaagagagaggaggctccttccctgaggccagcaccccctccaatctctggtggaggttacagggctaggccagcgaaagcggctgctactcaaaagaaggttgaaaggaaggccccggacgcagggggatgtctgcatgccgatcccgatctgggtgtgctgtgccctactggatgtcagttgcaggaggctctccttcagcaagagcggcccattagaaatagtgtggatgagctcaacaataatgttgaagccgtgtcccaaacctcctcttcctcattccagtatatgtacctcctgaaggatctctggcagaaaaggcagaaacaggttaaggataatgagaatgtggttaacgagtattctagcgaactcgagaagcaccagttgtacattgacgaaaccgttaatagtaacatcccaacaaatctgcgagttctgcgatcaatcctggaaaatctccgatctaaaatccagaaattggagagcgatgtgtcagcacagatggagtactgccggacaccatgtacagtgtcttgcaacatcccggtggtgagcggaaaggagtgcgaggagatcattagaaagggtggagagaccagcgagatgtacctgatacagcctgatagctctgtgaagccttatagagtgtactgcgacatgaacactgagaacggcggatggacagtcattcagaatagacaagatggtagcgtagactttggcagaaagtgggacccctacaagcaggggttcggtaatgttgccacaaatactgatggaaagaattattgtggtctgcccggggagtattggctgggtaacgacaagatatcccagctgacgcggatgggacccactgaactcctgattgagatggaagactggaaaggtgataaggtgaaggctcactatgggggcttcaccgtacagaatgaggctaataaatatcagatatctgtgaacaagtacaggggaactgcagggaacgccctgatggatggcgcatcacaactgatgggcgaaaataggactatgactattcacaacggcatgttctttagcacatacgatagagacaatgatggatggctgacgtctgatccccgcaagcagtgcagtaaggaagacggcggaggatggtggtacaaccgctgtcacgccgctaacccaaatggccggtactattgggggggccagtacacctgggatatggcgaaacatgggaccgacgatggggtcgtttggatgaactggaagggaagctggtatagcatgagaaagatgagtatgaagatcaggccctttttcccacaacag

SEQ ID NO: 153226 - DNA, 1473 bp, Artificial Sequence
  derived and/or modified sequence
atgaagcgcatggtttcctggtcttttcacaagctaaagacaatgaagcaccttctgttactgttgctttgtgtttttctcgtcaagtcacagggagttaatgacaatgaggagggtttttttagtgctaggggacaccgccccctggataaaaagcgggaagaagcacctagtctaaggccagcccctcctccaatatccgggggcgggtatagggctagacccgccaaggccgctgcgacccagaagaaggtagaaagaaaggccccggacgctggcggctgtttacatgccgatcctgacttgggagttctctgccccaccgggtgtcagcttcaggaagccctactgcaacaagaacggcctatccgaaattctgttgacgagctcaacaataacgttgaggcagtgagccaaaccagctccagctccttccagtacatgtaccttctgaaagatctctggcagaagcggcaaaaacaagttaaagataacgagaacgtggtgaacgagtattcatccgagttagaaaagcatcagttatatattgatgagaccgtcaattctaacattccaacaaatttgagggtcttacgctccatccttgagaacctccggagtaagattcagaaactagaatctgatgtgtcagcccagatggagtactgtcgcaccccttgcacagtgtcttgcaacatcccggtggtgagcgggaaggagtgtgaagagatcattaggaagggcggagagaccagcgaaatgtatctgatccagccggactcttccgtaaagccatatcgagtgtattgtgatatgaacaccgaaaacggcggatggactgtaatccagaataggcaagacggcagcgtagactttgggcgcaaatgggacccttataaacagggatttggtaacgtagctaccaatactgacggcaaaaattactgcggactaccgggggaatattggttaggaaacgacaagatctcccagcttactcgaatggggccgaccgaacttttaatcgaaatggaggattggaagggggataaagtgaaggcacattacgggggatttacagtgcagaacgaggctaataagtaccagatttccgtgaacaaatatagaggcacagcaggcaatgccttaatggacggcgcctcccagttgatgggcgaaaacaggacaatgacgatccacaatggcatgtttttttcaacttacgacagggacaacgatggatggctgaccagtgatcccagaaaacagtgttccaaagaggacggcggaggatggtggtacaaccgatgccacgccgccaacccaaacggaagatattattggggcgggcagtatacgtgggatatggccaagcacggaacagatgacggcgtggtgtggatgaattggaagggatcctggtattcgatgcgaaaaatgagcatgaagattaggccattcttccctcaacag

SEQ ID NO: 153227 - DNA, 1473 bp, Artificial Sequence
  derived and/or modified sequence
atgaagcggatggtgtcctggtcgttccacaaactcaagactatgaaacacctcctgctattgctgctatgtgtattcttagtgaaatctcagggagtaaatgataacgaggaagggtttttctcagcacgggggcaccgacccctagacaaaaagagagaagaagctccctcgcttcgccccgcaccaccgcctatctccggagggggatatcgagccagacctgccaaagcggctgccactcagaaaaaagtcgaaagaaaagcccctgacgccggggggtgtcttcacgccgatccagatctcggagtcttatgtcctacagggtgtcagttacaggaagcacttcttcaacaggaaagaccgattaggaattctgtcgacgagctgaataacaatgtggaagctgtctctcaaacatcatcctcgtcattccagtatatgtatctcctaaaagacctctggcagaaacgacagaaacaggtaaaagataatgagaatgtcgtcaatgaatattcttctgaactagaaaagcatcagctttatatcgatgaaactgtaaacagtaatatccctactaacttgagagtattgcggtcaatactggagaatctccggtccaaaatccagaaacttgaatccgatgtgtctgcccagatggagtactgtaggactccttgcacagtgtcctgcaacatccccgtggtctccggaaaagaatgtgaagagataatcagaaagggaggagaaactagtgagatgtatcttatccagccagatagttcagtgaaaccatatagggtgtattgcgatatgaatacagagaacggagggtggactgtgatccaaaaccggcaagatggatctgttgactttggaaggaaatgggatccatacaaacaagggtttggaaacgttgccactaatacagatggaaaaaattactgtgggcttcctggggaatactggctgggaaacgacaagattagtcagctaacacggatggggcctactgaactgctgatcgaaatggaggattggaaaggggataaagtgaaggctcactatggggggtttacagtacagaatgaagctaataagtatcagatttccgttaataagtacagagggacagctgggaacgctctaatggatggggcttcccagctcatgggagaaaaccggactatgacaatacacaacggaatgttcttctcaacttatgatagggataatgatggatggctaacttctgatccccgaaaacaatgttcaaaagaagatgggggaggatggtggtataaccggtgtcacgcggccaaccctaacggaagatactactggggagggcaatacacgtgggacatggccaagcacggaacagatgatggagttgtatggatgaactggaaaggatcctggtattctatgcgcaaaatgtccatgaaaataagacccttttttcctcagcag

SEQ ID NO: 153228 - DNA, 1473 bp, Artificial Sequence
  derived and/or modified sequence
atgaaaagaatggtaagttggagttttcataaattaaaaacaatgaaacatcttcttttattacttttatgtgtttttttagtaaagtctcaaggagttaatgacaacgaagaaggatttttttcagcaagaggtcatagaccattagataaaaaaagagaagaagctcctagtttaagaccagcaccaccaccaatttctggtggaggttatcgtgcaaggcctgctaaagcagctgcaactcaaaaaaaagtagaaagaaaggcaccagatgctggaggatgtttgcatgcagatccagatttgggtgttctttgtccaactggatgtcaattacaagaagctttattgcaacaagaaagaccaattagaaatagtgttgatgaacttaataacaatgtagaagctgtttcacaaacttcatcttcaagttttcaatatatgtatttattaaaagatctttggcaaaaaagacaaaaacaagttaaagataatgaaaatgtagttaatgaatattcaagtgaattggaaaaacatcaactttatattgacgaaactgtgaattctaatattccaactaaccttagagttcttagatcaattcttgagaacttaagatcaaagattcaaaaattagaatcagacgtttctgctcaaatggaatattgtagaactccatgtacagtttcatgtaacattccagttgtttctggaaaagaatgtgaagaaattattagaaagggaggagagacaagtgaaatgtatttaattcaaccagactcttctgttaaaccatacagagtttattgtgatatgaatactgaaaacggtggatggactgttatacaaaatagacaagatggttcagttgattttggaagaaaatgggatccatataaacaaggatttggaaatgttgctactaatactgatggtaaaaactattgtgggttaccaggagaatattggttaggaaatgataagattagtcaattaacaagaatgggaccaacagaattattaatagaaatggaagattggaaaggggataaagttaaagcacattatggtggatttacagtacaaaatgaagcaaataaatatcaaatttcagttaataaatatagaggaacagctggaaatgcattaatggatggagcatcacaacttatgggagaaaatagaacaatgactattcataatggtatgttcttttctacttatgatagagataatgatggttggttgacttctgatccaagaaagcaatgtagtaaagaagatggaggtggatggtggtataataggtgtcacgccgcaaatccaaacggaagatattattggggaggtcagtatacttgggacatggcaaaacatggaactgatgatggagttgtatggatgaattggaaaggaagttggtatagtatgcgtaaaatgagtatgaaaatacgtccattttttccacaacaa

SEQ ID NO: 153229 - DNA, 1473 bp, Artificial Sequence
  derived and/or modified sequence
atgaagagaatggtttcgtggagttttcataagctgaagaccatgaaacaccttttattgttacttctatgtgtctttttagttaagagtcagggcgtgaatgacaacgaagaaggctttttttcagcaaggggtcacaggcccctggacaaaaagcgggaagaagctccatcgctgcgccccgctccgcctccaatcagcgggggtggatacagagctaggccagctaaagccgcagccacacagaagaaggtagagagaaaggcacctgatgcaggagggtgtttgcacgccgatccagacctcggtgtgctttgtcccacaggctgccagctgcaagaggccctacttcagcaggaacgcccaatcagaaacagtgttgatgaattgaacaacaatgttgaggcagtttcccaaacctcctcatcatcctttcagtacatgtatctcctcaaggatctgtggcagaagaggcagaaacaagttaaggataacgagaatgtggttaacgagtattcctccgagctggaaaagcaccagttgtacattgatgaaacagtgaacagcaatatcccaacaaacttgcgggtgctccgatctatcctggagaacctaaggtctaaaatccagaaactggaaagcgacgtgtcagctcagatggagtactgccgtaccccgtgtacagtctcctgtaatataccagtagtgagcggcaaggaatgtgaagaaatcatcaggaaggggggagaaacctcagaaatgtatctgatccagccagacagctcagtgaagccatatcgggtttattgcgatatgaacactgagaacggcggctggaccgtgatccagaatcgccaggatgggtctgtagattttggtcggaaatgggacccgtataaacagggattcggaaacgtggccaccaacaccgatgggaaaaactattgtgggttacctggggagtattggctcggcaacgacaagatctcccagctgacccggatgggtcccacagaacttctgatcgaaatggaagattggaagggcgataaggtgaaggcccattacggaggcttcaccgtgcagaacgaggctaacaagtaccaaatttctgtcaataaataccggggaactgctgggaacgccttgatggacggagcctcccagttaatgggagaaaatagaacaatgacaatacataatggcatgttttttagcacatacgacagagacaatgacgggtggcttacctccgatcccaggaaacagtgcagtaaggaagatggaggcggctggtggtacaaccggtgccatgctgctaaccctaacgggcgttattattgggggggccagtacacttgggatatggcgaagcacgggaccgatgacggcgtggtctggatgaactggaagggatcttggtacagcatgcggaagatgagtatgaaaattcgtcctttctttccacaacaa

SEQ ID NO: 153230 - DNA, 1473 bp, Artificial Sequence
  derived and/or modified sequence
atgaaacgaatggtctcttggagcttccataagcttaagacaatgaaacacttgctgcttctgttactgtgcgtgttcttggtgaagagtcaaggggtgaatgataacgaggagggattttttagcgcgcggggccaccgcccgttggataagaagcgcgaagaggctccatcgctgcgcccggccccaccaccgatcagcggcggaggttatcgtgcgcgtccggctaaggccgcagccacccaaaagaaggttgagaggaaggcgcccgacgcgggcggatgcctgcacgcagatccagacctcggggtattgtgtcctacaggctgtcagctgcaggaagccctgctgcagcaggaacgtccgattcggaactctgtggatgaacttaacaataacgtggaggccgtgtctcagacgtccagcagcagcttccagtatatgtatctcctgaaggatctttggcagaaacggcagaagcaagtgaaagataatgagaacgtggtaaatgaatactccagtgaattagagaaacaccagctctatattgatgaaaccgtgaattcgaacatacctacgaacctacgtgtgctacgcagcatactagagaatctgcgaagcaagatacagaagttggagtcggacgtgtctgcccagatggaatattgccgtaccccatgcaccgtgtcctgcaatatccccgtggtcagcggaaaggagtgcgaggagataatccgaaaaggcggagagacctccgagatgtatctgattcagccagattcgagcgtgaagccttaccgcgtgtattgtgatatgaataccgagaatggaggctggaccgtgatacagaatcgtcaagatggatcagtcgatttcggtcgcaagtgggatccctacaagcaaggcttcggtaatgtggccacgaacacagacggcaagaactattgcggtctacccggagaatactggctcggaaacgataagatctcgcagctgacccgaatgggcccaacagagctgctgattgagatggaagactggaaaggtgacaaggtgaaagcccactatggaggttttactgtgcagaatgaggcgaacaagtaccagatatctgttaacaagtaccgcggaacagccggcaatgcacttatggatggagcgtcccagttgatgggcgagaaccgcaccatgaccatccacaacggtatgtttttctcgacctacgaccgagacaatgacggatggctgacaagcgatccgcgcaaacaatgctccaaggaggacggtggcggctggtggtataaccgatgtcatgctgccaatcccaacggacggtactactggggtgggcaatacacctgggacatggccaaacatggcaccgatgacggcgtcgtatggatgaactggaagggttcttggtactcgatgagaaagatgagcatgaagattcggcccttttttccccagcaa

SEQ ID NO: 153231 - DNA, 1473 bp, Artificial Sequence
  derived and/or modified sequence
atgaaacgtatggtctcttggtcttttcataagctcaagacaatgaaacacctcctgcttctcctgttgtgcgtctttctggttaaaagccagggagtgaacgacaacgaggagggatttttctcagcccgggggcatcgcccactggacaagaaacgagaggaggccccctctctgaggcccgcccctcctccaatctcgggtggtggctatagggcccgtcccgcaaaggccgctgctacccagaagaaagtggagcggaaggcacctgacgcaggcggatgtcttcacgccgatccagatctgggggttctctgccccacagggtgccaactccaagaggcattgctccagcaagaacggccaattcggaacagcgtcgatgagctgaacaacaatgtcgaagcagtgagtcagactagctcttcttccttccagtacatgtatctgcttaaagatttgtggcaaaaaaggcagaagcaggtaaaggataacgagaacgtggtgaatgaatattcaagcgaattggaaaagcaccagctctatattgacgaaacagtgaactcaaacatacccaccaatcttcgcgtcctgcggtccattctggagaatcttcggtctaagattcagaagcttgaatccgacgtgtctgcacagatggagtactgccgcacaccgtgcactgtgtcgtgtaatattccagtcgtctcgggtaaggagtgcgaggaaatcattagaaaaggaggtgagacaagcgagatgtacctcattcagcctgattccagcgtcaaaccttacagagtgtattgtgatatgaataccgaaaacggaggttggaccgttatccagaatcgccaggacggttctgtcgacttcggtaggaagtgggatccttacaagcagggctttgggaatgtggctaccaatacagacggtaagaactattgcggccttcccggagagtactggctcgggaatgacaagatctcccagctgacccggatgggcccaacagagctgcttatcgaaatggaggactggaagggggataaagtcaaagcgcattacggggggttcactgtccaaaacgaagctaacaagtaccagatttccgtcaacaagtaccggggcactgcaggaaatgcactgatggatggcgctagtcaactgatgggggagaacaggacaatgaccatacacaacggaatgtttttctccacatacgaccgcgacaacgacggttggctaacaagcgatccgcggaagcagtgtagcaaggaagacgggggaggatggtggtataatcggtgccatgccgctaaccctaatggccgttactactggggggggcaatacacctgggatatggcgaagcacggcactgatgatggggttgtgtggatgaattggaaaggcagctggtattctatgcggaaaatgtccatgaagatccgcccattttttccacagcag

SEQ ID NO: 153232 - DNA, 1473 bp, Artificial Sequence
  derived and/or modified sequence
atgaagcgaatggtctcctggagttttcataagcttaagaccatgaagcatcttttgttactgctgttatgcgtgtttctggttaagagccagggcgtgaacgacaacgaagagggctttttctccgcccgaggacatcgccctttagataagaagcgggaagaggcaccttccctgcggcctgcacccccccctatctcggggggggggtaccgcgcccgccccgctaaggctgctgccacccagaagaaggttgagagaaaggcgccggatgccggcgggtgcctccatgccgatccagatcttggggttctgtgtcctacaggatgtcagctgcaggaagctcttctgcaacaagaacgtcctattagaaactcagtggacgaactgaacaataatgtcgaggccgtttcccagacatcctcttcgagtttccagtacatgtatcttctcaaggatctgtggcagaaaagacagaagcaggtgaaggataacgaaaacgtggttaacgaatattcaagcgaattagagaagcaccagctgtacatagacgaaacggtgaattccaatatcccaaccaatctacgggtacttaggagtatcttggagaatctgcgcagcaagatccagaaactcgaatccgacgtttcggcccagatggagtactgtcggacaccatgtactgtttcttgtaacatcccagtcgtttctggaaaagagtgcgaggaaatcatcaggaagggcggtgaaacctcagagatgtatctgattcagcccgattcctctgtgaagccttacagggtgtactgtgatatgaatactgagaacggcggatggactgtaatccagaacaggcaggatggctctgtcgacttcggacgcaagtgggacccttataagcagggattcggtaacgtggcgaccaacaccgatgggaagaattactgtggcctccccggcgagtactggttaggtaacgacaagatatcacagttgacaagaatggggccaaccgagctattgatagaaatggaggattggaagggggacaaggtgaaggcccattacggcggtttcacagtccagaatgaggcaaataagtatcagatttcggtgaacaagtacaggggcacagctggaaacgcactaatggacggtgcttctcagctgatgggcgagaacagaaccatgacgatccacaatggtatgtttttttcgacgtacgacagggataacgatgggtggctcacttccgacccaaggaaacagtgttccaaagaagatggcggcggatggtggtataatcgctgccacgcggcaaaccccaacgggcggtactactggggcgggcaatatacctgggatatggccaagcacgggaccgatgacggcgtggtttggatgaactggaaaggttcttggtacagcatgaggaagatgagtatgaagatccgcccgttcttcccccagcag

SEQ ID NO: 153233 - DNA, 1473 bp, Artificial Sequence
  derived and/or modified sequence
atgaaacggatggtgtcttggtcctttcataaattgaagaccatgaagcatctgcttctcctgttgctctgcgttttcctggtgaaatcccagggtgttaacgataacgaggagggtttcttctctgcccgcggccatcgcccactagataagaaacgcgaagaagcgccgtcgctgagacctgcacctccacctatctcaggaggtggttacagggcacgtcctgcgaaggctgcagcgacccagaaaaaagttgaacggaaggctccggacgccggtggctgtctgcatgccgatccagatcttggagttctgtgtcctactgggtgtcaactgcaagaggcgctgctgcaacaggagcgccctatccgaaatagtgtcgacgagctgaataacaatgtggaggcggtgagccagaccagctcctccagcttccaatatatgtaccttctgaaagacctgtggcagaaaagacaaaagcaggttaaggacaacgaaaatgttgtgaacgagtattcgagcgaactggagaaacatcagctgtacatcgacgagacggtgaacagcaacatcccgacaaacctccgcgttctgcgtagcatactcgaaaacctgcgcagcaaaatccaaaagctggagtcagacgtgtccgcccagatggaatattgccgcactccttgtacggtgagctgtaacattcctgtcgtcagcggcaaggagtgtgaggagataattagaaaaggtggcgaaactagcgagatgtacttaatccagccagacagcagcgttaaaccgtaccgcgtgtattgcgacatgaataccgagaacggtggctggacagtgattcaaaaccggcaggatggcagcgttgactttggtcgcaaatgggacccttacaagcaaggctttggcaatgtcgccaccaacactgatggtaaaaattattgtgggctgccgggtgagtattggcttggtaatgataagatcagccagctcacccgcatgggccctacggagctgctgatcgaaatggaagactggaaaggcgacaaggtcaaagctcactatggtggttttaccgtgcaaaatgaggcgaacaaataccagatttcagtgaacaagtatcgcggcactgctggtaacgccctgatggacggcgcgtcccaactcatgggtgagaaccgcactatgaccatccataatggaatgttcttcagcacctacgaccgcgacaatgatggttggctgactagcgaccctcgcaagcagtgcagcaaggaggatggtggcggttggtggtataaccgctgtcacgctgcgaacccaaacggccgctactactgggggggtcaatacacatgggacatggcgaaacatggcacggacgatggcgttgtttggatgaattggaaaggttcttggtacagcatgcgcaagatgagcatgaagattcgcccgttcttcccacagcag

SEQ ID NO: 153234 - DNA, 1473 bp, Artificial Sequence
  derived and/or modified sequence
atgaaacgaatggttagttggtccttccataagcttaaaactatgaaacatctgctgttactcctcttgtgcgtgtttctggtgaagtctcaaggcgtcaacgacaatgaggaaggcttcttctccgcccgaggccatagaccgctagacaaaaaaagagaagaggccccctcacttcgacctgctccaccacccatctcaggcgggggatatcgagcgcgacctgccaaggccgctgccacacaaaagaaagttgaacgaaaggcgcccgatgctgggggctgcctgcatgctgacccagacctcggagtactctgccccaccggatgtcaactgcaagaagccttactgcaacaggaacggcccataagaaacagcgtggatgaactgaataataacgtggaggctgtgagtcaaacctcctctagctcgttccagtacatgtaccttttaaaggatttgtggcagaagcgtcagaagcaagtgaaggacaacgaaaacgtggttaacgagtattctagcgaactcgagaagcaccagctgtacatcgacgaaaccgttaacagcaacatacccaccaatcttcgagttctccgatccattctggagaacttgagaagtaaaatccaaaagctcgaatctgacgtgagcgcacaaatggaatattgcagaacgccgtgcacagtgtcctgcaatatcccagtggtctccggaaaagagtgcgaggaaatcattaggaaaggaggggaaacgtcagaaatgtacctgattcagccagactcgagcgtcaaaccttaccgagtgtactgtgacatgaacactgaaaatggagggtggacagtaattcaaaaccgacaggatgggtcagtcgatttcgggaggaaatgggacccttacaaacaggggtttgggaatgtcgcgaccaatacagacggaaaaaattactgtggtctgcctggcgaatactggttgggcaacgataaaatatcacagcttacccgtatggggcctaccgaactactgatcgaaatggaggattggaagggggacaaagtgaaagcacattacggtgggttcaccgtgcagaacgaggcgaataagtatcaaatctcagtaaacaagtacaggggcactgccggcaatgccctgatggatggagccagtcaattgatgggggaaaaccgaacaatgacaatccacaacggtatgttcttttctacctatgatcgcgacaatgatggatggctcacatcagacccacgaaaacagtgctctaaggaggacggcggagggtggtggtataatcgatgccacgcagcaaaccctaacgggcgctactactgggggggccagtatacttgggatatggccaagcatggcacggacgacggcgtggtttggatgaactggaaaggtagttggtattctatgcgaaaaatgagcatgaagattcgaccttttttccctcagcaa

SEQ ID NO: 153235 - DNA, 1473 bp, Artificial Sequence
  derived and/or modified sequence
atgaagcggatggtgtcttggagttttcataagcttaagacaatgaaacatctactgcttctgctgttgtgtgtgtttcttgtgaagtctcaaggtgtgaatgacaatgaggaagggttcttctctgcacgcggccaccggccactcgataagaaaagggaggaagctccgtctctgaggccagcccccccccctatcagcggtgggggctatcgcgcgcgtcccgcaaaagctgcagcgacgcagaaaaaggtcgagaggaaggcacctgacgcaggaggctgcctacatgctgacccagatttgggcgtgctctgtccaacgggttgccagctccaggaggccctcttgcagcaagagcgcccaatcagaaactcagtagacgagctgaacaataacgttgaagccgtgagtcagacctcttcttccagctttcagtacatgtacctgctaaaggacttgtggcagaagcggcagaaacaggtgaaagacaacgaaaatgtggttaacgagtattcttccgagctagagaaacaccaactctacattgacgaaaccgtgaatagtaacattccaactaacctgcgcgtgctgaggagcatcctggagaatttgagaagcaagattcagaagctagagagcgacgttagcgcccagatggagtactgcagaacaccttgcaccgttagctgcaatattccggttgtttctgggaaagagtgtgaggaaattattcgcaagggcggggaaaccagcgagatgtacctgattcagccagactcttccgtcaagccctaccgggtgtattgtgatatgaacaccgagaacggcgggtggaccgtgatacagaacagacaagacggaagcgtagattttggtcgcaaatgggacccctataagcagggctttgggaatgtggccactaataccgatggaaaaaattattgtgggttaccgggggagtactggctgggtaatgataaaatttctcagctgacccgcatgggaccaactgagctgctgattgagatggaagactggaagggtgataaggtgaaagcacattatggggggtttactgttcaaaacgaggccaacaaataccaaataagcgtgaacaaatacagggggacagcgggaaacgcgctgatggatggggcctcacaacttatgggagagaatcggacaatgaccatccacaacggtatgttttttagcacttatgatcgagataatgacgggtggctgacaagcgacccacgtaaacagtgttccaaagaggatggaggcggatggtggtacaataggtgtcatgccgcaaatccaaatggaagatattattggggcgggcagtacacctgggacatggcaaaacacggcacggacgacggcgtggtctggatgaactggaagggctcctggtattctatgcgaaagatgtccatgaaaatcaggccctttttcccgcagcaa

SEQ ID NO: 153236 - DNA, 1473 bp, Artificial Sequence
  derived and/or modified sequence
atgaagagaatggttagttggagcttccataagctcaagacaatgaaacatctcctgttactgctcctgtgtgttttcctggtgaaatctcagggcgtgaacgacaacgaagaggggttctttagcgcccgggggcaccgacccctcgataagaaaagggaggaagctcctagcctgaggcccgcccccccacccattagcggcggcggatacagagctcggcccgccaaagccgccgcgacacagaagaaggtagaacggaaagccccagatgccggaggttgtctacatgctgacccagaccttggagtgctatgtcctactggctgccagctccaggaagctctcctccagcaggagcgtcccattcgaaactcagtggatgagctgaataataacgtcgaggcggtgagccagacctcaagctcctcattccagtacatgtacctgctgaaggacctatggcagaaacgtcagaaacaagtcaaggataacgagaacgtcgtaaatgagtactcgtctgagttagagaagcaccagctgtatattgacgagaccgtgaattccaacataccaactaatttgcgagtgttgcgctcaattctggagaatctgcgctctaagatccagaagcttgagtctgatgtctctgcccagatggaatactgccgaactccttgcaccgtctcgtgcaacatcccggttgtgtccgggaaagagtgtgaagagattatcaggaaaggtggagaaaccagcgaaatgtacctgatacaaccggattccagcgtcaaaccctatagggtgtactgcgacatgaacacagagaacggagggtggaccgttattcagaatagacaggatggctccgtcgattttggcagaaaatgggacccctacaagcaaggttttggcaacgtggctaccaatacagacggcaaaaactactgcgggctgcctggcgagtattggttggggaatgataagatctcccaacttacaagaatgggcccaactgagcttcttatcgagatggaggactggaaaggtgataaagtgaaggcccattacggtggattcactgttcaaaacgaggctaacaaataccagattagcgtcaacaagtatcgcggtacggccggaaacgctctgatggacggcgcaagtcaacttatgggagaaaaccggacgatgaccattcataacggaatgttcttcagtacctacgatcgtgacaacgacggttggctgacgagcgacccacggaaacaatgttcaaaagaggacggcggcggctggtggtataatcggtgccacgccgccaatcccaacggccggtattactggggaggacagtatacctgggacatggctaagcacggcaccgacgacggggttgtctggatgaattggaagggctcttggtactcaatgcgcaaaatgagcatgaagatccgtccatttttcccccagcag

SEQ ID NO: 153237 - DNA, 1473 bp, Artificial Sequence
  derived and/or modified sequence
atgaagcgtatggtcagctggtcttttcacaagttaaagacgatgaagcatctgttgttactcctactttgcgtgttccttgtgaaaagccagggtgttaatgataatgaagaaggtttcttctccgcccgcggtcaccggccgctggataaaaaaagagaagaagctccatctctaaggcccgcaccccctcccatctctggaggtggctatagagcccggccggcaaaggctgccgcgactcagaagaaggtggagagaaaagcccctgacgcaggtggctgcctgcacgctgacccagacttaggcgtcctctgtccaacaggatgccagctgcaggaggccctcctgcaacaggaacggcccattagaaattctgttgatgaactgaacaacaacgtggaagccgtgtctcagacttcgagctcctctttccaatacatgtacttattaaaagacctgtggcaaaaacgccagaagcaggtgaaggacaacgaaaacgtggtcaatgagtattcgtctgagctggagaaacaccagctgtacatcgatgagactgtcaacagcaacataccaacaaacttgcgggtattgcgaagtatcctggaaaacctgagatcaaagatacaaaaactggagtcggacgtaagcgcacagatggagtactgtaggacaccctgtactgtgagttgcaatatcccagtggtgtcaggtaaggagtgtgaggagattatccgaaaaggtggtgagacatcagagatgtacctcatacagccagatagttcagtgaaaccttatagggtatactgcgatatgaacactgaaaatgggggctggacagtcatccagaatcggcaagacgggagcgtcgatttcggcaggaagtgggacccatataaacagggttttggtaacgtcgccaccaatactgacggaaagaattattgcggtctgcccggcgagtattggttgggaaacgacaagatcagtcagctgacaagaatggggccgactgagctgttgattgaaatggaagactggaagggagacaaagtaaaggcccattacggaggctttaccgtccaaaatgaggctaacaaatatcagatcagcgttaataagtatcgaggcacggcggggaatgcgctgatggatggcgccagccagttgatgggcgagaaccggacaatgacgatacacaacggcatgttttttagtacatacgaccgcgacaacgatggatggctgacgtcagaccccagaaaacagtgtagtaaagaggacggaggggggtggtggtataacagatgccacgccgcaaacccgaatgggcgatattactggggtggacaatatacctgggacatggccaaacacgggacagatgatggtgtcgtgtggatgaactggaaagggtcatggtactctatgaggaagatgtctatgaagatcagaccatttttcccccaacag

SEQ ID NO: 153238 - DNA, 1473 bp, Artificial Sequence
  derived and/or modified sequence
atgaaacggatggtaagttggagcttccataaactgaagactatgaagcatctgctgttgctgttactgtgcgttttcctcgtaaagtcccagggggtgaacgataacgaagagggtttttttagtgcaaggggtcatcggcctctggacaaaaaacgggaagaagctccctctttacgtcctgcacctccacccataagcgggggaggttaccgggcgaggcccgccaaagcggccgcaactcagaagaaagtcgaaagaaaggcgcctgacgccggcggctgtttacatgcggaccccgatctaggtgtactgtgtcccacaggatgccagctgcaggaagctctcttgcagcaggagaggccaatacgaaactccgtggacgagttgaataacaatgtggaggctgtgtcacagacttcaagttccagctttcagtacatgtatctgctgaaagacctctggcagaagcgccagaaacaggtaaaggacaacgagaacgtggtgaatgagtacagcagcgaactggaaaagcaccagctgtatatcgacgagaccgtgaattccaacatccctacaaatctgcgggttctgcgctctatccttgagaatctcaggagcaagatccagaaactggagagtgacgtatcagcgcaaatggaatactgcagaacgccctgtactgtcagctgtaatattcccgtagttagcggcaaagagtgcgaggaaatcatcaggaaggggggcgagacatcggagatgtacctcattcaaccggattcaagcgtgaagccctaccgcgtatattgcgacatgaacactgaaaatggaggatggacagtgatccagaacagacaggacggcagtgtagacttcggacgcaagtgggatccatataaacagggattcgggaatgtggccaccaataccgacggcaagaattattgcggcctccccggtgaatactggctgggaaacgataagatctctcagctgacccgcatgggacccaccgaattgctgattgagatggaggattggaaaggggataaagttaaagcacattacggaggcttcacagtccagaatgaagcaaataaataccaaatctccgtgaataaatatcgcggaaccgccggcaatgcgcttatggatggcgcgtcccagctgatgggcgagaatcgtaccatgacaatccataacggcatgtttttttcaacatacgaccgggacaacgatggctggcttacctcagacccccgcaagcagtgctccaaggaggacggcggcggctggtggtacaaccgatgtcatgccgccaaccccaacgggcgctattactggggcggacagtatacttgggacatggccaaacatggcacagacgatggcgtggtgtggatgaactggaagggctcttggtactctatgcgcaagatgtcgatgaagattcgcccgttttttccccagcag

SEQ ID NO: 153239 - DNA, 1473 bp, Artificial Sequence
  derived and/or modified sequence
atgaaaagaatggtgagctggtcatttcacaaactgaagacaatgaagcacctcctgcttcttttgctttgcgtcttcctggtaaagagccagggagtgaacgacaacgaagagggcttcttcagtgccaggggacatcgccctctagataaaaagcgtgaggaggcaccttccttgcggccagcccccccgcccattagtggaggcggttacagggcgcggcccgctaaggccgccgccacacaaaagaaggtcgagcgcaaagcccctgatgccgggggttgtctacatgccgaccccgatctgggcgttttgtgtcccaccggatgtcagctacaggaggctcttctgcagcaagagcgccccatccgaaactccgtggacgaactgaataacaatgtggaggccgtgagccagacttcgtcctcatccttccagtatatgtacctgttgaaagatttatggcaaaagcgacagaaacaggtaaaagacaatgagaacgttgtgaatgaatacagcagtgaactcgagaaacatcaattgtacattgacgaaacagtgaatagcaatatcccaactaacctgcgcgtactgcggtctatcctggaaaacttgcgaagtaagatacagaagcttgagagcgacgttagcgcgcagatggaatactgcaggactccgtgtactgtgagctgtaacattccagtcgtttccggaaaagagtgcgaagagattatccgcaaagggggcgaaacttcggaaatgtacctcatccagccggattcttcggtgaagccttacagggtctactgtgatatgaacactgaaaacggagggtggactgtcatccaaaatcggcaggatggaagtgtggatttcggccgcaagtgggacccatacaagcaaggctttggcaatgtcgctacaaacactgacggcaaaaactattgcggtctcccaggcgagtactggctcggaaatgacaaaatctcccaattgacacggatgggtcctaccgagctgctcatcgagatggaggattggaaaggcgacaaggttaaagctcactatgggggatttacagtgcagaatgaggctaataaataccagatttctgtcaacaaatacaggggaaccgcaggcaatgccctcatggatggtgcttcccagcttatgggtgaaaacaggactatgactattcataacgggatgttctttagcacctatgaccgggacaatgatggctggctgacttccgacccgaggaagcagtgctccaaagaagatggcggaggctggtggtataatcgatgtcacgccgctaaccctaacggccggtactactggggtggtcagtacacctgggatatggctaagcatggcaccgatgatggagttgtgtggatgaattggaagggcagctggtattccatgaggaaaatgtcgatgaagatcagaccttttttcccccagcag

SEQ ID NO: 153240 - DNA, 1473 bp, Artificial Sequence
  derived and/or modified sequence
atgaaacgcatggtttcttggtccttccataagttgaaaacaatgaagcacctgttgcttctcctcctgtgtgtctttctagtgaagagtcagggcgtgaatgacaacgaagagggctttttctctgccagaggtcatcgaccccttgataagaaaagggaagaggcacccagcctgcgccctgctcctccaccgatatccggtgggggctatcgcgcaaggcctgctaaggccgccgctacgcaaaaaaaggtggagaggaaggccccagatgcagggggatgtctgcatgccgatccagatctgggagtcctgtgtccgactggatgccagcttcaagaagctctgttacaacaagaacggccaatcaggaattccgttgatgagttgaataacaacgtcgaagccgtctcccagacttccagctcgtcgttccagtacatgtatttgctcaaggacctatggcagaaacggcagaagcaggtgaaagataatgaaaacgtcgttaatgaatactcgagcgaattggaaaaacaccaactttacatcgatgaaacagtgaactccaatatccccacaaacctgcgtgtgcttagaagcattttggagaatctcaggagtaagatccagaagctagagtctgacgtatctgctcagatggagtattgtaggactccttgcacggtgtcctgcaacattcccgtcgtgtccgggaaagagtgcgaagagatcatccggaagggcggggagactagcgagatgtacctgatccaaccagatagctccgtgaagccatatagagtgtactgtgacatgaataccgagaacggaggctggacggtgattcaaaacaggcaggacggatcagtggattttgggagaaagtgggacccttacaagcagggttttggaaatgtcgccacgaacacagatgggaagaactactgtggcctgcctggtgagtattggctgggaaacgataagatctcccagctgacccggatgggtccaaccgaactcctgattgagatggaagactggaagggggacaaagtgaaagcccactacggaggcttcactgtgcagaacgaggcgaacaagtaccagatttctgtaaacaagtatcgaggaacggccggcaatgctctcatggatggggcgtcccagctcatgggtgagaacagaaccatgactattcataacgggatgttcttcagtacctatgatagggacaacgatggctggcttaccagcgacccccgcaaacagtgttctaaggaggatgggggcggctggtggtataatcggtgtcatgcagcaaacccgaacgggaggtactattggggcggacagtacacatgggatatggcgaaacacgggaccgatgatggggtagtgtggatgaattggaagggcagttggtacagtatgaggaaaatgtccatgaaaatacgccccttctttcctcagcag

SEQ ID NO: 153241 - DNA, 1473 bp, Artificial Sequence
  derived and/or modified sequence
atgaagagaatggtgagctggtcttttcacaaattgaagacaatgaagcacctgcttctgcttcttctgtgcgtctttctggtcaaatcacaaggagtgaatgataatgaggaagggttcttcagcgcaagaggccatagaccgttggataaaaaaagagaggaagcacccagcctgcggcctgctccgccccctatctctggcgggggctacagagcccggcccgcgaaggcagcggccacccagaagaaagtcgagagaaaagcccctgatgcggggggatgcctccatgccgatcccgatttgggtgtgctgtgtcccactggttgccagctgcaggaagcgttgctccaacaggagaggccaatcagaaactctgttgatgagttgaacaacaacgtcgaggccgtgagccagaccagttcaagttccttccagtatatgtaccttctgaaggatctttggcaaaagcggcagaaacaggtgaaggacaacgagaacgtggtaaacgagtactcctcagagctcgagaaacatcagctttatatcgatgagaccgtgaattctaacattcccaccaatctgcgagtgctgcggagcatactcgaaaatctcaggagtaaaatacagaaactcgagagcgatgtgtccgcccaaatggagtactgtcgcaccccgtgcactgtcagctgcaacatccctgtggtcagcgggaaagaatgtgaggaaatcatcaggaaaggaggagagacctccgagatgtaccttatccaaccagacagcagtgttaagccctatagggtatattgcgacatgaatacagagaatggtgggtggaccgtgattcagaacagacaggacggcagtgtggattttggaaggaaatgggacccgtacaagcaggggttcggtaatgttgccactaataccgacggaaaaaattactgtggcctgcctggtgagtattggctcgggaacgacaagattagtcaactcactcggatgggacccaccgagctgcttatagagatggaggactggaagggggacaaggtgaaagcgcattatggggggttcaccgtgcagaacgaagccaacaagtatcaaatctccgtaaataagtaccgcggtaccgccggtaatgcccttatggatggtgcgagtcagctgatgggagaaaatcggactatgaccattcacaatgggatgtttttctccacctatgacagggacaacgacggttggctcacctccgatccccgcaagcagtgctccaaagaggatggcggcggctggtggtacaaccggtgtcacgccgcaaaccccaacggccggtactactggggtggacagtatacatgggacatggctaaacatggaaccgacgatggcgtggtgtggatgaactggaaaggctcctggtattctatgcggaaaatgagcatgaagatccggccattctttccccaacag

SEQ ID NO: 153242 - DNA, 1473 bp, Artificial Sequence
  derived and/or modified sequence
atgaaacgaatggtgtcttggagttttcacaaactaaagacaatgaagcatttgctgcttctgctcctctgcgtctttttggtcaaaagccagggagtcaacgataatgaagaagggtttttctccgcccgcggccacaggccactagataagaagcgcgaagaagctccgagtcttcgccctgctccgccgcccatcagtggaggcggttatagagcgagacccgctaaggccgctgcaacccagaaaaaggtcgaacgcaaggcacccgacgctggcggttgtctgcatgccgatcctgacctgggagttttatgccccacaggatgtcagctgcaggaggcactgctgcagcaggaacgtccaattcgaaactccgtggatgaattgaataataacgtcgaggcggtcagtcagacctctagctcatcctttcagtacatgtacttgcttaaggacctctggcagaagagacagaaacaggtgaaggataacgaaaacgtcgtgaatgagtactcatccgagctagagaagcatcagctatacatagacgagactgtgaactctaatatccctaccaatttgagagtgttgaggtcaattctcgagaacctgaggagtaagattcaaaagctcgaatctgacgtcagcgcgcagatggagtactgccgtacaccgtgcactgtgtcatgtaatataccagtggtgtctgggaaggagtgcgaggaaattatccgcaaaggcggggagacaagtgaaatgtaccttatccagcctgactcctcggtgaagccttacagagtatattgcgacatgaacaccgagaacggaggatggactgtgatccagaacagacaagatggcagtgttgattttggccgcaaatgggacccatataaacagggattcggcaacgtggcaactaacaccgacggtaagaactattgtggactccctggagagtattggctcggcaacgataagattagccaactcaccagaatgggccctaccgagctgcttattgagatggaggattggaaaggcgacaaagtcaaggcccattacgggggtttcactgtgcaaaacgaggccaataaatatcagatttctgttaataaataccgagggacggcgggcaatgctctaatggatggggcaagtcagctgatgggtgaaaacagaaccatgactatccacaacggaatgtttttctccacctatgatcgagataacgatggctggctgacttccgacccccgcaagcagtgctcaaaagaagacgggggcggatggtggtataatagatgccacgccgcaaaccccaatggccgctactactggggcggtcaatacacctgggacatggccaagcacggtaccgacgatggggtcgtgtggatgaactggaaagggagctggtacagcatgagaaaaatgagcatgaagattaggccatttttcccacagcaa

SEQ ID NO: 153243 - DNA, 1473 bp, Artificial Sequence
  derived and/or modified sequence
atgaagcgcatggtgtcttggtccttccataagttgaaaacgatgaagcacttgctcctgctccttctctgtgtgtttctcgtcaagtcgcagggcgtcaacgataatgaggagggctttttcagcgctcgggggcaccgacctctggataagaaaagagaagaggccccatcactcagaccagccccgccacctatcagtggcggcggctatcgggcacgacctgcaaaggctgccgctacccaaaagaaagttgagcggaaggctcccgacgccgggggatgtctccatgctgatccagatctaggtgtgttatgtcccacagggtgccaactgcaagaggccctgctccagcaggaaagacccatccgaaattcagtggatgagctgaataacaacgtagaagcggtgtctcagacctcatccagttcctttcagtacatgtatctgctgaaagatctgtggcagaagcgacaaaagcaggttaaggacaacgagaatgtggtgaatgagtacagcagcgaacttgagaaacaccagctctacattgatgagaccgtgaattctaacatccctacaaatctgagggtcctccgatctattttagagaacctgcggtccaaaatccagaaactggaatctgatgtgagtgcccagatggaatactgcagaaccccttgcaccgtgagctgtaacatccccgtggtaagtgggaaagaatgcgaagagatcatccggaagggaggcgagacctcggagatgtatctgattcagccagacagttcagtgaagccgtaccgggtgtattgcgacatgaacactgagaacggtgggtggacagtgatacaaaacaggcaagacggctccgtcgactttgggaggaaatgggacccttataagcagggcttcggcaacgtcgccacaaatacagatggcaagaattactgcgggctcccgggagaatattggctcggcaatgataaaatttctcaattgactcgcatggggcctaccgaactgctgatagagatggaggactggaaaggggataaggtcaaagctcattacggagggtttactgtgcagaacgaggcgaataagtatcagattagtgtgaacaagtatcgggggaccgccgggaatgcgctgatggacggggcctctcagcttatgggtgaaaacaggacaatgaccatacacaacggaatgtttttcagcacctatgatagggacaatgacggctggctaacatctgatccccggaaacagtgtagcaaagaagacggggggggctggtggtataaccggtgccatgccgcaaacccaaacggacggtattattggggtggccaatatacctgggacatggcaaagcacgggacggatgacggagtggtttggatgaattggaagggatcttggtattcaatgcgcaagatgagcatgaagattaggccattcttcccgcaacag

SEQ ID NO: 153244 - DNA, 1473 bp, Artificial Sequence
  derived and/or modified sequence
atgaagcgaatggtctcgtggtcattccacaaactgaaaacaatgaagcatcttctgcttcttctcttgtgtgtctttctggtcaaaagtcagggtgtgaatgacaatgaggagggcttcttttccgctaggggacatcgccccctcgataaaaagcgcgaagaagccccaagccttagaccagcgcctccacccatatccggaggcgggtaccgagcacggcctgccaaggccgccgcaacacaaaagaaggtggagaggaaagcccctgatgcaggaggatgcctgcacgccgatcccgacctgggagtactgtgccctaccgggtgccaactgcaagaagccctgctccaacaggaacggcccatcaggaacagcgtcgacgagttgaataataacgtggaggccgtgtctcaaacatcatcctcgtccttccagtacatgtacttgctgaaggacctttggcaaaaacgccaaaaacaagtcaaagataacgagaatgtcgtgaatgagtattcttcagagctggagaaacatcagttgtatattgacgaaactgtgaactcaaatattcccactaacttaagagtgctgaggtctatcctggaaaacttgcggtctaagatccagaagctggagtcagacgtatctgcccaaatggaatattgtaggacgccatgcaccgtgtcatgtaacatccctgtcgtaagcgggaaggaatgtgaagaaataatccggaaggggggcgaaaccagtgaaatgtatcttattcagccagatagttcggtgaagccctatagagtgtactgcgacatgaatactgaaaacgggggttggacagtaatacaaaaccggcaggacggtagtgtggactttgggcgcaaatgggacccctataaacaggggtttgggaacgtggcgaccaataccgatggaaagaattactgcgggttgcctggggagtattggctgggtaacgacaagatttctcagttgacccgcatgggccctacagaattactgattgagatggaggactggaagggcgacaaagtcaaggcgcactatggggggtttacggtccagaacgaagcaaataaatatcagataagtgtcaataagtaccggggaacagccggtaacgcccttatggacggagcatcacagctgatgggcgaaaatcgcaccatgaccatccacaacggcatgttcttttccacatacgatcgagacaacgacggatggctgacgagcgaccctaggaaacagtgcagtaaggaggatgggggaggctggtggtataatcgctgccatgccgccaatcctaatggccggtactactggggcggacagtacacttgggacatggcaaaacacggcacagacgacggagtcgtttggatgaattggaagggcagctggtactcgatgcggaagatgagtatgaagatcagaccctttttccctcaacag

SEQ ID NO: 153245 - DNA, 1473 bp, Artificial Sequence
  derived and/or modified sequence
atgaagcgcatggtctcatggtctttccataagctaaaaacaatgaagcatcttcttctgctgctgttatgtgtattcttagtcaagagccagggcgtgaatgacaatgaagaaggtttcttcagcgcaagaggtcaccgacccctggacaaaaagagagaggaggcaccgtcactgaggcctgcccctcccccaatatctggaggaggctacagagcccgccctgcaaaggctgctgccactcagaagaaggtggaacgcaaggcgcccgacgctggagggtgcttgcatgctgaccctgatctgggcgtgctgtgccctacaggatgccagctgcaggaagcgttactgcaacaggagcggcccatccggaactccgtggatgaattgaacaacaacgtcgaggccgtctctcaaacatctagtagctcctttcagtatatgtacttgctgaaagacctgtggcagaaaagacaaaagcaggtgaaagacaacgaaaacgtggtgaacgagtattccagtgagctggaaaagcaccagctgtatatagacgaaaccgtgaactcaaacatcccaacgaatttgcgggtgctccggtctatacttgaaaatctgcgatcgaagattcagaagctggagagcgacgtctccgcgcagatggagtattgtaggacaccatgcactgtctcttgtaatattcctgtcgtgagcgggaaggagtgcgaggagatcattcgaaagggcggggaaacctcagagatgtatctgattcagcctgactcctccgtaaaaccctacagagtttattgcgacatgaacaccgaaaatggcgggtggaccgtgattcaaaaccgtcaagacggctccgtggacttcggacgcaagtgggacccctacaaacagggctttggaaatgttgctaccaatactgacggaaagaattattgcggcctccccggcgagtactggctaggtaatgacaagatttcacagctgacccggatgggtcctacagagcttctaatcgaaatggaagattggaaaggtgacaaggtcaaggcgcactacggcggattcaccgtgcagaacgaggccaacaagtatcagatcagtgtcaataagtaccgcgggactgcgggaaatgcactgatggatggagcctctcagctaatgggcgaaaatagaaccatgaccattcacaatggcatgtttttctccacttacgacagagacaacgacgggtggctgacttctgatccaaggaaacagtgtagtaaagaggatggcgggggatggtggtataatcgctgccatgctgctaacccaaacggaaggtactactggggaggtcagtatacttgggacatggcaaaacacgggaccgacgacggcgtggtgtggatgaattggaagggcagctggtactcaatgaggaagatgagcatgaaaatccgcccgttttttccacagcag

SEQ ID NO: 153246 - DNA, 1473 bp, Artificial Sequence
  derived and/or modified sequence
atgaaacgaatggtgtcttggtcctttcacaagttgaagaccatgaagcaccttctcctgctgctgctgtgtgtgttcctcgtaaaaagccagggagtgaacgacaatgaagaaggtttcttttcagccaggggccaccgccctctggataagaaacgggaagaagcgccatctctgcgtcctgctcctcctccgatcagcggaggtggatacagggctcgccctgctaaagctgctgctacccagaaaaaagtggaaagaaaggctccagacgctggcggatgcctgcatgctgatccagaccttggcgtgctgtgccctacaggttgtcagctgcaagaagctctcctgcagcaggaacggccaatcaggaattcagtggatgaactgaacaacaatgtggaagctgtgagtcaaacctccagcagcagcttccagtatatgtatcttctgaaggacctgtggcagaaaaggcaaaagcaggtcaaggataatgaaaacgtcgtgaacgagtatagctccgagctggaaaaacaccaactgtacatagacgagactgtaaacagcaacattccaactaacctgagggtccttcgcagcatcctggaaaacttgaggagcaaaattcagaaattggagtcagatgtctcagcgcaaatggagtactgtcggaccccatgcaccgtcagctgcaacatccctgtggtgagcggaaaggaatgcgaagaaatcatacggaagggcggggagaccagcgagatgtaccttattcagcccgatagttctgttaagccgtacagagtgtactgtgacatgaacactgagaacggaggctggactgtgatccaaaacaggcaagacggcagcgtggatttcgggagaaaatgggacccatacaagcagggctttggaaatgtggctaccaacacggatggaaagaattattgtggactccccggtgaatattggcttggaaacgacaaaatcagtcagctcacccgcatgggccctacagaactgctgatagagatggaggattggaaaggcgataaagtgaaggctcattatggagggttcaccgtccagaatgaggcaaacaagtaccagataagcgtgaataaatatagagggaccgctggcaacgcactgatggatggcgcctcccaactgatgggcgaaaaccggaccatgacaatccataacggcatgtttttcagcacatatgatagggataacgatggatggctgacatcagacccgaggaaacaatgttcaaaggaggacggaggaggatggtggtacaataggtgtcacgctgcaaacccaaatggacgctactactggggagggcagtatacctgggacatggcaaagcatggcacagacgatggagttgtctggatgaactggaaaggaagctggtactccatgcggaagatgagcatgaaaatcagaccattctttccgcagcag

SEQ ID NO: 153247 - DNA, 1473 bp, Artificial Sequence
  derived and/or modified sequence
atgaaaaggatggtgagttggtcctttcacaagttaaagacaatgaagcacctattactgctgctgttgtgcgtcttcctggtgaagagtcagggtgtgaatgacaatgaagaaggctttttcagcgcccgcgggcaccgcccacttgacaagaagagagaggaggcccctagcctgcgaccagctcctcctcctatcagtggagggggatacagagcccggcccgctaaggccgcagctacacagaagaaagtggagcggaaggcccccgacgcagggggatgcctgcacgccgatccagatctgggggtactctgtccaaccggctgtcaactgcaagaggccctgctgcagcaggagcgacccattcgtaactccgtggatgaactaaataataatgtcgaagccgtttcacagacatcttccagctcctttcagtatatgtatctgctgaaggatctatggcaaaagaggcaaaagcaggttaaggacaatgaaaacgtcgtaaatgaatactcttccgagcttgagaaacaccagttatatatcgacgagacagtgaactctaacattcccaccaacctgcgtgtgctccgatcaatactggagaatctccggtctaagattcaaaagctggagtctgatgtgtccgcacaaatggagtactgtcgaacaccttgcaccgtgtcttgtaacatccccgtggtttccggtaaggagtgtgaggagattatccggaagggaggggagacctccgaaatgtaccttatccagcctgacagtagcgttaaaccatatcgagtatactgcgacatgaacaccgaaaatggcgggtggactgtgatccaaaacagacaggacggcagcgtggacttcgggcggaagtgggacccatacaagcaaggctttggcaacgtggctactaataccgatggtaaaaactactgcggactgcccggcgaatactggcttgggaatgacaagatctctcagctgacccgcatgggcccaactgagctgctcattgagatggaggactggaagggcgataaagtgaaggcccactacggtgggttcacagtgcagaatgaggccaacaaataccagataagcgttaacaaataccggggaaccgcagggaatgcactcatggatggcgccagtcagctgatgggggaaaacaggactatgacaatacataatggcatgtttttttctacctatgacagggacaacgacggatggcttacatccgatccaagaaaacaatgttctaaggaagacggggggggatggtggtacaatagatgccacgctgccaaccccaacgggcgctattactggggcggtcagtacacttgggatatggccaaacacggcacagacgatggggtggtctggatgaactggaaaggctcttggtatagtatgcggaagatgagcatgaagatacggccttttttcccccagcag

SEQ ID NO: 153248 - DNA, 1473 bp, Artificial Sequence
  derived and/or modified sequence
atgaaacgcatggtgagctggagcttccataagttgaaaaccatgaagcacctcctcctcctgttgctgtgcgttttcctggtcaagtcccagggggtcaatgacaatgaggaggggtttttttccgctagaggtcatcgaccccttgataagaagcgagaagaagcccctagcctgaggcctgccccgcctcctatcagcggaggcggctacagagctcggccggccaaagcagctgcaacacagaagaaagttgagcgcaaggctcccgacgccggaggatgcctccatgccgatcccgatttaggagttctgtgcccaaccgggtgtcagctgcaggaagctctgctacagcaagaacgaccaatcagaaatagtgtggacgagctaaataataatgtggaggccgtatctcagacaagctcgtcctcattccagtacatgtatctgttgaaagatctgtggcagaagaggcagaaacaagtcaaagataatgagaatgtggtgaatgaatacagcagcgagttggagaagcatcagctgtacattgacgagactgtgaattcgaatatccccacaaacttacgggttctccggtccattctggagaacctaaggtccaagatacagaagctggagagcgatgtgtctgcacaaatggagtattgcaggacaccctgtactgtctcttgtaatatcccggttgtcagcggaaaggagtgcgaggagattattcggaaaggaggcgagaccagcgagatgtacctcattcaacctgactcttccgttaaaccttacagagtgtactgtgacatgaacactgagaatggtggatggacagttatccaaaaccgccaagatgggtctgttgattttgggcggaaatgggacccatacaaacaggggtttggtaatgtggcaaccaatacggacgggaagaactactgcggcctgcccggagaatactggctggggaacgacaagatcagccaactgacaaggatgggacccaccgagcttttgatcgagatggaggattggaagggggataaagtcaaggcacactatggggggtttacagttcagaatgaggccaataaataccagattagcgtgaataaataccgcgggaccgcaggaaacgctctgatggatggagcctcacagcttatgggagaaaataggacaatgacaattcacaacggcatgtttttttccacctacgatagggacaatgatgggtggctaaccagcgacccaaggaagcaatgctctaaagaggatgggggggggtggtggtataaccggtgccatgctgctaaccccaacggcaggtactactggggtggccagtacacatgggacatggcaaaacatgggaccgacgacggggttgtgtggatgaactggaaaggatcatggtattcaatgagaaagatgtccatgaagattagaccattttttccacagcag

SEQ ID NO: 153249 - DNA, 1473 bp, Artificial Sequence
  derived and/or modified sequence
atgaagcggatggttagctggtcatttcacaaacttaaaacgatgaaacatttgttactgcttttgttgtgtgtatttttggtgaagtcacaaggtgtcaatgacaacgaagagggattcttctcagcgagaggacatagaccgctcgataaaaagcgggaggaagcgccttcgctgcgtccggcgccaccgccgatctcaggaggtggttatcgcgcccgaccggcgaaagccgccgcaacccagaagaaagttgagcgtaaggcgccggatgcaggaggatgccttcatgccgatccggacctgggcgtgttatgcccaacaggctgtcagttacaagaagccctgttgcaacaggaaagaccgattcgcaatagcgtagatgaactgaataacaatgtggaagctgtgtcgcagacctcttcctcgagtttccaatatatgtatcttttgaaagatctttggcagaagcgccaaaaacaggtgaaggacaatgagaatgtggtcaatgaatatagcagtgaattggagaaacaccagctgtatattgacgaaaccgtgaacagtaacatccctaccaaccttcgagtactgcggtcaattttagagaatctgcggtcaaagatccagaaacttgaaagcgatgtgtcagcccaaatggaatattgtagaacgccatgcacggttagttgcaatattccagtggttagcggtaaggaatgtgaagaaatcatcagaaaggggggggaaactagcgagatgtatctaattcagcctgattcatcagtaaaaccgtatcgtgtctactgcgacatgaatactgaaaatggaggatggacagtcattcaaaatcgccaagatggttccgtcgatttcgggagaaagtgggatccgtataagcaaggctttggtaacgtcgctacgaatacggacggtaagaattattgcgggcttcctggcgaatactggcttggcaatgataaaatctcgcaactgactaggatggggcctacggaactgcttatcgaaatggaagattggaaaggcgataaagtgaaagcacactatggcgggtttacagtgcaaaacgaagccaataaataccagatttcagttaataaatatagaggtacagcgggaaatgcacttatggatggggctagccagttaatgggggaaaatcggactatgacgattcacaatgggatgttcttctctacatacgaccgtgacaatgatggatggttgacgtctgatccgcgcaaacaatgtagtaaagaagatggcggcggatggtggtacaatcgttgtcacgcagccaatccaaatggtagatactattggggtggacaatatacatgggacatggcgaagcatggtacagatgatggtgtagtatggatgaactggaaaggctcctggtattcaatgcggaagatgtctatgaaaatccgtccatttttccctcaacaa

SEQ ID NO: 153250 - DNA, 1473 bp, Artificial Sequence
  derived and/or modified sequence
atgaagcgcatggtgtcttggagtttccacaagctcaagaccatgaagcacctgttgctgttgttgctttgtgtgtttctcgtgaagtcacagggtgttaacgataatgaggagggatttttctctgccagaggtcacaggcctctcgataagaaaagagaggaggccccaagcctgcgccctgccccacctcccatatcaggaggaggatacagggcccgccctgctaaagccgctgctacgcagaagaaggtagagagaaaggcgccagatgcaggaggctgcctgcacgctgaccctgacctcggtgttctgtgtccgaccggatgccagctgcaggaagcactgctgcagcaggaaagaccaattaggaacagtgttgacgaactcaataataacgtcgaagcagttagccagacatcctcttccagtttccaatatatgtacctgttgaaggatctgtggcaaaaaagacagaagcaggtaaaggacaacgaaaatgtagtgaatgagtattctagtgagcttgagaagcatcagctgtacatagacgagacagttaatagtaacatccccactaacctcagggtgctgagatcaatcttggaaaatctccgcagcaagatccaaaaattggaatctgatgtatctgctcaaatggagtactgccgcaccccgtgtacagtttcttgtaatattccggtggtttccggcaaggagtgcgaggagatcattaggaaaggaggagagacttccgaaatgtatctgatccaaccagactccagtgtgaagccttaccgcgtgtactgtgacatgaacaccgagaacggtggttggactgtgattcagaataggcaagacggttccgtagactttggtagaaagtgggacccttacaagcagggattcggtaacgtggctacgaatacagacggtaagaactattgtggtctgcctggagagtattggttgggaaatgacaaaatttcccagcttaccagaatgggtcccactgagctgctcatcgagatggaagattggaaaggagacaaagtgaaagctcattatggcggttttactgttcagaacgaggcgaacaaataccaaattagcgttaacaagtataggggtacagctggaaatgccctcatggatggcgcctcccaattgatgggagagaacagaaccatgaccatccacaatggtatgttcttcagcacttacgacagagataatgacggttggctgacctctgaccctaggaaacagtgcagcaaggaagacggcggaggctggtggtacaacaggtgtcacgctgccaacccaaacggtaggtactactggggaggtcagtacacatgggatatggcgaagcacggaaccgacgacggagtcgtttggatgaattggaagggctcatggtactccatgcgcaaaatgtctatgaagatacgcccattcttccctcagcag

SEQ ID NO: 153251 - DNA, 1473 bp, Artificial Sequence
  derived and/or modified sequence
atgaagcgcatggtgtcctggtctttccacaaactaaagaccatgaagcacttgcttctcctgctgttgtgtgtttttctggtgaaatcccagggggtcaacgacaacgaagaggggtttttttctgcacgtggccacagaccactagacaagaagagggaagaggcacccagcctgcggcctgcacccccccctatttcgggaggagggtacagagctcggcccgccaaagctgccgctactcagaagaaggttgagcgcaaggcaccggatgccggaggctgtttacatgccgatcctgacttaggggtactctgcccgacgggttgccaacttcaggaagcacttcttcagcaggaacgcccaatcaggaactccgtcgacgaacttaataacaacgttgaagcggtcagccagacctcaagctcgtccttccaatatatgtacctgcttaaagacttatggcaaaagagacagaagcaggtgaaggataacgagaacgtagtgaatgaatactcatcagagctagagaagcaccagctttacatagatgaaacagtcaacagtaatattcctactaacctccgagtcttacgaagcattttagagaatttgaggtcaaaaatccagaagttggagtctgatgtatcagctcagatggagtactgccgcaccccatgcactgtatcctgcaacattccagtggtgtctgggaaggaatgtgaggagatcatccgtaaaggcggtgagacttcagaaatgtatcttatccagcccgacagctctgtcaagccttacagggtatactgtgatatgaacaccgaaaatggaggctggaccgtgattcagaatcggcaggacggatctgtggattttggtaggaagtgggacccttacaagcagggtttcggtaacgttgctaccaataccgatggaaagaattactgcggcctgccaggcgagtactggttaggcaacgacaaaatttctcaactcacacggatggggcccacagaactgcttattgaaatggaagactggaagggcgacaaagtgaaggctcattatggggggttcaccgttcaaaatgaggcgaacaaatatcaaattagcgtgaataagtaccgcggaaccgccgggaatgccctgatggacggagcgagtcagttaatgggggagaacaggacaatgacaattcacaatggaatgttctttagtacctatgatagagacaatgatggctggctgacaagcgatccgcgaaagcagtgctcaaaggaggatggtggcggttggtggtacaaccggtgccacgctgcgaatcccaatggtcgatattattggggaggccagtatacatgggatatggcgaagcacggcacagacgacggagtcgtgtggatgaattggaaaggatcatggtactccatgcgtaaaatgtctatgaaaatcagacctttcttccctcagcag

SEQ ID NO: 153252 - DNA, 1473 bp, Artificial Sequence
  derived and/or modified sequence
atgaaaagaatggttagttggtcattccataagcttaaaacgatgaaacacctgctgttactgctgttatgcgtcttcttggtgaaaagccagggtgtcaacgacaacgaagaggggttttttagcgctaggggtcataggcctttggataaaaagagagaagaagccccaagccttagaccagctccgccgcctatctcggggggtgggtatagagctaggccagccaaggcggccgccacccagaaaaaagtcgagcgtaaggctcctgacgcgggcggctgtctccacgccgacccggatcttggggtcttgtgccctactggctgccagctgcaggaagcccttctgcagcaggagagacctattcgcaatagcgtcgacgagctcaataacaatgttgaggccgtgtcacagactagtagttcatctttccagtacatgtacctgctgaaagacttgtggcaaaagaggcagaagcaggtcaaagataatgagaatgtggtaaacgagtattccagcgaactcgagaaacaccagctgtacatcgacgaaacagtgaactctaatattcctaccaacttgagggtgctccgatccatcctggagaacctgcgcagtaagatccaaaagctcgagagcgatgtgtccgcccagatggaatactgccgaaccccgtgtacagtgtcctgcaatatacctgtggtatcaggtaaggaatgtgaagagattattcgaaagggtggagagacatccgagatgtatctcatccagccagactcctctgttaagccctatcgagtgtactgcgacatgaacaccgaaaatggggggtggactgtgatccagaatagacaggacgggtccgtcgatttcggcaggaaatgggatccctacaaacagggtttcggcaatgtcgccactaacactgacggtaagaactactgtggacttcccggtgagtattggctggggaacgataaaatttcgcagctgactaggatgggacccaccgagttgcttattgaaatggaggactggaagggggataaagtaaaggcgcactatggaggctttacagtccagaatgaagccaataagtatcagatatcagtgaacaaatatcggggaacggctggcaatgctctgatggatggtgctagccagcttatgggagagaaccggactatgacaattcacaacgggatgttcttctccacttatgaccgggataacgacgggtggcttacctcagacccgcggaaacagtgcagcaaggaggatggaggcggttggtggtacaatcgatgtcatgccgcgaatcccaacggacggtactattggggcggtcagtacacctgggatatggcaaaacatggaacggacgatggagtggtctggatgaattggaaagggtcctggtactctatgagaaaaatgtcaatgaaaattcggccgttctttccacaacag

SEQ ID NO: 153253 - DNA, 1473 bp, Artificial Sequence
  derived and/or modified sequence
atgaagcggatggtgtcatggtcgttccataaactgaaaaccatgaagcatctgctcctcctgttgctttgcgtctttctggttaaatcccaaggcgtcaacgacaacgaggagggattcttttctgcgcgcggccatcgcccgctcgacaagaaacgggaggaagccccttcgcttcggccagctccgccgcctatctcaggcgggggataccgcgcacggccggctaaagcggcagcgactcagaagaaggtggaaagaaaggcgcccgacgccggaggatgcctgcatgccgatccagacctcggcgttctctgccctactggatgccagctgcaagaggcgctgctccagcaagaacgcccaatccgcaactcggtcgacgaactcaacaacaacgtggaggccgtgtcccagacttcatcgagttcgttccagtacatgtatctgctcaaggacctgtggcagaagagacaaaaacaggtgaaagacaatgagaacgtcgtgaacgaatactcgagcgagctggaaaagcaccagctctacattgacgaaaccgtgaactccaacatcccaactaacctgagagtccttcgatcgattcttgagaatctgaggagcaagatccagaagctggaatcggacgtgtccgcccaaatggagtattgcagaacgccctgcaccgtcagctgcaatatcccagtggtgtcgggtaaggagtgtgaagaaatcatcaggaagggcggagaaacctccgaaatgtatctgatccaaccggattcctcagtgaagccataccgcgtatactgcgacatgaataccgagaatggagggtggactgtcatccaaaaccgccaggacggaagcgtggatttcggaaggaagtgggacccgtacaagcagggtttcgggaacgtggccaccaatacggatggcaagaactactgtggattgccgggtgagtactggctgggaaacgacaagatcagccaattgacgagaatgggccccaccgaactgctgatagagatggaagattggaaaggggacaaggtcaaggctcactacggaggattcactgtgcagaatgaagctaacaagtaccagatctccgtgaataagtaccggggaaccgccggaaacgccctcatggatggtgcatcacaactgatgggggagaatcgcactatgaccattcacaatggaatgttcttcagcacctacgatcgcgataacgacggctggttgacttccgacccgcggaaacagtgttccaaggaagatgggggcgggtggtggtacaataggtgccacgccgcaaatcctaacggacggtactactggggaggccaatacacttgggacatggcaaaacacggtaccgatgatggagtggtgtggatgaactggaagggaagctggtactcaatgcggaaaatgtctatgaagatcagaccgttctttccgcagcag

SEQ ID NO: 153254 - DNA, 1473 bp, Artificial Sequence
  derived and/or modified sequence
atgaagaggatggtctcctggtccttccacaaactcaagaccatgaaacaccttctgctcttgctgctctgcgtcttcttggtcaaatctcagggggtcaatgataacgaggagggcttcttctccgctagggggcatcgccccctggataaaaaacgggaggaagctcctagcctgcggccagcccctcccccgatctcaggaggggggtatagagcacgacccgctaaggctgccgctacacagaagaaagtagagcggaaggcacctgatgcaggcggttgcctgcacgctgatccagacttaggagtgctgtgccccaccggctgtcagctgcaagaggctctcctgcaacaggaaaggccgatcagaaattccgtggacgaactgaacaataacgtggaagcggtctcgcagaccagctcttcgtcctttcaatatatgtacttacttaaagatctgtggcaaaagcgccaaaagcaggtaaaggacaatgaaaatgtggtcaatgaatattcctccgagctagagaagcaccagctttatatcgatgagacagttaattccaacatcccaacaaatctccgcgtgcttcggagtatactcgaaaatctgaggtccaaaattcagaagctcgaatccgatgtctcagcacagatggaatactgccgaaccccttgcactgtgtcctgtaacatcccagtcgtgtccggcaaggagtgtgaagagattattcgaaaaggcggagaaacttccgaaatgtatctgatacagcctgattcaagtgtcaaaccttatagagtttattgtgatatgaatacagaaaatggaggttggacggtcatacaaaataggcaggatgggtctgttgacttcggaagaaaatgggacccgtataagcaggggttcgggaatgtcgccacaaacacagatggaaagaactattgcggccttccaggagagtactggcttggtaacgataagatttcacagttaaccagaatgggacctaccgaactgctcatcgagatggaagactggaagggagacaaggtgaaggcacattacggcggattcaccgtgcagaacgaggccaataagtaccagatatcagttaacaaatacagggggacagctgggaacgcactgatggacggtgcctcccagctcatgggggaaaacaggactatgacaatacacaatggcatgttctttagcacctacgatagggataatgacgggtggttgacgtctgaccctcgaaagcagtgctccaaagaggacggtgggggctggtggtacaaccgatgccacgctgcgaacccaaatggtcggtactactggggcggccagtacacatgggacatggctaagcacggcactgacgacggtgtggtttggatgaattggaaaggctcctggtacagcatgaggaagatgtctatgaaaattaggcccttcttcccccagcag

SEQ ID NO: 153255 - DNA, 1473 bp, Artificial Sequence
  derived and/or modified sequence
atgaagaggatggtgagctggagctttcacaaactcaaaaccatgaagcacctgctcctcctgctgctctgcgttttcctcgtcaaaagtcagggtgtgaatgacaacgaggaaggattcttctccgcccgtggccataggcccttagataaaaagcgagaggaagctccaagcctgcgccctgcaccccccccaatcagcggcggcggatatcgcgctcgaccggccaaggcggcagctacacagaaaaaagtggagagaaaagctccagatgctggaggatgcctacacgctgatccagaccttggtgtgttgtgtccgaccggctgtcaattgcaggaggccttgctccaacaggagagacctatcagaaatagcgtcgacgaattgaacaataacgtggaagctgtatcacagacctccagctcaagcttccaatatatgtaccttttgaaggacctttggcaaaagagacaaaaacaggtaaaagataatgagaacgtggtgaacgagtatagcagcgaactggaaaagcaccaactgtacatcgacgagacagttaacagcaacattcccaccaacttgcgtgtcctccgcagtatacttgaaaaccttcgcagtaagatccaaaaactcgagtcggatgtctctgctcaaatggagtactgtagaactccgtgcactgtaagctgtaatattcccgttgtatccggaaaagaatgcgaggagatcatcaggaaaggtggagagacctctgagatgtacttaattcagcctgattcatcagtcaaaccttatcgagtgtactgtgatatgaacactgagaatggtggatggactgtcattcagaaccggcaagacggctctgtcgacttcggacgcaagtgggatccgtacaaacaaggctttggcaatgtggccacgaacaccgacggtaagaactactgtggcttaccaggagagtattggcttggaaatgataaaatatctcaactaacacgtatgggcccaaccgaactgctcattgagatggaagattggaaaggtgataaggttaaagcacactacggcgggttcaccgtccaaaatgaggctaacaaataccaaatctcagtcaacaaatataggggcactgccggaaacgcactgatggatggtgcctcacaactcatgggggagaacagaacgatgacgattcataacggcatgttctttagtacttatgaccgggacaacgacggatggctgactagcgacccccgaaagcagtgttccaaggaggatggcggaggttggtggtacaaccgatgccacgccgctaaccctaacggaaggtactattggggcggtcagtacacttgggacatggctaaacatgggactgatgacggcgtcgtgtggatgaactggaagggcagttggtactcaatgaggaagatgtcgatgaaaatccggccattctttccacagcag

SEQ ID NO: 153256 - DNA, 1473 bp, Artificial Sequence
  derived and/or modified sequence
atgaagcggatggtgtcctggtcctttcacaagctcaaaaccatgaagcatctcctgctcctccttctctgtgtatttctggtgaaatcccaaggagtcaatgacaatgaagagggcttctttagtgccagggggcaccggccactggacaaaaaaagagaagaagcaccgagcctgcgccctgctccacccccgataagtggtgggggttatcgggcgagacccgccaaggctgcagctacccagaagaaggtggaacgcaaggccccagacgcgggcgggtgcttgcacgccgaccctgacctcggagtcctgtgtcccactgggtgccagcttcaggaggctttgctgcagcaagaacgccccatccgaaattcagtagacgaactgaataataacgtggaggctgtgtcccagacatcctcatcctcttttcagtacatgtatctgctcaaagacctctggcaaaagcgccagaagcaggttaaggataacgagaatgtcgtgaacgagtattccagcgagctggaaaagcatcagttgtacatcgatgagacagtcaattccaatatccccacaaatctgagggttctgaggtcaatccttgaaaatttgcggagcaaaatccagaagttggagtctgacgtgagcgctcagatggagtactgcaggaccccttgtaccgtgtcttgcaacataccagttgtgtccggaaaggagtgtgaggaaatcattcgcaagggcggagagacaagtgagatgtacctgattcaacccgattcttctgttaagccatatagggtctactgtgacatgaataccgaaaacgggggttggacagttattcagaaccggcaggacggatctgtggactttggccggaaatgggacccttacaagcagggattcggtaacgtggccacgaataccgacggcaagaactactgcgggctgccaggtgaatattggttgggtaacgacaagattagtcagctgacacggatgggaccaaccgagttgctcattgagatggaggactggaagggagacaaggtgaaggcacattatggcgggtttacagtgcaaaacgaagcaaacaagtatcagatttctgtgaataagtataggggcacggcaggcaatgcactgatggacggggcatctcagctgatgggggaaaaccggacaatgaccatacacaatggaatgttcttctctacatatgatcgggacaacgacggctggcttacaagtgacccaaggaaacagtgcagtaaagaagatggcgggggctggtggtataataggtgtcacgccgcgaaccccaacggccggtattactggggcggacaatacacatgggatatggcaaaacacggcacagatgacggagtggtatggatgaactggaagggatcttggtacagtatgaggaagatgagtatgaaaatcaggccattctttcctcagcag

SEQ ID NO: 153257 - DNA, 1473 bp, Artificial Sequence
  derived and/or modified sequence
atgaaacggatggtgtcctggtcattccataaactcaagaccatgaagcatctgctcctattgctgctgtgtgtatttttggtgaagtcacagggcgtcaatgacaacgaggagggatttttctccgctagaggtcaccggcctctggataagaaacgcgaagaagcaccctctctgaggccggctccgccacccatcagcggtgggggttatcgggctcgccccgccaaagccgccgctacacaaaagaaagttgagagaaaagctccagatgctggcggctgtctgcacgctgatcctgatctgggtgtgctgtgtccaacgggctgtcaactgcaggaagcactcctccagcaagaaaggcctataagaaactccgtcgacgagttgaacaacaacgtagaagccgttagccagacctcttcctccagtttccaatatatgtatcttttaaaggacctttggcaaaaacgccagaagcaggttaaggataatgaaaatgtcgtcaatgaatatagctcagagctggaaaagcatcagctgtacatagacgagacggtcaacagcaacatacccacaaacttgagggtgctgagatcgatcctcgagaatctgcggagcaaaatccagaaactggagtccgatgtgtctgcccagatggagtactgccgtacaccgtgcaccgtctcatgcaacattccagtcgtcagtgggaaagagtgtgaggaaataatcagaaaagggggggagacgtccgaaatgtatctgattcagccagactcttcagtgaagccctacagagtgtactgtgatatgaatactgagaacggcggttggaccgtcatacagaatcgtcaagacggaagtgtcgattttggtaggaagtgggacccttacaagcagggattcgggaatgtggctaccaacaccgacggcaaaaactactgcggcctccctggagaatactggctggggaatgacaagatcagtcagctgacacgaatgggacctaccgagctccttatagaaatggaggattggaagggggacaaggtgaaggctcactatgggggattcaccgtccagaacgaggctaacaaataccagatctcagttaacaagtaccggggcaccgctggaaatgcacttatggacggagcgagccagttaatgggagaaaatcgcacaatgacgatccacaatgggatgttcttctcgacgtacgatcgtgataatgatggttggttaacctctgatccccgtaagcaatgtagtaaggaggatggcggcggatggtggtataaccggtgccacgccgctaatcccaacggcaggtactactggggaggtcaatatacctgggacatggctaaacatggcacagatgacggggtggtatggatgaactggaagggaagctggtattctatgaggaaaatgagtatgaagatcagacctttctttcctcagcag

SEQ ID NO: 153258 - DNA, 1473 bp, Artificial Sequence
  derived and/or modified sequence
atgaaacggatggtgtcttggagcttccataagctgaaaactatgaagcatttattactcttgctgctttgcgtgttcctggttaagagtcaaggcgtaaacgataatgaagaggggttcttctcggctagaggccatcgcccgctcgacaagaaaagagaagaggctccatcgttaagaccggccccacctcctatatccggtggaggatacagagcaagacctgccaaggccgccgcgacacagaagaaggtggagcgcaaagctcccgacgccgggggctgtctgcacgccgatcctgatctcggggtactctgtcctaccgggtgccaacttcaggaagctttgttgcaacaggagcgcccaattcggaactccgtggacgagctcaataataacgtggaggcggtgtctcagacgtccagttcgtcctttcagtatatgtatctattgaaagacctgtggcagaaaaggcaaaagcaggtaaaggataacgaaaatgtggttaacgagtattcctccgaactggaaaagcaccagttgtacatcgatgaaacggtgaatagcaacatccccacaaacctgcgtgtgctgaggagcatcctcgagaatctgaggtcaaagatacagaaattggagtctgacgttagcgcacagatggagtactgtagaaccccttgtactgtgtcttgtaacattccagtggtgtctggaaaggagtgcgaagagattatccgtaagggtggagaaactagcgagatgtacctgatccagccggactccagtgtgaaaccatatagggtgtactgcgatatgaatacggagaatggcggttggaccgtgattcagaatcgacaggacggctccgtggacttcggacgcaagtgggatccttacaaacagggatttggcaatgtggctacaaacactgacgggaagaattactgcggtctaccaggagagtattggctgggaaatgataagatctcccagctgacccgaatgggccctaccgagctgctgattgagatggaagactggaagggagataaagtcaaggcccattacggcgggtttacagttcagaatgaggctaataagtaccaaatttcggtgaataagtacagaggaaccgctggaaatgctctcatggacggtgcctctcagcttatgggcgaaaacagaacgatgactattcataacggaatgtttttctctacttacgatcgcgacaacgacggctggctgacctccgacccaaggaaacagtgctccaaagaggatggggggggctggtggtacaaccgatgccacgccgctaacccgaatggtcggtactactggggcggccagtacacatgggacatggccaagcacggcacagatgacggcgtggtgtggatgaattggaaggggtcctggtatagtatgaggaagatgtccatgaaaataaggcctttcttcccacagcag

SEQ ID NO: 153259 - DNA, 1473 bp, Artificial Sequence
  derived and/or modified sequence
atgaaacgaatggtgtcatggagtttccacaaacttaagacaatgaagcacttgttgctattgttgctctgcgtgttcttggtcaagagccaaggtgtaaacgataatgaggaagggtttttttctgctagaggtcatcgacctttggataagaagcgagaagaggcacctagcctaagacccgcgcctccgccaatatctgggggtggatacagagctagaccagctaaagccgcagctacacagaagaaggtggaacgtaaagcgccagatgctggaggatgcctgcatgctgacccagatttgggcgtattgtgtccaactggatgtcaacttcaagaggctttgctgcaacaggagaggcctattcgtaactccgttgacgaattaaataataacgtcgaggcagtgtcccaaacatcgagctcatcttttcaatacatgtacctactgaaggacctctggcaaaagcgtcaaaagcaagttaaggataatgaaaatgttgttaacgagtactcttctgaattggagaagcatcaattatatattgatgagactgttaattctaacataccaacaaatttgagggttcttcgttctattctagaaaatttacgaagcaagatccaaaaattagaatcggacgtctctgcacagatggagtattgccgtacaccttgtaccgtaagttgcaacatccccgtcgttagtggcaaagaatgtgaggaaattatcagaaagggcggcgaaacttccgaaatgtatttgattcagccagattcttctgttaagccatacagggtgtactgcgatatgaatacagagaacggagggtggaccgtcatacagaaccggcaggatggatcagtcgattttggccgcaagtgggatccgtacaagcaaggttttggaaatgtagctacaaacacggatggtaagaattattgcggtctccctggggaatactggcttggaaatgataaaattagtcagctcacacgcatggggccaaccgagctgttgatagaaatggaggattggaaaggtgacaaagtgaaggcacactacggggggtttactgtgcaaaatgaggctaataaatatcagatctcagtcaacaaatacaggggcactgctggtaatgcgctcatggatggtgcaagtcaacttatgggagagaatagaacaatgactatccataatggtatgtttttctcaacatatgaccgtgataatgatggctggctgacttctgatccacgaaaacagtgttctaaggaagatgggggcggatggtggtacaacagatgccatgctgcgaacccaaatggtagatactattgggggggccagtacacgtgggacatggctaaacatggaacagacgacggagtagtttggatgaattggaaggggtcatggtactccatgagaaaaatgtcaatgaaaataagacccttcttccctcaacag

SEQ ID NO: 153260 - DNA, 1473 bp, Artificial Sequence
  derived and/or modified sequence
atgaaaaggatggtcagctggagctttcataagcttaagacaatgaagcatctcctcctgcttctgttgtgtgtgttccttgtgaagagccagggagttaacgataacgaagaaggttttttcagcgccagagggcacagaccactggacaaaaagcgagaagaagctccaagcctgaggccagcccccccgcctattagtggcggcggctaccgggcaagacccgctaaggctgctgcaacccagaaaaaggtcgaacgaaaggcgccagacgccggtggttgcctgcacgccgacccagatctgggcgttctctgccccacagggtgccagttgcaagaagcactactgcaacaggaacgacctatccgcaatagtgtagacgagctgaataacaacgtcgaggctgtgagtcagactagttcctccagttttcagtacatgtatctcttgaaggatctgtggcagaaaagacaaaagcaggtaaaagacaacgaaaatgtcgtaaacgagtactcaagtgagctggagaaacatcagctgtatattgatgagactgtgaactccaatatcccaacaaacttgcgcgtcttgcggagtatcctagaaaatttgagatcgaaaatccagaaactagagtctgacgtgagcgctcaaatggagtattgtcgaacgccctgtaccgtctcatgcaacatacccgtcgtgagtgggaaagaatgtgaagaaataatcaggaaaggaggggagacctctgagatgtacctgatacagcctgacagctctgtaaagccctaccgggtgtattgcgacatgaataccgaaaacgggggctggacagtgattcaaaatagacaggacgggtcagttgactttggcagaaaatgggacccgtataagcaggggttcggtaacgtggcgacaaatacagatgggaagaattattgcgggctgcccggcgaatattggctgggaaatgataaaatcagccagttaacgaggatggggcccacagagttgctgatagaaatggaagattggaagggggataaggttaaagcccattatggcgggttcactgtccagaatgaagctaacaagtaccagatcagcgtgaataaatacaggggcactgcgggcaacgccctgatggatggagcctctcagctcatgggcgaaaatagaaccatgactatccacaacggaatgttcttctccacatacgatcgagataacgacgggtggctgactagtgatcctagaaagcagtgcagcaaagaagacggcggaggctggtggtacaacagatgccatgccgccaaccctaatggaagatactactgggggggacagtatacgtgggacatggcaaaacacggcacagacgatggcgtggtttggatgaactggaaagggtcctggtacagcatgcggaagatgtccatgaagattcgaccattcttcccacaacaa

SEQ ID NO: 153261 - DNA, 1473 bp, Artificial Sequence
  derived and/or modified sequence
atgaagcgcatggtttcctggagtttccataagctcaagacaatgaagcaccttcttcttctactgttgtgcgtgttcctggtgaagtctcaaggagtaaacgacaacgaggaggggttcttctcagccagggggcatcgcccactggacaagaaaagagaggaggccccatccttgagacctgctccccctcctatttcaggcggaggttatcgggcccggccggcgaaggccgccgcaacacaaaaaaaagtggagcgaaaggctccagacgccggtggatgtctccacgctgatcccgatttaggagtgttatgtccaacggggtgccaactgcaagaagctcttctgcagcaggaacgaccaataaggaactccgttgacgagctgaacaacaatgtggaagccgtcagccaaacaagtagctcctcctttcagtacatgtatttgctcaaggacttgtggcagaaaagacagaagcaggtaaaggacaatgagaacgtggtcaatgagtactcctccgagctggagaagcaccaactgtatattgacgaaactgtgaactccaacattcccacaaaccttcgggtattaagatccatacttgagaatctccggagcaagatacaaaagctggaaagcgatgtgtctgcccagatggagtattgccggacaccctgcacggtatcatgtaatattcccgttgtgagcggtaaagaatgtgaggaaattatacgcaaaggcggggagactagtgaaatgtacctgattcagcctgattcgtcagtgaaaccttacagggtgtactgcgacatgaacactgaaaatggcgggtggaccgtcattcagaacaggcaggatgggtctgtggattttggtaggaaatgggatccctataagcaaggcttcgggaatgttgcgactaacacggacggtaagaactattgcggcttgcctggagaatattggctgggaaacgataagatttcacagttgacccgaatggggccgaccgagctgttaatagaaatggaggactggaaaggggataaagttaaagcccactacgggggctttaccgttcagaacgaggcgaataaatatcagatatcagtaaataaatacaggggcaccgccggtaacgccctaatggatggcgctagccagcttatgggcgaaaaccgcactatgacaattcacaacggcatgtttttttccacgtacgacagggacaatgacggatggctcacctctgatcctcggaagcagtgcagcaaggaagatgggggaggctggtggtacaatcgctgccacgcggccaatccaaacgggcggtattattggggcggacagtacacatgggacatggccaagcatggcaccgatgacggggttgtatggatgaactggaagggatcatggtactccatgcgaaagatgagcatgaaaatcaggccattttttcctcagcag

SEQ ID NO: 153262 - DNA, 1473 bp, Artificial Sequence
  derived and/or modified sequence
atgaaaaggatggtgagctggagttttcacaaactcaagacaatgaaacatttgttgcttctactactctgtgtgtttttggtcaagtctcagggtgtgaatgataatgaggagggttttttttcagcaaggggacacaggcctctcgataagaagcgggaagaagcaccatcactcaggccggccccgcctcctatatccggcggtgggtatcgggcaaggccggcgaaggccgcagccactcagaagaaagtcgagaggaaggccccagacgcagggggttgtctgcatgccgaccccgatctaggagtgctctgtcccacaggctgtcagctgcaggaggctctgcttcaacaggagcgcccaatccgcaacagcgtggacgagctgaacaataatgttgaggctgtctctcagacttcttcttcttccttccagtacatgtatctcctcaaagatctttggcagaagaggcaaaaacaggttaaggacaacgagaacgtggtcaacgaatattctagtgaactcgagaagcaccaattgtatatcgacgagacagtcaactcgaacattccaaccaacctcagggtgttacgttcgatactggagaacctgaggtccaagatccagaaactggaatccgatgtgtccgcacagatggagtattgtagaactccatgcaccgtgagttgcaatattcctgtagtgagtggcaaggaatgtgaggagattattcgtaagggaggcgagacgagcgagatgtaccttatccagcctgacagcagcgtcaagccctaccgcgtttattgtgatatgaacactgagaacggggggtggaccgtcatccagaaccgtcaggatggctccgttgatttcggccgaaagtgggacccatacaaacaggggtttggaaatgtggccaccaatacggacggcaagaattactgtggtctgccaggcgaatactggctgggaaatgacaagatcagccaactgacccggatgggccccaccgagttactgatcgaaatggaggattggaagggtgacaaagtgaaagctcattacggggggttcactgtccagaatgaagctaataagtaccaaatctcggtgaacaagtaccgcgggactgcaggaaacgctctgatggacggggcgtctcagcttatgggggagaaccgtacgatgactatacacaacggcatgttcttttcaacatatgatagggacaatgacgggtggctcactagcgacccccgaaaacaatgctctaaggaagacgggggaggttggtggtacaatagatgtcacgcggccaacccaaacggtcgctactactggggggggcagtacacatgggacatggccaagcacgggactgatgatggcgtcgtttggatgaactggaaggggagttggtatagcatgcgtaagatgagcatgaagatcagacctttttttccccagcag

SEQ ID NO: 153263 - DNA, 1473 bp, Artificial Sequence
  derived and/or modified sequence
atgaaacgtatggtttcgtggtcgtttcataaattaaaaacgatgaaacatctattactactattattatgtgtttttttagtaaaatcgcaaggtgttaatgataatgaagaaggttttttttcggcgcgtggtcatcgaccgttagataaaaaacgagaagaagcgccgtcgttacgtccggcgccgccgccgatatcgggtggtggttatcgagcgcgtccggcgaaagcggcggcgacgcaaaaaaaagttgaacgtaaagcgccggatgcgggtggttgtctacatgcggatccggatctaggtgttctatgtccgacgggttgtcaattacaagaagcgttattacaacaagaacgtccgatacgtaattcggtagatgaattaaataataatgtagaagcggtttcgcaaacgtcgtcgtcgtcgtttcaatatatgtatttactaaaagatctatggcaaaaacgacaaaaacaagtaaaagataatgaaaatgttgtaaatgaatattcgtcggaattagaaaaacatcaactatatatagatgaaacggttaattcgaatataccgacgaatctacgtgtactacgatcgatattagaaaatctacgttcgaaaatacaaaaattagaatcggatgtttcggcgcaaatggaatattgtcgaacgccgtgtacggtatcgtgtaatataccggtagtatcgggtaaagaatgtgaagaaataatacgaaaaggtggtgaaacgtcggaaatgtatttaatacaaccggattcgtcggtaaaaccgtatcgagtttattgtgatatgaatacggaaaatggtggttggacggttatacaaaatcgtcaagatggttcggtagattttggtcgtaaatgggatccgtataaacaaggttttggtaatgtagcgacgaatacggatggtaaaaattattgtggtttaccgggtgaatattggttaggtaatgataaaatatcgcaattaacgcgtatgggtccgacggaattattaatagaaatggaagattggaaaggtgataaagttaaagcgcattatggtggttttacggttcaaaatgaagcgaataaatatcaaatatcggttaataaatatcgaggtacggcgggtaatgcgttaatggatggtgcgtcgcaactaatgggtgaaaatcgtacgatgacgatacataatggtatgtttttttcgacgtatgatcgtgataatgatggttggttaacgtcggatccgcgaaaacaatgttcgaaagaagatggtggtggttggtggtataatcgttgtcatgcggcgaatccgaatggtcgttattattggggtggtcaatatacgtgggatatggcgaaacatggtacggatgatggtgtagtttggatgaattggaaaggttcgtggtattcgatgcgaaaaatgtcgatgaaaatacgaccgttttttccgcaacaa

SEQ ID NO: 153264 - DNA, 1473 bp, Artificial Sequence
  derived and/or modified sequence
atgaagaggatggtcagctggtcctttcacaaactgaagaccatgaagcatcttctgctccttctgctgtgtgtgtttttggtgaaatcacagggcgtgaacgataacgaggaaggattcttttccgcacgtggccaccgcccactggataagaagcgcgaggaggccccctccctgcgcccagcccctccccctatctctggaggcggatacagagcacgccctgctaaggctgccgccacacagaaaaaggtggaaaggaaggctccagatgccggcggctgcctgcatgccgaccccgacttgggtgtgctctgccctacaggctgtcaattgcaggaggctctgctccaacaagagcgcccaattaggaacagcgtggacgaactcaacaacaacgtcgaggctgtgagtcagactagttcctcttctttccagtatatgtacctgcttaaggacctgtggcagaagaggcaaaagcaagtgaaggataacgagaacgttgttaatgagtactcctccgagcttgagaaacaccagctctacattgacgagactgttaacagtaatattcctactaacctccgtgttctgcgctcaatcctcgaaaatttgaggagcaaaatacagaaacttgaatctgacgtgtccgcccagatggagtattgccgtaccccctgcaccgtaagttgtaatatccctgtggtcagcggcaaagagtgcgaagagatcatacgtaaaggtggcgagacttcagaaatgtatctcattcagcctgactcatcagtgaagccctatcgcgtatactgcgatatgaacacagaaaacggaggctggaccgttattcaaaaccgtcaggatggttccgtggactttggacgcaagtgggacccttataaacaaggcttcggaaatgtcgctaccaacaccgacggtaagaactattgtggacttcccggcgaatactggctcggcaacgacaagatctcccagctgacccgcatgggacctaccgagctcctgatcgagatggaagattggaagggagacaaagtgaaggcccattatggcggatttactgtgcagaatgaggctaataagtatcagatttcagtgaataagtaccgtggcacagctggtaatgccctgatggacggagcttcacagctgatgggtgagaacagaaccatgacaattcataacggaatgttcttcagtacctatgaccgcgacaacgatggttggttgaccagcgatcctcgcaagcaatgttccaaggaagacggaggtggttggtggtacaacaggtgtcacgcagccaaccctaacggcagatactattggggcggccagtacacatgggacatggcaaaacatggtaccgatgacggagtggtatggatgaactggaagggcagctggtattccatgcgcaagatgtctatgaagatccgtcctttcttccctcagcag

SEQ ID NO: 153265 - DNA, 1473 bp, Artificial Sequence
  derived and/or modified sequence
atgaagcgaatggtcagctggtctttccacaagctgaaaaccatgaagcacctcctgctcttgctcctgtgtgttttcctagtcaagagtcagggagtgaacgataacgaagagggttttttttccgcgcgaggacaccggcctttggacaagaaacgagaggaagccccctcccttcgccctgcaccacctcctatcagtggagggggataccgggcaagacctgccaaggctgccgctacccagaagaaagtggagcgcaaggcccccgatgctgggggctgcctgcatgctgaccctgatcttggggtcctgtgtcctacaggttgtcagctgcaggaagcgctactgcagcaagaaaggcccatccgcaattctgttgatgagttaaataacaacgtcgaagccgtttctcaaacaagctctagttctttccagtacatgtacctgctgaaagatttatggcagaaaaggcagaagcaagtaaaggacaacgagaatgtagtgaacgagtactccagcgagcttgagaaacaccagttgtatattgatgaaacagttaactcgaacatccccactaatctgagagtacttaggtcaatcctggagaacctgaggtccaagattcagaaactggagtccgacgtttccgctcagatggaatattgtagaactccctgtacggtgagctgtaacattcctgtggtgtcagggaaagagtgcgaggagattatccgtaaaggtggagaaacttccgaaatgtatctgatccagccagactcctccgtgaaaccgtatcgtgtttattgcgacatgaacactgaaaatggaggctggaccgtgatacagaacaggcaggatggtagtgtagactttggccggaaatgggacccatataaacagggattcggcaatgtggcaacaaacacagacggtaaaaattactgtgggttacctggagagtattggctcggcaatgataaaatcagtcagttgaccaggatggggccgaccgagctcttaattgaaatggaggactggaagggtgacaaggtgaaagcccactacggcggcttcactgtccagaacgaagcgaataagtaccagatctcagtgaacaagtataggggaacagccggaaatgcactcatggacggggcgagccagcttatgggagagaacagaaccatgaccatacacaacgggatgttcttctccacgtatgatagagataatgatggctggcttaccagtgatccgcgcaagcaatgctcaaaagaagatggggggggatggtggtacaataggtgccacgcagctaaccccaacggtcggtactactgggggggccagtatacctgggacatggcaaagcatggaaccgacgacggagtcgtatggatgaattggaagggctcctggtatagtatgagaaagatgtctatgaagattcggccattttttcctcaacag

SEQ ID NO: 153266 - DNA, 1473 bp, Artificial Sequence
  derived and/or modified sequence
atgaagcgcatggtgagctggagcttccacaagctgaagaccatgaagcacctgctgctgctgctgctgtgcgtgttcctggtgaagagccagggcgtgaacgacaacgaggagggcttcttcagcgcccgcggccaccgccccctggacaagaagcgcgaggaggcccccagcctgcgccccgcccccccccccatcagcggcggcggctaccgcgcccgccccgccaaggccgccgccacccagaagaaggtggagcgcaaggcccccgacgccggcggctgcctgcacgccgaccccgacctgggcgtgctgtgccccaccggctgccagctgcaggaggccctgctgcagcaggagcgccccatccgcaacagcgtggacgagctgaacaacaacgtggaggccgtgagccagaccagcagcagcagcttccagtacatgtacctgctgaaggacctgtggcagaagcgccagaagcaggtgaaggacaacgagaacgtggtgaacgagtacagcagcgagctggagaagcaccagctgtacatcgacgagaccgtgaacagcaacatccccaccaacctgcgcgtgctgcgcagcatcctggagaacctgcgcagcaagatccagaagctggagagcgacgtgagcgcccagatggagtactgccgcaccccctgcaccgtgagctgcaacatccccgtggtgagcggcaaggagtgcgaggagatcatccgcaagggcggcgagaccagcgagatgtacctgatccagcccgacagcagcgtgaagccctaccgcgtgtactgcgacatgaacaccgagaacggcggctggaccgtgatccagaaccgccaggacggcagcgtggacttcggccgcaagtgggacccctacaagcagggcttcggcaacgtggccaccaacaccgacggcaagaactactgcggcctgcccggcgagtactggctgggcaacgacaagatcagccagctgacccgcatgggccccaccgagctgctgatcgagatggaggactggaagggcgacaaggtgaaggcccactacggcggcttcaccgtgcagaacgaggccaacaagtaccagatcagcgtgaacaagtaccgcggcaccgccggcaacgccctgatggacggcgccagccagctgatgggcgagaaccgcaccatgaccatccacaacggcatgttcttcagcacctacgaccgcgacaacgacggctggctgaccagcgacccccgcaagcagtgcagcaaggaggacggcggcggctggtggtacaaccgctgccacgccgccaaccccaacggccgctactactggggcggccagtacacctgggacatggccaagcacggcaccgacgacggcgtggtgtggatgaactggaagggcagctggtacagcatgcgcaagatgagcatgaagatccgccccttcttcccccagcag

SEQ ID NO: 153267 - DNA, 1476 bp, Artificial Sequence
  derived and/or modified sequence
atgaagagaatggtgagctggagcttccacaagctgaagaccatgaagcacctgctgctgctgctgctgtgcgtgttcctggtgaagagccagggcgtgaacgacaacgaggagggcttcttcagcgccagaggccacagacccctggacaagaagagagaggaggcccccagcctgagacccgcccccccccccatcagcggcggcggctacagagccagacccgccaaggccgccgccacccagaagaaggtggagagaaaggcccccgacgccggcggctgcctgcacgccgaccccgacctgggcgtgctgtgccccaccggctgccagctgcaggaggccctgctgcagcaggagagacccatcagaaacagcgtggacgagctgaacaacaacgtggaggccgtgagccagaccagcagcagcagcttccagtacatgtacctgctgaaggacctgtggcagaagagacagaagcaggtgaaggacaacgagaacgtggtgaacgagtacagcagcgagctggagaagcaccagctgtacatcgacgagaccgtgaacagcaacatccccaccaacctgagagtgctgagaagcatcctggagaacctgagaagcaagatccagaagctggagagcgacgtgagcgcccagatggagtactgcagaaccccctgcaccgtgagctgcaacatccccgtggtgagcggcaaggagtgcgaggagatcatcagaaagggcggcgagaccagcgagatgtacctgatccagcccgacagcagcgtgaagccctacagagtgtactgcgacatgaacaccgagaacggcggctggaccgtgatccagaacagacaggacggcagcgtggacttcggcagaaagtgggacccctacaagcagggcttcggcaacgtggccaccaacaccgacggcaagaactactgcggcctgcccggcgagtactggctgggcaacgacaagatcagccagctgaccagaatgggccccaccgagctgctgatcgagatggaggactggaagggcgacaaggtgaaggcccactacggcggcttcaccgtgcagaacgaggccaacaagtaccagatcagcgtgaacaagtacagaggcaccgccggcaacgccctgatggacggcgccagccagctgatgggcgagaacagaaccatgaccatccacaacggcatgttcttcagcacctacgacagagacaacgacggctggctgaccagcgaccccagaaagcagtgcagcaaggaggacggcggcggctggtggtacaacagatgccacgccgccaaccccaacggcagatactactggggcggccagtacacctgggacatggccaagcacggcaccgacgacggcgtggtgtggatgaactggaagggcagctggtacagcatgagaaagatgagcatgaagatcagacccttcttcccccagcagtag

SEQ ID NO: 153268 - DNA, 1425 bp, Artificial Sequence
  derived and/or modified sequence
atgaagagaatggtgagctggagcttccacaagctgaagaccatgaagcacctgctgctgctgctgctgtgcgtgttcctggtgaagagccagggcgtgaacgacaacgaggagggcttcttcagcgccagaggccacagacccctggacaagaagagagaggaggccagacccgccaaggccgccgccacccagaagaaggtggagagaaaggcccccgacgccggcggctgcctgcacgccgaccccgacctgggcgtgctgtgccccaccggctgccagctgcaggaggccctgctgcagcaggagagacccatcagaaacagcgtggacgagctgaacaacaacgtggaggccgtgagccagaccagcagcagcagcttccagtacatgtacctgctgaaggacctgtggcagaagagacagaagcaggtgaaggacaacgagaacgtggtgaacgagtacagcagcgagctggagaagcaccagctgtacatcgacgagaccgtgaacagcaacatccccaccaacctgagagtgctgagaagcatcctggagaacctgagaagcaagatccagaagctggagagcgacgtgagcgcccagatggagtactgcagaaccccctgcaccgtgagctgcaacatccccgtggtgagcggcaaggagtgcgaggagatcatcagaaagggcggcgagaccagcgagatgtacctgatccagcccgacagcagcgtgaagccctacagagtgtactgcgacatgaacaccgagaacggcggctggaccgtgatccagaacagacaggacggcagcgtggacttcggcagaaagtgggacccctacaagcagggcttcggcaacgtggccaccaacaccgacggcaagaactactgcggcctgcccggcgagtactggctgggcaacgacaagatcagccagctgaccagaatgggccccaccgagctgctgatcgagatggaggactggaagggcgacaaggtgaaggcccactacggcggcttcaccgtgcagaacgaggccaacaagtaccagatcagcgtgaacaagtacagaggcaccgccggcaacgccctgatggacggcgccagccagctgatgggcgagaacagaaccatgaccatccacaacggcatgttcttcagcacctacgacagagacaacgacggctggctgaccagcgaccccagaaagcagtgcagcaaggaggacggcggcggctggtggtacaacagatgccacgccgccaaccccaacggcagatactactggggcggccagtacacctgggacatggccaagcacggcaccgacgacggcgtggtgtggatgaactggaagggcagctggtacagcatgagaaagatgagcatgaagatcagacccttcttcccccagcagtag

SEQ ID NO: 153269 - DNA, 1476 bp, Artificial Sequence
  derived and/or modified sequence
atgaaacggatggttagttggtcttttcacaagcttaagaccatgaaacacttactgttacttctgctctgcgtttttctagtcaagtctcaaggcgtgaatgacaatgaagagggtttttttagcgctaggggccaccggccattggacaagaaacgggaagaggcccccagccttcggccagcaccccctcctatatccggcggcggatatagagctcgccctgcaaaagcggcggcaacacagaaaaaggtggaacgaaaggcaccagatgctggaggctgccttcatgctgaccccgacctgggagtactatgtccgaccggctgccaactgcaggaagccctactgcagcaggaacgacctattcggaattctgttgatgagctgaataataacgtagaagccgtgtctcagacgagctctagttctttccagtatatgtatcttctgaaggatctgtggcagaagcggcagaaacaggtcaaggataacgaaaatgtcgtgaatgaatactcttccgaactggagaagcatcagctgtacatcgatgagactgtcaacagtaatatccctacgaatctccgggttctgcgatctatattggaaaacctccggtcaaaaatacagaagcttgagagtgacgtttcagcccagatggaatattgtcgcacgccctgcacagtgagctgtaacataccagtagtctccggcaaggaatgtgaagaaattatccgcaaggggggcgaaacatctgagatgtatctgatccagcctgatagttccgtgaagccatacagagtatactgtgatatgaacactgagaacgggggttggacagtgattcaaaatagacaagatgggtcggtcgattttggccgcaagtgggatccatacaaacagggttttggcaacgtggccaccaacaccgacgggaaaaactattgtggactgcccggagaatactggttgggtaacgacaaaattagtcagctcacgaggatgggtcccaccgagctcctgatcgagatggaggattggaaaggggataaggtgaaggcccattatgggggcttcaccgtgcaaaacgaggctaacaagtatcagatttcggtgaacaaatatcggggaaccgcgggaaatgcacttatggatggagcatctcagctgatgggcgaaaatcgcacaatgacaatccacaatggcatgtttttttccacgtatgacagagacaatgacgggtggctgacctccgacccccggaagcagtgctcgaaggaggacggaggcgggtggtggtacaatagatgtcatgcagcaaatcctaacggtaggtattactgggggggccagtacacttgggacatggctaaacacggcacagatgatggcgtggtatggatgaattggaagggatcctggtacagcatgcggaaaatgtcgatgaaaatccggccatttttcccacagcagtag

SEQ ID NO: 153270 - DNA, 1425 bp, Artificial Sequence
  derived and/or modified sequence
atgaagcgcatggtcagctggagcttccataaactcaaaacaatgaaacacctgctgcttctcctgctgtgcgtgtttctcgtcaaatcccagggagtaaacgataatgaggaagggttcttctccgcccgtggacaccgtccacttgataaaaaacgggaagaggcacgccccgcaaaggccgctgcaacccagaagaaagtcgagcggaaggcacctgatgcgggcggatgtctgcatgcggatccggacctgggagtgctctgcccaacgggatgtcaactgcaagaggctttactgcaacaggaacgcccgattcgtaactcagtggatgaattgaacaacaatgtggaagcggtcagccagacgtcttcctctagtttccaatacatgtacttactcaaggatctttggcagaagaggcagaagcaggtcaaagataacgaaaacgtggtcaacgaatactcaagcgaactggagaaacaccagctctatatcgacgagacagtgaattcgaacatacctacaaacctacgggtactgcggagtattcttgaaaacctccgttccaaaatccagaaattggaaagcgacgtctcggcacagatggaatactgccgaaccccctgcacagtgtcatgtaatatcccggtggtgtcggggaaggaatgtgaggagatcattagaaaggggggggaaacgtccgagatgtatctcatacaacccgactcctccgtgaaaccttaccgggtgtactgtgatatgaacacagagaatggcggctggactgtgatccagaacagacaagatggctcagtggacttcggaaggaagtgggacccttacaagcaaggcttcggaaacgttgccactaatacagatggcaagaactactgcggcctgcctggtgaatactggctcgggaacgacaaaatttcccagttaacacggatggggcctaccgaacttttaatcgaaatggaagactggaaaggagacaaagtgaaggcacattacggaggcttcaccgtgcaaaacgaggctaataagtaccagatctccgtgaacaagtacagaggcaccgccggcaacgctttgatggatggcgcttcccagctcatgggagaaaatagaacaatgacaatacacaatgggatgtttttttctacctatgaccgggacaatgatggttggctaacctccgacccaaggaaacaatgctcgaaagaggacggtggtgggtggtggtataatcgctgtcacgctgcgaacccaaatggtaggtattattggggtggccaatacacatgggacatggcaaagcatggcactgatgacggggttgtttggatgaactggaagggaagctggtacagcatgcgtaagatgtccatgaaaattcgacctttcttccctcagcagtag

SEQ ID NO: 153271 - DNA, 1476 bp, Artificial Sequence
  derived and/or modified sequence
atgaagaggatggtgtcctggagcttccacaagctgaagaccatgaagcacctgctgctgctgctgctgtgtgtgttcctggtgaagagccagggcgtgaatgacaatgaggagggcttcttcagcgcccggggccaccggcccctggacaagaagcgggaggaggcccccagcctgcggcctgcccccccacccatcagcggcggcggctaccgggcccggcctgccaaggctgctgccacccagaagaaggtggagaggaaggccccagatgctgggggctgcctgcacgccgaccctgacctgggcgtgctgtgccccaccggctgccagctgcaggaggccctgctgcagcaggagcggcccatccggaacagcgtggatgagctgaacaacaacgtggaggccgtgtcccagaccagcagcagcagcttccagtacatgtacctgctgaaggacctgtggcagaagaggcagaagcaggtgaaggacaatgaaaatgtggtgaatgagtacagcagcgagctggagaagcaccagctgtacattgatgagaccgtgaacagcaacatccccaccaacctgcgggtgctgcggagcatcctggagaacctgcggagcaagatccagaagctggagagtgatgtgtctgcccagatggagtactgcaggaccccctgcaccgtgtcctgcaacatccctgtggtgtctgggaaggaatgtgaggagatcatcagaaaaggaggagagaccagcgagatgtacctgatccagcctgacagctctgtgaagccctacagagtgtactgtgacatgaacacagaaaatggaggctggacagtcatccagaaccggcaggacggctctgtggactttggaaggaagtgggacccctacaagcagggctttggaaatgtggccaccaacacagatggcaagaactactgcggcctgcctggagagtactggctgggcaatgacaagatcagccagctgaccaggatgggccccacagagctgctgattgagatggaggactggaagggggacaaggtgaaggcccactacggcggcttcaccgtgcagaatgaggccaacaagtaccagatctctgtgaacaagtaccggggcacagctggaaatgccctgatggatggagccagccagctgatgggagaaaatagaaccatgaccatccacaacggcatgttcttcagcacctatgaccgggacaatgatggctggctgaccagtgaccccaggaagcagtgcagcaaagaagatggcggcggctggtggtacaaccgctgccacgccgccaaccccaacggccgctactactggggcggccagtacacctgggacatggccaagcatggaacagatgatggagtggtgtggatgaactggaagggctcctggtacagcatgaggaagatgtccatgaagatccggcccttcttcccccagcagtag

SEQ ID NO: 153272 - DNA, 1425 bp, Artificial Sequence
  derived and/or modified sequence
atgaagaggatggtgtcctggagcttccacaagctgaagaccatgaagcacctgctgctgctgctgctgtgtgtgttcctggtgaagagccagggcgtgaatgacaatgaggagggcttcttcagcgcccggggccaccggcccctggacaagaagcgggaggaggcccggcctgccaaggccgccgccacccagaagaaggtggagaggaaggccccagatgctgggggctgcctgcatgctgaccctgacctgggcgtgctgtgccccaccggctgccagctgcaggaggccctgctgcagcaggagcggcccatcagaaattctgtggatgagctgaacaacaacgtggaggccgtgtcccagaccagcagcagcagcttccagtacatgtacctgctgaaggacctgtggcagaagaggcagaagcaggtgaaggacaatgaaaatgtggtgaatgagtacagcagcgagctggagaagcaccagctgtacattgatgaaacagtgaacagcaacatccccaccaacctgcgggtgctgcggagcatcctggagaacctgcggagcaagatccagaagctggagagtgatgtgtctgcccagatggagtactgcaggaccccctgcaccgtgtcctgcaacatccctgtggtgtctgggaaggaatgtgaggagatcatcaggaagggcggggagaccagcgagatgtacctgatccagcctgacagctctgtgaagccctacagagtgtactgtgacatgaacacagaaaatggaggctggacagtcatccagaaccggcaggacggctctgtggactttggaaggaagtgggacccctacaagcagggctttggaaatgtggccaccaacacagatggcaagaactactgcggcctgcccggggagtactggctgggcaatgacaagatcagccagctgaccaggatgggccccacagagctgctgattgagatggaggactggaagggggacaaggtgaaggcccactatggaggcttcaccgtgcagaatgaggccaacaagtaccagatctctgtgaacaagtaccggggcacagctggaaatgccctgatggatggagccagccagctgatgggagagaacagaaccatgaccatccacaacggcatgttcttcagcacctatgaccgggacaatgatggctggctgaccagtgaccccaggaagcagtgcagcaaggaggatggcggcggctggtggtacaaccgctgccacgccgccaaccccaacggccgctactactggggcggccagtacacctgggacatggccaagcacggcacagatgatggagtggtgtggatgaactggaagggctcctggtacagcatgaggaagatgtccatgaagatccggcccttcttcccccagcagtag

SEQ ID NO: 153273 - DNA, 1975 bp, Artificial Sequence
  derived and/or modified sequence
gaagtcattcctagcagaggactcagatatatataggattgaagatctctcagttaagtctacatgaaaaggatggtttcttggagcttccacaaacttaaaaccatgaaacatctattattgctactattgtgtgtttttctagttaagtcccaaggtgtcaacgacaatgaggagggtttcttcagtgcccgtggtcatcgaccccttgacaagaagagagaagaggctcccagcctgaggcctgccccaccgcccatcagtggaggtggctatcgggctcgtccagccaaagcagctgccactcaaaagaaagtagaaagaaaagcccctgatgctggaggctgtcttcacgctgacccagacctgggggtgttgtgtcctacaggatgtcagttgcaagaggctttgctacaacaggaaaggccaatcagaaatagtgttgatgagttaaataacaatgtggaagctgtttcccagacctcctcttcttcctttcagtacatgtatttgctgaaagacctgtggcaaaagaggcagaagcaagtaaaagataatgaaaatgtagtcaatgagtactcctcagaactggaaaagcaccaattatatatagatgagactgtgaatagcaatatcccaactaaccttcgtgtgcttcgttcaatcctggaaaacctgagaagcaaaatacaaaagttagaatctgatgtctcagctcaaatggaatattgtcgcaccccatgcactgtcagttgcaatattcctgtggtgtctggcaaagaatgtgaggaaattatcaggaaaggaggtgaaacatctgaaatgtatctcattcaacctgacagttctgtcaaaccgtatagagtatactgtgacatgaatacagaaaatggaggatggacagtgattcagaaccgtcaagacggtagtgttgactttggcaggaaatgggatccatataaacagggatttggaaatgttgcaaccaacacagatgggaagaattactgtggcctaccaggtgaatattggcttggaaatgataaaattagccagcttaccaggatgggacccacagaacttttgatagaaatggaggactggaaaggagacaaagtaaaggctcactatggaggattcactgtacagaatgaagccaacaaataccagatctcagtgaacaaatacagaggaacagccggtaatgccctcatggatggagcatctcagctgatgggagaaaacaggaccatgaccattcacaacggcatgttcttcagcacgtatgacagagacaatgacggctggttaacatcagatcccagaaaacagtgttctaaagaagacggtggtggatggtggtataatagatgtcatgcagccaatccaaacggcagatactactggggtggacagtacacctgggacatggcaaagcatggcacagatgatggtgtagtatggatgaattggaaggggtcatggtactcaatgaggaagatgagtatgaagatcaggcccttcttcccacagcaatagtccccaatacgtagatttttgctcttctgtatgtgacaacatttttgtacattatgttattggaattttctttcatacattatattcctctaaaactctcaagcagacgtgagtgtgactttttgaaaaaagtataggataaattacattaaaatagcacatgattttcttttgttttcttcatttctcttgctcaccaagaagtaacaaaagtatagttttgacagagttggtgttcataatttcagttctagttgattgcgagaattttcaaataaggaagaggggtcttttatccttgtcgtaggaaaaccatgacggaaaggaaaaactgatgtttaaaagtccacttttaaaactatatttatttatgtaggatctgtcaaagaaaacttccaaaaagatttattaattaaaccagactctgttgcaataa

SEQ ID NO: 153274 - DNA, 1759 bp, Artificial Sequence
  derived and/or modified sequence
aagtctacatgaaaaggatggtttcttggagcttccacaaacttaaaaccatgaaacatctattattgctactattgtgtgtttttctagttaagtcccaaggtgtcaacgacaatgaggagggtttcttcagtgcccgtggtcatcgaccccttgacaagaagagagaagaggctcgtccagccaaagcagctgccactcaaaagaaagtagaaagaaaagcccctgatgctggaggctgtcttcacgctgacccagacctgggggtgttgtgtcctacaggatgtcagttgcaagaggctttgctacaacaggaaaggccaatcagaaatagtgttgatgagttaaataacaatgtggaagctgtttcccagacctcctcttcttcctttcagtacatgtatttgctgaaagacctgtggcaaaagaggcagaagcaagtaaaagataatgaaaatgtagtcaatgagtactcctcagaactggaaaagcaccaattatatatagatgagactgtgaatagcaatatcccaactaaccttcgtgtgcttcgttcaatcctggaaaacctgagaagcaaaatacaaaagttagaatctgatgtctcagctcaaatggaatattgtcgcaccccatgcactgtcagttgcaatattcctgtggtgtctggcaaagaatgtgaggaaattatcaggaaaggaggtgaaacatctgaaatgtatctcattcaacctgacagttctgtcaaaccgtatagagtatactgtgacatgaatacagaaaatggaggatggacagtgattcagaaccgtcaagacggtagtgttgactttggcaggaaatgggatccatataaacagggatttggaaatgttgcaaccaacacagatgggaagaattactgtggcctaccaggtgaatattggcttggaaatgataaaattagccagcttaccaggatgggacccacagaacttttgatagaaatggaggactggaaaggagacaaagtaaaggctcactatggaggattcactgtacagaatgaagccaacaaataccagatctcagtgaacaaatacagaggaacagccggtaatgccctcatggatggagcatctcagctgatgggagaaaacaggaccatgaccattcacaacggcatgttcttcagcacgtatgacagagacaatgacggctggttaacatcagatcccagaaaacagtgttctaaagaagacggtggtggatggtggtataatagatgtcatgcagccaatccaaacggcagatactactggggtggacagtacacctgggacatggcaaagcatggcacagatgatggtgtagtatggatgaattggaaggggtcatggtactcaatgaggaagatgagtatgaagatcaggcccttcttcccacagcaatagtccccaatacgtagatttttgctcttctgtatgtgacaacatttttgtacattatgttattggaattttctttcatacattatattcctctaaaactctcaagcagacgtgagtgtgactttttgaaaaaagtataggataaattacattaaaatagcacatgattttcttttgttttcttcatttctcttgctcaccaagaagtaacaaaagtatagttttgacagagttggtgttcataatttcagttctagttgattgcgagaattttcaaataaggaagaggggtcttttatccttgtcgtaggaaaaccatgacggaaagg

SEQ ID NO: 153275 - DNA, 1476 bp, Artificial Sequence
  derived and/or modified sequence
atgaagcggatggtgagctggagcttccacaagctgaagaccatgaagcaccttctgctgctccttctctgtgtcttcctggtgaagtctcagggggtcaacgacaatgaggaaggcttcttcagcgcccgcgggcacaggcctctggataagaaaagggaagaagccccttctttgcgaccagcccccccacccatctcaggtggaggttatcgcgctagacctgctaaagccgccgccacacagaaaaaagtcgagcgtaaggctcccgacgctggaggttgcctgcatgctgaccccgatctgggggtcctgtgtccaacaggctgtcaacttcaggaggccctcttgcagcaggagcgcccgatccgcaattctgttgacgaactgaacaacaacgtggaagctgtatcgcagacatcttcatcatcttttcagtatatgtacctattgaaggatctctggcagaagcgacaaaagcaggtcaaggacaacgaaaatgtagtgaatgagtacagtagtgagctagagaagcaccagctatacattgatgagactgtcaacagtaatatacccacaaacctgcgcgtgctaagatctattcttgaaaacctgcgctcaaagatccaaaagctcgagtcggatgtctcagcacaaatggagtattgtagaactccgtgtactgtttcatgtaatattccagtcgtctctggaaaagagtgcgaagaaataatccgaaagggaggcgaaacaagtgaaatgtaccttatacagcctgactcatccgtgaagccctatcgcgtgtactgtgacatgaataccgagaatgggggttggacagtgattcagaataggcaggatggcagcgtcgatttcggacggaaatgggacccgtataagcagggatttgggaacgttgccactaatacagatgggaaaaattattgtggcctgcctggagagtactggctcggtaatgataaaatctcccaattaactcgaatgggccccactgaactccttatagagatggaagattggaagggcgacaaggtcaaggcccattacggcggatttacagtacagaacgaggcaaacaagtatcagatcagtgtcaataagtacaggggtacggccgggaatgctttaatggacggcgcctcacagttgatgggagagaatcggacaatgacaatacacaacggaatgttcttctcaacatacgacagggataacgatggctggctgaccagcgacccacggaagcagtgtagcaaggaggatgggggcgggtggtggtacaaccggtgccacgcggctaacccgaacggacgctattattggggggggcagtatacctgggatatggcaaaacacggcaccgatgacggagtggtttggatgaactggaaaggcagttggtatagcatgagaaagatgtcgatgaagattcgcccattttttccccagcagtag

SEQ ID NO: 153276 - DNA, 1425 bp, Artificial Sequence
  derived and/or modified sequence
atgaagcggatggtgagctggagcttccacaagctgaagaccatgaagcacctgctactactgctgctgtgcgtgttcttggtgaaaagccagggcgtgaacgataatgaagaagggtttttctctgcccgtggtcaccggccattggataagaaacgtgaggaagcccgccctgcaaaggctgccgcgacgcagaaaaaagtggagcggaaggcccctgatgcgggcgggtgcctacacgccgatcccgatctgggggtgctctgccccacgggatgccagctccaagaggctttgctacagcaggagagacccatccggaattctgtggatgaactcaacaacaacgtggaagcagtgtcccagactagttcctcttctttccagtatatgtacctcctaaaggatctctggcaaaagcggcagaagcaggttaaagataacgagaacgtcgttaacgaatacagtagtgagctggaaaaacaccagttatatatcgacgagactgtgaatagtaatatccccaccaatctcagagtgctaagatccattctcgagaacctgcgatccaaaattcagaagctggagagcgacgtgtccgctcaaatggagtactgccgcaccccctgtacagtctcctgtaatatccccgtcgtttcggggaaagaatgcgaagaaattatccggaaaggcggtgagacgtctgagatgtatctgattcagcccgattcctcagtgaagccttaccgagtgtactgcgatatgaacacagagaacggcggatggacagtgatccagaataggcaggatgggagcgtggattttggacggaaatgggacccctacaagcagggatttggcaatgtggccaccaatacagatggaaagaactattgcgggctacccggagaatactggctggggaacgataaaatttctcagctaactcgcatgggccctacggagctgctgatcgagatggaggattggaaaggcgataaagtgaaggctcattacgggggtttcaccgtgcagaacgaggcaaacaaataccagatcagtgtcaacaaatatcgggggacggccggaaatgcccttatggacggagcctcccagcttatgggcgaaaacaggaccatgaccatccacaacggcatgttctttagcacgtacgatagggataacgatggttggctgaccagtgacccaaggaaacaatgtagtaaagaggatgggggcggatggtggtacaaccggtgccacgccgcaaatcctaacgggcgatattactgggggggtcaatatacctgggacatggccaagcatggtaccgatgatggagtggtgtggatgaattggaaaggaagctggtattccatgaggaagatgagcatgaagataaggcctttcttcccacagcagtag

SEQ ID NO: 153277 - DNA, 1476 bp, Artificial Sequence
  derived and/or modified sequence
atgaagaggatggtatcctggtccttccacaagctgaagacaatgaagcatctccttttgttactattatgtgtgtttctcgttaagtctcagggggttaacgacaacgaggagggattcttcagcgcaagaggacacaggccactggataaaaaacgagaagaggccccatctcttcgcccagccccaccgcctataagcgggggaggctaccgagccagaccggcaaaagccgctgcgacccaaaagaaagtagagcgaaaagcccctgacgcagggggatgcctgcatgcggacccggacctgggcgtgttgtgccctaccggttgccaactgcaggaagctctgctgcaacaggaacggcctattcgaaactcggtggacgaactgaataacaacgtggaggctgtctctcagaccagctctagctccttccaatatatgtacctgctcaaggatttatggcagaagagacagaaacaggtgaaggataatgagaacgtcgtgaacgagtactctagcgaactggaaaaacatcaactgtatattgacgagactgtcaactcgaacatcccaaccaatctcagggttctgcgctctattttggaaaacttgcgcagcaagatccagaagctggaaagtgacgtgtccgcccagatggaatactgcagaactccctgcacagtgagctgtaacatacccgtggtcagtggcaaagagtgcgaagagattatccggaagggtggagagaccagcgagatgtatctgattcagcccgatagtagtgttaaaccatatcgcgtctattgcgacatgaataccgaaaatggcggttggacggttatccagaaccgtcaggatggttctgtagatttcgggaggaaatgggacccgtataagcaggggtttgggaatgttgccacaaataccgatgggaaaaattactgtgggctgccaggggagtactggttgggcaatgataaaatttctcagttaactaggatggggcctactgaacttctgattgagatggaggattggaagggggataaagtgaaggcccactatgggggattcaccgtgcagaacgaagcaaataagtaccaaatatctgtaaacaagtacagggggaccgcaggcaatgcacttatggacggcgcaagtcagctcatgggcgagaacaggactatgaccattcataatggaatgttcttctcaacttacgatcgggataatgatggttggctgacttctgatccccgaaaacaatgctccaaggaggacgggggtggctggtggtataatagatgccatgcagctaaccccaacggacggtactattggggtggtcagtacacctgggacatggctaaacatggaaccgacgacggcgtagtgtggatgaattggaagggaagctggtattccatgcggaaaatgagtatgaaaatccgacccttttttccacagcagtag

SEQ ID NO: 153278 - DNA, 1425 bp, Artificial Sequence
  derived and/or modified sequence
atgaaacggatggtgagctggagcttccacaagctgaagaccatgaagcatctccttctgctactgctttgcgtatttctggtcaaaagccagggagtgaatgacaatgaagagggcttcttcagcgcgagagggcaccgcccattagacaaaaaaagagaggaggcacgaccagctaaagccgctgctacccagaagaaggttgagcggaaagcccctgatgcgggaggctgcctccatgccgatccagacctcggagtgctgtgcccaaccggctgtcaactacaagaagctctgctacagcaggaaaggcctatcaggaattccgtcgatgagctcaataataacgtggaagccgtcagccagacgtcatccagctcattccagtacatgtacctgctgaaggacctctggcaaaaacggcagaagcaggtcaaggacaatgaaaatgtcgtgaacgagtatagttcagagttagagaagcatcagctttacattgatgaaacagtgaattcaaacatcccaactaacctgagagttctcagaagcattttggaaaatctccggagcaaaatccagaagctggagtctgacgtgagcgcccagatggagtattgcagaacgccgtgtacagttagctgtaacatcccagtggtgagcggcaaggagtgcgaagagataatacggaaaggtggagagacgtctgagatgtacctcattcaaccggacagctcggtcaaaccttatagagtgtactgtgacatgaataccgaaaacggcggatggactgtgatccagaatcggcaggacggtagcgtggacttcggtcgtaagtgggatccctataaacagggattcggaaatgtggccacaaataccgatgggaagaattattgcgggctgcctggtgaatattggttgggtaacgataagatctcgcagctgacacggatgggcccaaccgaactgctgatcgaaatggaggactggaaaggcgacaaagtaaaagcccactatggcggattcaccgttcaaaatgaggccaacaaatatcagatatctgtgaataagtaccgcggtaccgccggtaacgctctgatggacggcgctagccagctgatgggcgaaaatcgtacaatgacaattcataacgggatgtttttctccacgtacgaccgcgacaatgacggatggctgacatcagacccacgtaagcagtgctcaaaggaagacggcggagggtggtggtataaccggtgtcatgcggcaaatcccaacggaaggtactattggggcggacaatatacctgggacatggcaaagcatggcactgatgacggtgtggtatggatgaattggaagggctcatggtactctatgaggaagatgagtatgaagatccgtccattcttccctcagcagtag

SEQ ID NO: 153279 - protein, 417 aa, Artificial Sequence
  derived and/or modified sequence
MAWFALYLLSLLWATAGTSTQTQSSCSVPSAQEPLVNGIQVLMENSVTSSAYPNPSILIAMNLAGAYNLKAQKLLTYQLMSSDNNDLTIGQLGLTIMALTSSCRDPGDKVSILQRQMENWAPSSPNAEASAFYGPSLAILALCQKNSEATLPIAVRFAKTLLANSSPFNVDTGAMATLALTCMYNKIPVGSEEGYRSLFGQVLKDIVEKISMKIKDNGIIGDIYSTGLAMQALSVTPEPSKKEWNCKKTTDMILNEIKQGKFHNPMSIAQILPSLKGKTYLDVPQVTCSPDHEVQPTLPSNPGPGPTSASNITVIYTINNQLRGVELLFNETINVSVKSGSVLLVVLEEAQRKNPMFKFETTMTSWGLVVSSINNIAENVNHKTYWQFLSGVTPLNEGVADYIPFNHEHITANFTQY

SEQ ID NO: 153280 - protein, 392 aa, Artificial Sequence
  derived and/or modified sequence
MAVPSAQEPLVNGIQVLMENSVTSSAYPNPSILIAMNLAGAYNLKAQKLLTYQLMSSDNNDLTIGQLGLTIMALTSSCRDPGDKVSILQRQMENWAPSSPNAEASAFYGPSLAILALCQKNSEATLPIAVRFAKTLLANSSPFNVDTGAMATLALTCMYNKIPVGSEEGYRSLFGQVLKDIVEKISMKIKDNGIIGDIYSTGLAMQALSVTPEPSKKEWNCKKTTDMILNEIKQGKFHNPMSIAQILPSLKGKTYLDVPQVTCSPDHEVQPTLPSNPGPGPTSASNITVIYTINNQLRGVELLFNETINVSVKSGSVLLVVLEEAQRKNPMFKFETTMTSWGLVVSSINNIAENVNHKTYWQFLSGVTPLNEGVADYIPFNHEHITANFTQY

SEQ ID NO: 153281 - DNA, 1254 bp, Artificial Sequence
  derived and/or modified sequence
atggcctggtttgctttgtatctgctctctctgctctgggccacagctggaacctctacccagactcagtcgtcttgcagtgtaccaagcgcccaagaacccctcgtcaacggtattcaggtcttgatggaaaattctgtaacttctagcgcatatcccaatcctagcattctcattgccatgaatctcgccggcgcgtataatttgaaggctcaaaagctgctgacctatcagcttatgtccagtgataacaacgatctcactatcggtcaactgggattgacgatcatggcactcacatcatcatgccgcgatcccggcgacaaggtgagtatccttcagaggcagatggagaattgggctccatcgtctcccaacgccgaagcgagtgctttctatgggcccagtctggctatcctggctctgtgccagaagaactccgaggcaacgctccctatagccgtgcggtttgccaaaacactgttggccaactcctctccctttaacgtggacacgggcgctatggctaccctcgcactcacctgtatgtacaataagattccggtgggaagcgaggagggatacagatccctgttcgggcaggtgcttaaggacatcgtagagaagatttcaatgaaaattaaggacaacggaataatcggggacatttatagtactggcctggccatgcaggccttgagcgtcacgcctgagccctcaaagaaagagtggaactgcaaaaaaaccaccgatatgatcctgaacgaaataaagcaggggaaatttcacaaccctatgagcattgcacagattttgccctcattaaaagggaagacttatctggacgttcctcaggtgacttgctcaccagatcatgaagtgcagcccacactccctagcaacccgggtcccgggcccactagcgcgtcaaacatcaccgttatctatacgattaataaccagctgcggggtgtggagcttttattcaacgagacgattaatgtatccgtgaagagtggatccgtcctgctggttgtgctggaagaggcccagagaaaaaacccaatgttcaagttcgagaccacaatgacatcatggggcctcgtggtgagctctatcaataatatagccgagaatgttaaccacaaaacatactggcaatttctttccggggtgacgccgctgaacgagggagtggctgattacattccattcaatcatgagcacatcactgcgaattttacacagtactag

SEQ ID NO: 153282 - DNA, 1179 bp, Artificial Sequence
  derived and/or modified sequence
atggccgtgccttcagcccaggaaccactggtgaatggaatccaggtgcttatggagaactctgtcacttcttccgcctatccaaatcccagcatactcatcgcgatgaacctggctggcgcctacaatttgaaggcccagaaactgctcacatatcagctgatgtccagtgacaacaatgatctgaccattgggcagctcggtctcacaatcatggctctcacctcctcctgtcgggacccaggggacaaagtgtcaattctacaaagacaaatggagaactgggccccaagtagtcccaatgcagaggcttcagctttctacggaccaagtttggccatcctcgcactctgtcaaaaaaactccgaggctactctacctatcgccgttcgtttcgctaagaccctgctggctaattcgagcccttttaacgttgatactggagccatggccactctggctctaacctgcatgtacaacaagatacccgtcggatcggaggaaggctaccgaagtctgtttgggcaggtgcttaaggacatcgtggaaaaaatctccatgaaaatcaaggacaatggcatcattggggatatctactcgacaggcctggcaatgcaggcgctctccgtgacccccgagccttctaagaaggagtggaattgcaaaaagaccaccgatatgattttgaatgagataaagcagggcaaatttcacaaccccatgtccatagctcagatccttccttctcttaaaggcaaaacctatctcgacgtgcctcaggtgacctgtagtcccgatcacgaggtgcagccaacacttccgtccaacccaggcccaggccccacttctgcttctaacatcaccgtcatctatacgatcaataaccaacttagaggcgttgagttgctgttcaatgaaacaatcaacgtgtcagtaaaatctgggtcagtgctcctagtcgtgcttgaggaagcgcagcgaaagaatcccatgtttaaatttgagacaacaatgactagttggggtctggttgtgtcatccatcaacaacatcgccgaaaatgtgaaccataagacctactggcagttcttgtcgggggtgacgcccttaaacgagggtgtggctgattatatccctttcaaccatgagcacattacagcgaacttcacccagtactag

SEQ ID NO: 153283 - DNA, 1518 bp, Artificial Sequence
  derived and/or modified sequence
ttgcaaatcgcggtacctgtggatgagagacatagacgagagagtgagatggcctggtttgccctctacctcctgagccttctctgggctacagctgggactagtacccagacccagagttcatgctccgttccctcagcacaggagcccttggtcaatggaatacaagtactcatggagaactcggtgacttcatcagcctacccaaaccccagcatcctgattgccatgaatctggccggagcctacaacttgaaggcccagaagctcctgacttaccagctcatgtccagcgacaacaacgatctaaccattgggcagctcggcctcaccatcatggccctcacctcctcctgccgagaccctggggataaagtatccattctacaaagacaaatggagaactgggcaccttccagccccaacgctgaagcatcagccttctatgggcccagtctagcgatcttggcactgtgccagaagaactctgaggcgaccttgccgatagccgtccgctttgccaagaccctgctggccaactcctctcccttcaatgtagacacaggagcaatggcaaccttggctctgacctgtatgtacaacaagatccctgtaggttcagaggaaggttacagatccctgtttggtcaggtactaaaggatattgtggagaaaatcagcatgaagatcaaagataatggcatcattggagacatctacagtactggcctcgccatgcaggctctctctgtaacacctgagccatctaaaaaggaatggaactgcaagaagactacggatatgatactcaatgagattaagcaggggaaattccacaaccccatgtccattgctcaaatcctcccttccctgaaaggcaagacatacctagatgtgccccaggtcacttgtagtcctgatcatgaggtacaaccaactctacccagcaaccctggccctggccccacctctgcatctaacatcactgtcatatacaccataaataaccagctgaggggggttgagctgctcttcaacgagaccatcaatgttagtgtgaaaagtgggtcagtgttacttgttgtcctagaggaagcacagcgcaaaaatcctatgttcaaatttgaaaccacaatgacatcttggggccttgtcgtctcttctatcaacaatatcgcggaaaatgttaatcacaagacatactggcagtttcttagtggtgtaacacctttgaatgaaggggttgctgactacatacccttcaaccacgagcacatcacagccaatttcacacagtactaacgaagaggtgggttcagcttctatcaaacatctccaaaggatgggtgaaattttttccacttcattttaaatctatgcaaaaaagcgaatgcctgtgatgctaccatattcctggtaaaaacatggagaaccactatgtagaataaaaatgcaaagttcactggagtctcaacatctatgactcatgaaaataaaattttcatcttctcaacacaa

SEQ ID NO: 153284 - DNA, 1623 bp, Artificial Sequence
  derived and/or modified sequence
gcaaatcgcggtacctgtggatgagagacatagacgagagagtgagatggcctggtttgccctctacctcctgagccttctctgggctacagctgggactagtacccagacccagagttcatgctgtgagtatgatgtttttccaaggaggtcagggaagcagttgccctggggaaggggctgtgacctctgacactgagtggttgaaaatagcaatcactataggaattccaaaatggccgttccctcagcacaggagcccttggtcaatggaatacaagtactcatggagaactcggtgacttcatcagcctacccaaaccccagcatcctgattgccatgaatctggccggagcctacaacttgaaggcccagaagctcctgacttaccagctcatgtccagcgacaacaacgatctaaccattgggcagctcggcctcaccatcatggccctcacctcctcctgccgagaccctggggataaagtatccattctacaaagacaaatggagaactgggcaccttccagccccaacgctgaagcatcagccttctatgggcccagtctagcgatcttggcactgtgccagaagaactctgaggcgaccttgccgatagccgtccgctttgccaagaccctgctggccaactcctctcccttcaatgtagacacaggagcaatggcaaccttggctctgacctgtatgtacaacaagatccctgtaggttcagaggaaggttacagatccctgtttggtcaggtactaaaggatattgtggagaaaatcagcatgaagatcaaagataatggcatcattggagacatctacagtactggcctcgccatgcaggctctctctgtaacacctgagccatctaaaaaggaatggaactgcaagaagactacggatatgatactcaatgagattaagcaggggaaattccacaaccccatgtccattgctcaaatcctcccttccctgaaaggcaagacatacctagatgtgccccaggtcacttgtagtcctgatcatgaggtacaaccaactctacccagcaaccctggccctggccccacctctgcatctaacatcactgtcatatacaccataaataaccagctgaggggggttgagctgctcttcaacgagaccatcaatgttagtgtgaaaagtgggtcagtgttacttgttgtcctagaggaagcacagcgcaaaaatcctatgttcaaatttgaaaccacaatgacatcttggggccttgtcgtctcttctatcaacaatatcgcggaaaatgttaatcacaagacatactggcagtttcttagtggtgtaacacctttgaatgaaggggttgctgactacatacccttcaaccacgagcacatcacagccaatttcacacagtactaacgaagaggtgggttcagcttctatcaaacatctccaaaggatgggtgaaattttttccacttcattttaaatctatgcaaaaaagcgaatgcctgtgatgctaccatattcctggtaaaaacatggagaaccactatgtagaataaaaatgcaaagttcactggagtctcaacatctatgactcatgaaaataaaattttcatcttctc

SEQ ID NO: 153285 - DNA, 1254 bp, Artificial Sequence
  derived and/or modified sequence
atggcctggtttgccctgtacctgctgagcctgctgtgggccacagctggcaccagcacccagacccagagcagctgcagcgtgcccagcgcccaggagcccctggtgaatggcatccaggtgctgatggagaacagcgtgaccagcagcgcctaccccaaccccagcatcctgattgccatgaacctggccggggcctacaacctgaaggcccagaagctgctgacctaccagctgatgagcagtgacaacaatgacctgaccatcggccagctgggcctgaccatcatggccctgaccagcagctgccgggaccccggggacaaggtgtccatcctgcagaggcagatggagaactgggcccccagcagccccaatgctgaggccagcgccttctacggccccagcctggccatcctggccctgtgccagaagaacagcgaggccaccctgcccatcgctgtgcgctttgccaagaccctgctggccaacagcagccccttcaacgtggacaccggggccatggccaccctggccctgacctgcatgtacaacaagatccctgtgggcagcgaggagggctaccgcagcctgtttggccaggtgctgaaggacatcgtggagaagatctccatgaagatcaaggacaatggcatcatcggggacatctacagcacaggcctggccatgcaggccctgtctgtgaccccagagcccagcaagaaggagtggaactgcaagaagaccacagacatgatcctgaatgagatcaagcagggcaagttccacaaccccatgagcatcgcccagatcctgcccagcctgaagggcaagacctacctggatgtgccccaggtgacctgcagcccagaccacgaggtgcagcccaccctgcccagcaaccctggccctggccccaccagcgccagcaacatcaccgtcatctacaccatcaacaaccagctgcggggcgtggagctgctcttcaatgagaccatcaacgtgtctgtgaagagcggctctgtgctgctggtggtgctggaggaggcccagaggaagaaccccatgttcaagtttgagaccaccatgacctcctggggcctggtggtgagcagcatcaacaacattgctgaaaatgtgaaccacaagacctactggcagttcctgagcggcgtgacccccctgaatgaaggagtggccgactacatccccttcaaccacgagcacatcacagccaacttcacccagtactag

SEQ ID NO: 153286 - DNA, 1179 bp, Artificial Sequence
  derived and/or modified sequence
atggctgtgcccagcgcccaggagcccctggtgaatggcatccaggtgctgatggagaacagcgtgaccagcagcgcctaccccaaccccagcatcctgattgccatgaacctggccggggcctacaacctgaaggcccagaagctgctgacctaccagctgatgagcagtgacaacaatgacctgaccatcggccagctgggcctgaccatcatggccctgaccagcagctgccgggaccccggggacaaggtgtccatcctgcagaggcagatggagaactgggcccccagcagccccaatgctgaggccagcgccttctacggccccagcctggccatcctggccctgtgccagaagaacagcgaggccaccctgcccatcgctgtgcgctttgccaagaccctgctggccaacagcagccccttcaacgtggacacaggagccatggccaccctggccctgacctgcatgtacaacaagatccctgtgggcagcgaggagggctaccgcagcctgtttggccaggtgctgaaggacatcgtggagaagatctccatgaagatcaaggacaatggcatcattggagacatctacagcacaggcctggccatgcaggccctgtctgtgaccccagagcccagcaagaaggagtggaactgcaagaagaccacagacatgatcctgaatgagatcaagcagggcaagttccacaaccccatgagcatcgcccagatcctgcccagcctgaagggcaagacctacctggatgtgccccaggtgacctgcagcccagaccacgaggtgcagcccaccctgcccagcaaccctggccctggccccaccagcgccagcaacatcaccgtcatctacaccatcaacaaccagctgcggggcgtggagctgctcttcaatgagaccatcaacgtgtctgtgaagagcggctctgtgctgctggtggtgctggaggaggcccagaggaagaaccccatgttcaagtttgagaccaccatgacctcctggggcctggtggtgagcagcatcaacaacattgctgaaaatgtgaaccacaagacctactggcagttcctgtctggagtgacccccctgaatgaaggagtggccgactacatccccttcaaccacgagcacatcacagccaacttcacccagtactag

SEQ ID NO: 153287 - DNA, 1254 bp, Artificial Sequence
  derived and/or modified sequence
atggcctggttcgccctgtacctgctgagcctgctgtgggccaccgctgggacatcaacgcagacccagtcatcctgctcagtgccctccgcccaagagcccttagtgaacggaatccaggtcctaatggagaattcagttactagttccgcttacccgaacccatccatcctgatagccatgaacctggccggagcatataaccttaaagcccagaaactgctcacataccagttaatgagctcggataacaacgatctgactataggccagctcggtctgacgattatggccctcacctcttcatgtcgggaccccggggataaagttagtatcttgcagaggcagatggagaactgggccccctcctcccccaacgctgaggccagtgctttctatggcccatccctggcgatcctcgccctgtgtcagaagaactccgaggccacattgcctattgccgtaagatttgccaagacactgcttgctaatagctccccattcaatgtcgatactggagccatggccaccctagctctgacttgtatgtacaataaaattccggtgggcagcgaggaagggtatcggtccctgttcgggcaagttctcaaggatatcgtggagaaaatcagtatgaagatcaaggacaatggaatcattggagacatatacagcactggcctggccatgcaggctctatcagtgactccagagccctccaaaaaagagtggaattgtaaaaagactacggacatgatcttgaacgagataaaacaaggtaaattccacaatccaatgagcattgcacagatcctaccgagcctgaagggcaagacttaccttgacgtaccgcaggtgacttgtagtcccgaccacgaagtacagccgactctcccgagcaaccctggtcctggcccaacctctgcttcaaacataaccgtcatttacaccattaataatcagctcaggggggtggagctgctgttcaacgagacaatcaatgtgtcagtaaagagcggctctgttctccttgttgtgctggaggaggcccaaagaaaaaaccctatgtttaagtttgagacaactatgacctcatggggcctggtggtgagtagtattaataacattgctgagaatgtcaaccataagacatactggcagttcctttctggggtgacacctctaaatgagggggtggcagattacatcccttttaatcatgaacacatcacagccaatttcacccagtactag

SEQ ID NO: 153288 - DNA, 1179 bp, Artificial Sequence
  derived and/or modified sequence
atggccgtgcccagcgcccaggagcccctggtgaacggcatccaggtcctcatggaaaacagtgtcaccagctcagcctatcctaacccgagtatcttaatcgctatgaatctagctggtgcatataacttaaaggcccagaagctcttgacctaccagttgatgtcgtcggataataatgatctcaccattggccagctggggctgactatcatggcccttactagtagttgccgggatcctggcgataaagtatccattctccagaggcagatggaaaattgggccccatcttcccctaatgccgaggcatccgcgttctatggcccatccctggcaatactggccctgtgtcaaaagaattcggaagcaacactgccaatagccgtccgctttgctaagacactcctggctaattcttccccttttaacgtggataccggagccatggcaacacttgccttgacctgcatgtacaacaagattcccgttgggagcgaggaaggatacagatctttattcggccaggtgctcaaggacattgtcgagaaaatttcaatgaaaatcaaggacaatgggatcatcggcgatatttatagcacagggctcgccatgcaagctctgagcgtgactccagagccaagcaaaaaagagtggaactgcaaaaaaactacagacatgatcctcaacgagatcaaacagggcaagttccacaatcccatgtcaattgcccagatacttccgtcactgaaaggaaagacctacctagacgtaccacaggtgacgtgctcaccagatcacgaagtccagccaaccctgccttccaatcctggccccggccctactagcgctagcaacatcactgtcatatataccatcaataaccagcttcggggcgtagagctcctttttaatgaaactatcaatgtgtccgtgaagtccgggagcgtcctgctcgttgtgttagaagaggcccaaaggaaaaatccgatgtttaagttcgagactaccatgaccagctgggggctcgtggtgtcatccattaataatattgctgagaatgtcaaccacaaaacatactggcagtttctgagtggcgtgacgccactcaacgagggtgtagctgattacatcccctttaatcacgaacacatcacggcaaatttcacccagtactag

SEQ ID NO: 153289 - DNA, 1254 bp, Artificial Sequence
  derived and/or modified sequence
atggcctggttcgccctttatctactttctctgctgtgggctaccgcaggcaccagcactcagacacagtcaagttgcagtgtaccgagtgcccaggagcccctagtcaatggcatccaggtgcttatggagaacagcgtgactagcagcgcttatcccaaccccagtatcctgattgcgatgaatctggccggagcctacaatcttaaggcacagaagttgctcacttatcagcttatgtcctcagacaacaacgatttgactatcggccaactgggactcactatcatggcgctgacttcatcttgccgagatcctggagataaagttagcatccttcagagacaaatggagaactgggctccttctagccccaatgcggaagcaagtgctttttacgggccttccttggcaatcctggccctgtgtcagaaaaactcggaagcaaccttacccatagcggtccgcttcgctaaaaccctccttgctaacagctccccctttaacgtggataccggtgcaatggctactctggcactgacttgcatgtacaacaagattcctgtgggttctgaggagggatacaggagcctctttggccaggtgctcaaagatatcgtcgaaaaaatcagcatgaaaatcaaggacaacggcattattggagacatctatagcactgggcttgccatgcaggccttgtccgtaacacctgagccctctaagaaagaatggaactgtaaaaagacaaccgatatgatcctcaacgagataaagcagggaaagtttcataacccaatgagtattgctcagatactcccctcgctgaaagggaagacttatctcgacgtaccccaggtgacatgctcccccgatcacgaggtccaacctacgctgcctagcaaccccggtccagggcctacttcggcctcaaatatcactgtgatttacacaatcaataatcaactccgtggggtggaactgctgttcaatgagactatcaatgtgagtgtgaagtctgggtctgtgttgctggttgtcctggaagaggcacaaaggaagaatcctatgttcaagttcgagaccacaatgactagttggggcctcgtggtgagcagtattaataatatcgctgagaatgtgaaccataagacctactggcagtttctgagtggggtgacacccctcaacgaaggtgtggctgattacattcccttcaatcacgaacatattacagcgaatttcactcaatactag

SEQ ID NO: 153290 - DNA, 1179 bp, Artificial Sequence
  derived and/or modified sequence
atggcagtaccatctgcacaggaacctctcgtcaacggtattcaagtgctcatggagaattcagtgacgtcgtccgcataccccaatccgagcattttgatcgcgatgaaccttgcaggggcttataacttgaaagctcaaaagctgctaacttaccaactcatgtcaagcgacaataatgacctgacgatcggacaattgggtttgaccattatggctctgacctcttcttgtcgggatcccggtgacaaagtgagcatcctacagcgacagatggagaattgggcgccttcgagccccaatgctgaggctagcgcattttacggaccctccctcgccatactggcattatgtcagaagaacagtgaggctacactcccgatcgccgttaggttcgctaaaaccctccttgcgaatagtagtccttttaacgtggacaccggagctatggcgactttagccctaacctgcatgtataataagattcctgtggggagtgaagaagggtacagatctttatttggccaagtcctgaaggatatcgtcgagaagatatccatgaaaatcaaagacaatggcattatcggcgatatatattcaacgggcttggccatgcaggccctcagtgtcacaccggaaccctccaagaaagagtggaattgtaagaagaccacggacatgatactgaacgagattaaacaaggaaaattccataacccaatgagtatagcccaaattctcccctctttgaagggtaaaacctatctggatgtgccacaggtaacctgtagccccgatcacgaggtgcagcccacccttcctagcaatcctgggccaggacccacctcagcctctaatatcacggtgatctacactataaacaatcagctgcgcggagttgaattactgttcaatgagactatcaatgtgtccgttaaatctggctcagtgctcctcgtggtcctggaggaggctcagaggaagaaccccatgtttaaatttgagacaactatgacctcctggggtctggttgtgagttctattaacaacatagctgaaaacgtcaatcataagacgtattggcagtttctgagcggagtgacgccgcttaatgaaggggtagccgattacatcccatttaatcatgagcatatcaccgccaatttcacacagtactag

SEQ ID NO: 153291 - DNA, 1254 bp, Artificial Sequence
  derived and/or modified sequence
atggcctggttcgccctgtacctgctgagcctgctgtgggccaccgccggcaccagcacccagacccagagcagctgcagcgtgcccagcgcccaggagcccctggtgaacggcatccaggtgctgatggagaacagcgtgaccagcagcgcctaccccaaccccagcatcctgatcgccatgaacctggccggcgcctacaacctgaaggcccagaagctgctgacctaccagctgatgagcagcgacaacaacgacctgaccatcggccagctgggcctgaccatcatggccctgaccagcagctgcagagaccccggcgacaaggtgagcatcctgcagagacagatggagaactgggcccccagcagccccaacgccgaggccagcgccttctacggccccagcctggccatcctggccctgtgccagaagaacagcgaggccaccctgcccatcgccgtgagattcgccaagaccctgctggccaacagcagccccttcaacgtggacaccggcgccatggccaccctggccctgacctgcatgtacaacaagatccccgtgggcagcgaggagggctacagaagcctgttcggccaggtgctgaaggacatcgtggagaagatcagcatgaagatcaaggacaacggcatcatcggcgacatctacagcaccggcctggccatgcaggccctgagcgtgacccccgagcccagcaagaaggagtggaactgcaagaagaccaccgacatgatcctgaacgagatcaagcagggcaagttccacaaccccatgagcatcgcccagatcctgcccagcctgaagggcaagacctacctggacgtgccccaggtgacctgcagccccgaccacgaggtgcagcccaccctgcccagcaaccccggccccggccccaccagcgccagcaacatcaccgtgatctacaccatcaacaaccagctgagaggcgtggagctgctgttcaacgagaccatcaacgtgagcgtgaagagcggcagcgtgctgctggtggtgctggaggaggcccagagaaagaaccccatgttcaagttcgagaccaccatgaccagctggggcctggtggtgagcagcatcaacaacatcgccgagaacgtgaaccacaagacctactggcagttcctgagcggcgtgacccccctgaacgagggcgtggccgactacatccccttcaaccacgagcacatcaccgccaacttcacccagtactag

SEQ ID NO: 153292 - DNA, 1179 bp, Artificial Sequence
  derived and/or modified sequence
atggccgtgcccagcgcccaggagcccctggtgaacggcatccaggtgctgatggagaacagcgtgaccagcagcgcctaccccaaccccagcatcctgatcgccatgaacctggccggcgcctacaacctgaaggcccagaagctgctgacctaccagctgatgagcagcgacaacaacgacctgaccatcggccagctgggcctgaccatcatggccctgaccagcagctgcagagaccccggcgacaaggtgagcatcctgcagagacagatggagaactgggcccccagcagccccaacgccgaggccagcgccttctacggccccagcctggccatcctggccctgtgccagaagaacagcgaggccaccctgcccatcgccgtgagattcgccaagaccctgctggccaacagcagccccttcaacgtggacaccggcgccatggccaccctggccctgacctgcatgtacaacaagatccccgtgggcagcgaggagggctacagaagcctgttcggccaggtgctgaaggacatcgtggagaagatcagcatgaagatcaaggacaacggcatcatcggcgacatctacagcaccggcctggccatgcaggccctgagcgtgacccccgagcccagcaagaaggagtggaactgcaagaagaccaccgacatgatcctgaacgagatcaagcagggcaagttccacaaccccatgagcatcgcccagatcctgcccagcctgaagggcaagacctacctggacgtgccccaggtgacctgcagccccgaccacgaggtgcagcccaccctgcccagcaaccccggccccggccccaccagcgccagcaacatcaccgtgatctacaccatcaacaaccagctgagaggcgtggagctgctgttcaacgagaccatcaacgtgagcgtgaagagcggcagcgtgctgctggtggtgctggaggaggcccagagaaagaaccccatgttcaagttcgagaccaccatgaccagctggggcctggtggtgagcagcatcaacaacatcgccgagaacgtgaaccacaagacctactggcagttcctgagcggcgtgacccccctgaacgagggcgtggccgactacatccccttcaaccacgagcacatcaccgccaacttcacccagtactag

SEQ ID NO: 153293 - protein, 406 aa, Artificial Sequence
  derived and/or modified sequence
MSALGAVIALLLWGQLFAVDSGNDVTDIADDGCPKPPEIAHGYVEHSVRYQCKNYYKLRTEGDGVYTLNDKKQWINKAVGDKLPECEADDGCPKPPEIAHGYVEHSVRYQCKNYYKLRTEGDGVYTLNNEKQWINKAVGDKLPECEAVCGKPKNPANPVQRILGGHLDAKGSFPWQAKMVSHHNLTTGATLINEQWLLTTAKNLFLNHSENATAKDIAPTLTLYVGKKQLVEIEKVVLHPNYSQVDIGLIKLKQKVSVNERVMPICLPSKDYAEVGRVGYVSGWGRNANFKFTDHLKYVMLPVADQDQCIRHYEGSTVPEKKTPKSPVGVQPILNEHTFCAGMSKYQEDTCYGDAGSAFAVHDLEEDTWYATGILSFDKSCAVAEYGVYVKVTSIQDWVQKTIAEN

SEQ ID NO: 153294 - DNA, 87 bp, Artificial Sequence
  derived and/or modified sequence
gcaaacagaattcaacactacattagaacgatcattcatcacgacctagtaggatgtttttcctgggatgcaaggatggttcaacat

SEQ ID NO: 153295 - DNA, 1221 bp, Artificial Sequence
  derived and/or modified sequence
atgagtgcattaggagccgtgatagctctcctgctatggggacagctcttcgcagtggattcaggaaatgatgtgacagacatagccgacgacggatgccctaaaccccctgagatcgctcatgggtatgtggagcatagcgttagataccagtgcaagaactactataagctgcggaccgagggcgatggcgtttacacattaaacgacaagaaacagtggataaataaggcagtgggcgacaaactacctgaatgcgaagctgatgatggttgtcccaagccacccgagattgcccatggctatgttgaacatagcgttcgttatcagtgtaagaactattacaagttgcgtaccgagggtgacggagtctacacactgaataacgaaaaacaatggatcaataaggctgtgggcgataaacttccggagtgtgaagctgtgtgcggaaagccaaaaaatccggccaatcctgttcagcgcatactcggcgggcacctggatgccaagggatcttttccatggcaggctaagatggtatcccaccataatttgaccacaggagcgactcttatcaacgaacagtggcttctgacgaccgccaagaatctgtttctgaaccattccgagaacgctaccgccaaggatatagcgcccaccctgaccctgtatgttggcaagaagcagctggttgagatcgaaaaggttgtgttgcaccccaattactcccaggtggacataggtcttattaagctcaagcaaaaggtctccgtcaacgaacgggttatgcctatctgcttgccctccaaagattatgccgaggtagggagggtggggtatgtatctggctggggcagaaatgctaactttaagtttaccgatcacttaaaatacgtgatgttgccagttgctgaccaggaccaatgcatacgccattacgagggttctactgtccccgaaaagaagacgcctaagtctcccgtgggcgttcagccaattctcaacgaacataccttctgcgctggcatgtcaaagtaccaagaagatacttgctatggtgatgccggctccgcctttgctgtccatgacctcgaagaggatacctggtatgcaactgggattttatcattcgataaatcctgcgctgtggcagagtacggagtgtacgtcaaggttacaagcattcaagattgggtccagaaaaccattgcagagaattag

SEQ ID NO: 153296 - DNA, 1429 bp, Artificial Sequence
  derived and/or modified sequence
agatgccccacagcactgctcttccagaggcaagaccaaccaagatgagtgccctgggagctgtcattgccctcctgctctggggacagctttttgcagtggactcaggcaatgatgtcacggatatcgcagatgacggctgcccgaagccccccgagattgcacatggctatgtggagcactcggttcgctaccagtgtaagaactactacaaactgcgcacagaaggagatggagtatacaccttaaatgataagaagcagtggataaataaggctgttggagataaacttcctgaatgtgaagcagatgacggctgcccgaagccccccgagattgcacatggctatgtggagcactcggttcgctaccagtgtaagaactactacaaactgcgcacagaaggagatggagtgtacaccttaaacaatgagaagcagtggataaataaggctgttggagataaacttcctgaatgtgaagcagtatgtgggaagcccaagaatccggcaaacccagtgcagcggatcctgggtggacacctggatgccaaaggcagctttccctggcaggctaagatggtttcccaccataatctcaccacaggtgccacgctgatcaatgaacaatggctgctgaccacggctaaaaatctcttcctgaaccattcagaaaatgcaacagcgaaagacattgcccctactttaacactctatgtggggaaaaagcagcttgtagagattgagaaggttgttctacaccctaactactcccaggtagatattgggctcatcaaactcaaacagaaggtgtctgttaatgagagagtgatgcccatctgcctaccttcaaaggattatgcagaagtagggcgtgtgggttatgtttctggctgggggcgaaatgccaattttaaatttactgaccatctgaagtatgtcatgctgcctgtggctgaccaagaccaatgcataaggcattatgaaggcagcacagtccccgaaaagaagacaccgaagagccctgtaggggtgcagcccatactgaatgaacacaccttctgtgctggcatgtctaagtaccaagaagacacctgctatggcgatgcgggcagtgcctttgccgttcacgacctggaggaggacacctggtatgcgactgggatcttaagctttgataagagctgtgctgtggctgagtatggtgtgtatgtgaaggtgacttccatccaggactgggttcagaagaccatagctgagaactaatgcaaggctggccggaagcccttgcctgaaagcaagatttcagcctggaagagggcaaagtggacgggagtggacaggagtggatgcgataagatgtggtttgaagctgatgggtgccagccctgcattgctgagtcaatcaataaagagctttcttttgaccc

SEQ ID NO: 153297 - DNA, 1221 bp, Artificial Sequence
  derived and/or modified sequence
atgtctgccctgggcgccgtcatcgccctgctgctgtggggccagctgtttgctgtggacagcggaaatgatgtgacagacattgctgatgatggctgccccaagcccccagaaattgcccacggctacgtggagcacagcgtgcgctaccagtgcaagaactactacaagctgaggacagaaggagatggagtgtacaccctgaatgacaagaagcagtggatcaacaaggctgtgggggacaagctgcctgaatgtgaggctgatgatggctgccccaagcccccagagatcgcccacggctacgtggagcacagcgtgcgctaccagtgcaagaactactacaagctgaggacagaaggagatggagtgtacaccctgaacaatgagaagcagtggatcaacaaggctgtgggggacaagctgcctgaatgtgaggccgtgtgtgggaagcccaagaacccagccaaccctgtgcagaggatcctgggcggccacctggatgccaagggcagcttcccctggcaggccaagatggtgagccaccacaacctgaccactggagccaccctcatcaatgagcagtggctgctgaccacagccaagaacctcttcctgaaccacagtgaaaatgccacagccaaggacatcgcccccaccctgaccctgtatgtgggcaagaagcagctggtggagattgagaaggtggtgctgcaccccaactacagccaggtggacatcggcctcatcaagctgaagcagaaggtgtctgtgaatgaaagagtgatgcccatctgcctgcccagcaaggactatgcagaggtgggccgggtgggctacgtgtctggctggggcagaaatgccaacttcaagttcacagaccacctgaagtatgtgatgctgcctgtggccgaccaggaccagtgcatccgccactatgagggcagcacagtgcctgagaagaagacccccaagagccctgtgggcgtgcagcccatcctgaatgagcacaccttctgtgccggcatgagcaagtaccaggaggacacctgctatggagatgctggcagcgcctttgctgtgcatgacctggaggaggacacctggtacgccaccggcatcctgagctttgacaagagctgtgctgtggccgagtatggagtgtatgtgaaggtgaccagcatccaggactgggtgcagaagaccatcgcagaaaattag

SEQ ID NO: 153298 - DNA, 1221 bp, Artificial Sequence
  derived and/or modified sequence
atgagcgccctgggcgccgtgatcgccctgctgctgtggggccagctgttcgcagtcgactctggtaatgacgttacagatatcgcagacgatggctgtcctaagccacctgagatcgcccacggatacgttgaacacagcgtgcgctatcaatgtaagaactattataaactgaggaccgagggagacggggtctacactctgaatgataagaaacagtggatcaataaggcagtgggagacaaactccccgagtgcgaagccgacgacggttgccctaagcccccggaaatagctcacgggtatgttgaacactctgtgagataccagtgtaaaaattactataagcttcgcacggagggggatggggtatacacattaaacaacgagaagcagtggattaacaaggctgtgggcgacaaattgcctgaatgcgaagccgtttgtgggaagcccaaaaaccctgcgaacccggtccagcgcattctaggtggccatttagatgctaagggtagcttcccatggcaggctaagatggtgagtcaccacaatctcactacgggggccaccctcatcaacgaacagtggctcttgactacagccaaaaacctctttttaaatcacagtgagaacgccacagccaaggacattgctcctaccctgacgctgtacgtcggcaagaaacagttggttgagatcgaaaaagttgtgctgcaccctaactattctcaggtcgatatcgggctcatcaagctcaaacagaaagtcagcgtgaacgagcgggttatgcccatctgtctgcctagcaaggactatgctgaggtgggccgggttggatatgtgagtggatggggaaggaacgcaaacttcaagtttacagatcacctaaagtacgtgatgctcccagtggcagatcaggatcaatgcattcgtcactacgagggtagcaccgtgcccgagaaaaagacaccaaagtctccagtaggagtgcaacctattttaaacgagcacacattctgcgcagggatgagcaaataccaggaggatacttgttatggcgatgctggtagtgcatttgctgttcatgacctggaggaggatacctggtacgctacaggaattcttagctttgataaaagttgcgctgtggccgagtacggggtgtacgttaaagtgaccagcattcaggattgggtgcagaaaaccattgccgagaattag

SEQ ID NO: 153299 - DNA, 1221 bp, Artificial Sequence
  derived and/or modified sequence
atgtccgccttgggtgctgtgatcgccctgctgctctggggccagctatttgccgtggatagcgggaatgatgtaactgacattgccgacgacggatgtccaaaaccccctgaaatcgctcatggctacgttgaacactcagtacgttaccagtgcaaaaattactataaactgaggactgaaggagacggcgtctatactctgaacgacaagaaacagtggatcaacaaggctgtgggcgataagttgcctgagtgcgaggccgacgatggctgccccaaaccccctgagatcgctcacgggtacgtagagcactcagtgaggtaccagtgcaagaattattacaaacttcggacagaaggcgacggtgtttataccctcaataatgagaaacagtggattaacaaagccgtcggcgataaattacctgaatgtgaggccgtctgcggaaagccaaagaacccagcaaaccccgtgcagaggatcctgggaggacatctcgatgccaaagggtcatttccatggcaggctaaaatggtcagtcatcacaacctgactaccggggctactttgataaatgagcaatggttgctcacaactgcgaagaacctgttcttgaaccactctgaaaatgctactgctaaggatatagctccaacgctcaccctgtacgtcgggaaaaaacagttggtcgagatagagaaagtcgttttgcatcccaattacagccaggttgacattggactgatcaagctcaaacagaaagtgtcggtgaacgagcgtgtaatgcctatatgccttcccagcaaagactatgccgaagtcggcagggtgggatatgtttccgggtggggaaggaatgcaaacttcaaatttactgaccatttgaaatacgttatgttacccgttgccgaccaagatcagtgtattagacattatgaaggtagcactgtacctgaaaaaaagacaccaaaaagtcccgttggtgttcagcccattctaaatgaacacacgttctgtgctgggatgagtaagtatcaggaggatacgtgctacggagatgccggatcggcatttgccgtacacgatctagaggaggacacatggtacgctacgggcatcctttctttcgacaagtcctgcgcggtagccgaatacggcgtatacgtgaaagtgacctctattcaggactgggtgcaaaaaaccatcgctgagaattag

SEQ ID NO: 153300 - DNA, 1221 bp, Artificial Sequence
  derived and/or modified sequence
atgagcgccctgggcgccgtgatcgccctgctgctgtggggccagctgttcgccgtggacagcggcaacgacgtgaccgacatcgccgacgacggctgccccaagccccccgagatcgcccacggctacgtggagcacagcgtgagataccagtgcaagaactactacaagctgagaaccgagggcgacggcgtgtacaccctgaacgacaagaagcagtggatcaacaaggccgtgggcgacaagctgcccgagtgcgaggccgacgacggctgccccaagccccccgagatcgcccacggctacgtggagcacagcgtgagataccagtgcaagaactactacaagctgagaaccgagggcgacggcgtgtacaccctgaacaacgagaagcagtggatcaacaaggccgtgggcgacaagctgcccgagtgcgaggccgtgtgcggcaagcccaagaaccccgccaaccccgtgcagagaatcctgggcggccacctggacgccaagggcagcttcccctggcaggccaagatggtgagccaccacaacctgaccaccggcgccaccctgatcaacgagcagtggctgctgaccaccgccaagaacctgttcctgaaccacagcgagaacgccaccgccaaggacatcgcccccaccctgaccctgtacgtgggcaagaagcagctggtggagatcgagaaggtggtgctgcaccccaactacagccaggtggacatcggcctgatcaagctgaagcagaaggtgagcgtgaacgagagagtgatgcccatctgcctgcccagcaaggactacgccgaggtgggcagagtgggctacgtgagcggctggggcagaaacgccaacttcaagttcaccgaccacctgaagtacgtgatgctgcccgtggccgaccaggaccagtgcatcagacactacgagggcagcaccgtgcccgagaagaagacccccaagagccccgtgggcgtgcagcccatcctgaacgagcacaccttctgcgccggcatgagcaagtaccaggaggacacctgctacggcgacgccggcagcgccttcgccgtgcacgacctggaggaggacacctggtacgccaccggcatcctgagcttcgacaagagctgcgccgtggccgagtacggcgtgtacgtgaaggtgaccagcatccaggactgggtgcagaagaccatcgccgagaactag

SEQ ID NO: 153301 - protein, 1189 aa, Artificial Sequence
  derived and/or modified sequence
MESTPSFLKGTPTWEKTAPENGIVRQEPGSPPRDGLHHGPLCLGEPAPFWRGVLSTPDSWLPPGFPQGPKDMLPLVEGEGPQNGERKVNWLGSKEGLRWKEAMLTHPLAFCGPACPPRCGPLMPEHSGGHLKSDPVAFRPWHCPFLLETKILERAPFWVPTCLPPYLVSGLPPEHPCDWPLTPHPWVYSGGQPKVPSAFSLGSKGFYYKDPSIPRLAKEPLAAAEPGLFGLNSGGHLQRAGEAERPSLHQRDGEMGAGRQQNPCPLFLGQPDTVPWTSWPACPPGLVHTLGNVWAGPGDGNLGYQLGPPATPRCPSPEPPVTQRGCCSSYPPTKGGGLGPCGKCQEGLEGGASGASEPSEEVNKASGPRACPPSHHTKLKKTWLTRHSEQFECPRGCPEVEERPVARLRALKRAGSPEVQGAMGSPAPKRPPDPFPGTAEQGAGGWQEVRDTSIGNKDVDSGQHDEQKGPQDGQASLQDPGLQDIPCLALPAKLAQCQSCAQAAGEGGGHACHSQQVRRSPLGGELQQEEDTATNSSSEEGPGSGPDSRLSTGLAKHLLSGLGDRLCRLLRREREALAWAQREGQGPAVTEDSPGIPRCCSRCHHGLFNTHWRCPRCSHRLCVACGRVAGTGRAREKAGFQEQSAEECTQEAGHAACSLMLTQFVSSQALAELSTAMHQVWVKFDIRGHCPCQADARVWAPGDAGQQKESTQKTPPTPQPSCNGDTHRTKSIKEETPDSAETPAEDRAGRGPLPCPSLCELLASTAVKLCLGHERIHMAFAPVTPALPSDDRITNILDSIIAQVVERKIQEKALGPGLRAGPGLRKGLGLPLSPVRPRLPPPGALLWLQEPQPCPRRGFHLFQEHWRQGQPVLVSGIQRTLQGNLWGTEALGALGGQVQALSPLGPPQPSSLGSTTFWEGFSWPELRPKSDEGSVLLLHRALGDEDTSRVENLAASLPLPEYCALHGKLNLASYLPPGLALRPLEPQLWAAYGVSPHRGHLGTKNLCVEVADLVSILVHADTPLPAWHRAQKDFLSGLDGEGLWSPGSQVSTVWHVFRAQDAQRIRRFLQMVCPAGAGALEPGAPGSCYLDAGLRRRLREEWGVSCWTLLQAPGEAVLVPAGAPHQVQGLVSTVSVTQHFLSPETSALSAQLCHQGPSLPPDCHLLYAQMDWAVFQAVKVAVGTLQEAK

SEQ ID NO: 153302 - DNA, 5709 bp, Artificial Sequence
  derived and/or modified sequence
tctcccgggagccactcccctgggcgcctctccagcccctgggctggaagcaccagcaaccctggggatggggcagaccctcacagcccggggtctggagccggtgtcggagctcacatgggcccatgacctctccagacatttggcaaaatcaaggcccttagaccagggacagacccaagcccaggccctcccagaggtcataggacgcaaccctttgtgcccttgggctatggaagaggtttgggaacggctttggggtggaagatggccaaaggagcagcttggccaggtgaggatgaggcagggcagacacaggccagtggggcgtgccatgtgccacagatggagaggaccaggagccagtggcccggcaggcacagcccggttggcgtgggccagagcgcccatcactgacccgtgagaactcgactgcccctgccagctctggcactgccccctcccagccgccccgccctagcaccctggggggcaccccgcccaaccgtggcctggtccggcccctcccgccctttgctccagttcccgggcttggcacctatagtgggggtgccgcccgcctgccaggctccggggccgggcccacgggagggtggggcggctgggaagctggcacgctgccccgggggagcctctgtcggcaggcgcccgggtgccgcgggggggagggggaacaaagggctcattctccccgtgcgcagccggtggcatcgccggggcgttggcggaagcccccggggcccgggagggggccggcccaggcgcggccgccgaatcacgggctcctgtttcccgcagggtgctggaggaggaaaccggcggagcagcttccccactctcagttgcgcgtctggcgatggcgatcagaggtcgtgctgcgctctccgccgcgctctacctccattagccgcgctgcgcggtgctgcgccctcgccggtgcctctctcctgggtcccaggatcggcccccaccatccaggcacgacccccttccccggcccctcggcctttcccccaactcggccatctccgacccggggcgcgtgttccccccggcccggcgccttctctccctccgggggcacccgctccctagccccggcccggccctccccgcggcgcagcacggagtctcggcgtcccatggcgcaacctacggcctcggcccagaagctggtgcggccgatccgcgccgtgtgccgcatcctgcagatcccggagtccgacccctccaacctgcggccctagagcgcccccgccgccccgggggaaggagagcgcgagcgcgctgagcagacagagcgggagaacgcgtcctcgcccgccggccgggaggccccggagctggcccatggggagcaggcgcccggtgccggccacgacgaccgccaccgcccgcgccgcgaccggccggtgaagcccagggacccccctctgggagagccccatgagggcaggagagtgatggagagtacgcccagcttcctgaagggcaccccaacctgggagaagacggccccagagaacggcatcgtgagacaggagcccggcagcccgcctcgagatggactgcaccatgggccgctgtgcctgggagagcctgctcccttttggaggggcgtcctgagcaccccagactcctggcttccccctggcttcccccagggccccaaggacatgctcccacttgtggagggcgagggcccccagaatggggagaggaaggtcaactggctgggcagcaaagagggactgcgctggaaggaggccatgcttacccatccgctggcattctgcgggccagcgtgcccacctcgctgtggccccctgatgcctgagcatagtggtggccatctcaagagtgaccctgtggccttccggccctggcactgccctttccttctggagaccaagatcctggagcgagctcccttctgggtgcccacctgcttgccaccctacctagtgtctggcctgcccccagagcatccatgtgactggcccctgaccccgcacccctgggtatactccgggggccagcccaaagtgccctctgccttcagcttaggcagcaagggcttttactacaaggatccgagcattcccaggttggcaaaggagcccttggcagctgcggaacctgggttgtttggcttaaactctggtgggcacctgcagagagccggggaggccgaacgcccttcactgcaccagagggatggagagatgggagctggccggcagcagaatccttgcccgctcttcctggggcagccagacactgtgccctggacctcctggcccgcttgtcccccaggccttgttcatactcttggcaacgtctgggctgggccaggcgatgggaaccttgggtaccagctggggccaccagcaacaccaaggtgcccctctcctgagccgcctgtcacccagcggggctgctgttcatcctacccacccactaaaggtggggatcttggcccttgtgggaagtgccaggagggcctggaggggggtgccagtggagccagcgaacccagcgaggaagtgaacaaggcctctggccccagggcctgtccccccagccaccacaccaagctgaagaagacatggctcacacggcactcggagcagtttgaatgtccacgcggctgccctgaggtcgaggagaggccggttgctcggctccgggccctcaaaagggcaggcagccccgaggtccagggagcaatgggcagtccagcccccaagcggccaccggaccctttcccaggcactgcagaacagggggctgggggttggcaggaggtgcgggacacatcgatagggaacaaggatgtggactcgggacagcatgatgagcagaaaggaccccaagatggccaggccagtctccaggacccgggacttcaggacataccatgcctggctctccctgcaaaactggctcaatgccaaagttgtgcccaggcagctggagagggaggagggcacgcctgccactctcagcaagtgcggagatcgcctctgggaggggagctgcagcaggaggaagacacagccaccaactccagctctgaggaaggcccagggtccggccctgacagccggctcagcacaggcctcgccaagcacctgctcagtggtttgggggaccgactgtgccgcctgctgcggagggagcgggaggccctggcttgggcccagcgggaaggccaagggccagccgtgacagaggacagcccaggcattccacgctgctgcagccgttgccaccatggactcttcaacacccactggcgatgtccccgctgcagccaccggctgtgtgtggcctgtggtcgtgtggcaggcactgggcgggccagggagaaagcaggctttcaggagcagtccgcggaggagtgcacgcaggaggccgggcacgctgcctgttccctgatgctgacccagtttgtctccagccaggctttggcagagctgagcactgcaatgcaccaggtctgggtcaagtttgatatccgggggcactgcccctgccaagctgatgcccgggtatgggcccccggggatgcaggccagcagaaggaatcaacacagaaaacgcccccaactccacaaccttcctgcaatggcgacacccacaggaccaagagcatcaaagaggagacccccgattccgctgagaccccagcagaggaccgtgctggccgagggcccctgccttgtccttctctctgcgaactgctggcttctaccgcggtcaaactctgcttgggccatgagcgaatacacatggccttcgcccccgtcactccggccctgcccagtgatgaccgcatcaccaacatcctggacagcattatcgcacaggtggtggaacggaagatccaggagaaagccctggggccggggcttcgagctggcccgggtctgcgcaagggcctgggcctgcccctctctccagtgcggccccggctgcctcccccaggggctttgctgtggctgcaggagccccagccttgccctcggcgtggcttccacctcttccaggagcactggaggcagggccagcctgtgttggtgtcagggatccaaaggacattgcagggcaacctgtgggggacagaagctcttggggcacttggaggccaggtgcaggcgctgagccccctcggacctccccagcccagcagcctgggcagcacaacattctgggagggcttctcctggcctgagcttcgcccaaagtcagacgagggctctgtcctcctgctgcaccgagctttgggggatgaggacaccagcagggtggagaacctagctgccagtctgccacttccggagtactgcgccctccatggaaaactcaacctggcttcctacctcccaccgggccttgccctgcgtccactggagccccagctctgggcagcctatggtgtgagcccgcaccggggacacctggggaccaagaacctctgtgtggaggtggccgacctggtcagcatcctggtgcatgccgacacaccactgcctgcctggcaccgggcacagaaagacttcctttcaggcctggacggggaggggctctggtctccgggcagccaggtcagcactgtgtggcacgtgttccgggcacaggacgcccagcgcatccgccgctttctccagatggtgtgcccggccggggcaggcgccctggagcctggcgccccaggcagctgctacctggatgcagggctgcggcggcgcctgcgggaggagtggggcgtgagctgctggaccctgctccaggcccccggagaggccgtgctggtgcctgcaggggctccccaccaggtgcagggcctggtgagcacagtcagcgtcactcagcacttcctctcccctgagacctctgccctctctgctcagctctgccaccagggacccagccttccccctgactgccacctgctttatgcccagatggactgggctgtgttccaagcagtgaaggtggccgtggggacattacaggaggccaaatagagggatgctaggtgtctgggatcggggtggggacaggtagaccaggtgctcagcccaggcacaacttcagcaggggatggcgctaggggacttggggatttctggtcaaccccacaagcaccactctgggcacaagcagggcactctgttcccctcccccttaagccaacaaccacagtgccaccaagctcacacctgtccttctcaggctggcatctcccccaccctgtgccccttttcatggtaccaggcccgcactgggggcaattgacttcctccaatccccactcctccgagacccaggagacaaacagcccttccttggggaaacttgggaatcattctggcttaaacaacacctcctcctgctgctcactcccgctgagcccactctactgccccagctccgtttctaccaccgcatcctcactgggctcactgcaggcatgctgaacaaggggcctccaaccttctgccctcctgccaaaagatctggggagtgtgaggagagggtggcatcaggagctgctcaggcttggcggagggagcggcatgggcgatgtcactcatgcccttcccggtccgcccgcttccctccttcatgatttccattaaagtctgttgttttgaaaaaaaaaaaaaaaaaaaaaaaaaa

SEQ ID NO: 153303 - DNA, 3570 bp, Artificial Sequence
  derived and/or modified sequence
atggagtccacgccctcatttctcaagggcactcccacctgggaaaaaaccgcccccgaaaatggaattgtgcggcaggagcccggcagcccacccagggacggactccaccacggcccactatgcctgggagagcccgctcccttttggcgaggcgtgttgtcaactccagactcttggcttccacccgggttcccacaggggcctaaggatatgctgcctttggtcgagggagaaggccctcagaatggggagaggaaggtgaattggctggggtctaaggagggccttaggtggaaagaagcaatgctgacacatcctctggccttctgtggtcctgcttgtccgccgagatgtggcccactcatgcctgaacatagtgggggccacttaaaaagcgaccccgtggccttccgcccatggcactgcccgtttctgctggagacaaaaatcctagagagagccccattttgggtcccaacctgtctgcccccatatctggtaagcggactgccaccagagcacccctgtgactggcctttgactccacacccctgggtgtattcaggaggacaacctaaggttcctagcgctttttcacttgggagcaaggggttctactacaaggacccctccatccctaggcttgctaaagaaccattggcagctgccgaaccaggactgtttggtctgaattcgggagggcacctccagcgcgcgggggaggcagaaagacccagtctgcatcagcgagacggagagatgggagctggccgccagcaaaatccctgccctctgtttctgggccagcctgataccgttccatggacgagttggcctgcgtgccctccggggctcgtccatactctcggcaacgtttgggccgggccaggagatggaaatctgggttaccagctgggaccgcccgcgacccctagatgcccctcaccagagcctcccgtaactcagcgcggatgttgctcaagctatccgccaaccaaagggggcggactgggaccatgtggcaaatgccaggaaggactcgaggggggtgcctccggggcttcagaaccaagtgaggaagtgaacaaggcgtccggcccacgcgcctgcccaccctcgcaccacactaaactgaaaaaaacatggttgacccggcactcagaacagtttgaatgcccccgtggctgtcctgaagtggaggaaaggcccgtggcgcgtctaagggccctgaaacgcgctggtagtcctgaagtgcagggtgccatggggagtcctgcccccaaaagacctccagacccttttccagggacggccgaacaaggcgctggaggatggcaggaggttagggacacctctatcggaaataaagacgtcgattccgggcagcacgacgagcagaagggccctcaggatgggcaggcctcactacaggatccaggtttgcaggatattccctgcctggccctgcccgccaagttggcccagtgccagtcctgcgcccaggccgcaggtgaggggggaggtcacgcttgccacagccagcaagtacgccgctcacctctgggtggggaactgcaacaggaagaagataccgcgaccaacagcagttccgaggaaggacccgggagtgggcctgacagccgcctgagtactggtctggccaagcacctgctgtccggactcggcgatcgcctttgtcgtctgttgcggcgagagagggaggcgcttgcctgggcccagcgagaaggccagggccctgcagtcactgaagacagtcctggcattcctcgctgttgttcacgatgccatcacgggttatttaacacccactggcgctgcccaaggtgttcacatcggctctgtgttgcttgtggccgagtggccggaacaggccgggcccgcgagaaagctggctttcaagagcagtccgcagaagagtgtacgcaggaagccggacacgccgcttgttccctcatgctgacgcagttcgtgagcagccaggcgctcgcagagttaagcaccgccatgcaccaggtgtgggttaagttcgatatccgggggcattgtccttgccaggcagatgcccgtgtctgggctccaggcgatgcgggccagcaaaaggagtccacccagaagacaccacctactccacagccttcctgcaatggggacacccaccggaccaagtcaataaaggaggaaactcctgactcagctgaaacacccgccgaggaccgggctggaagaggaccactgccttgcccaagcctctgtgaactgctagccagcacagccgttaagttatgtctggggcacgagcggatccatatggccttcgctcctgtgacccctgccttgccttcggatgatcggattacaaacatacttgacagtatcattgcccaagtggtcgagcgaaaaatccaagaaaaagccctcggtccaggactgcgcgcagggccaggactgcggaagggactggggctgcccctatctcctgtacgtccccgcctccccccgcctggcgctcttctgtggcttcaggagccacagccctgcccaagaagaggattccacctattccaagagcactggcgccaaggccagcctgttttggtctcaggtatccaacgtacgctgcaaggcaacctttggggaacagaagccctgggggcccttggtggacaggtccaggctctgagtcccctgggtccacctcaaccctcatcccttggttctacaactttttgggaaggcttctcatggcctgagctccgcccaaagtccgacgagggttcggtgctgctgttacacagggccctgggcgacgaggataccagccgggtggagaaccttgctgcatcattaccactccctgagtattgcgctctgcacggaaagctcaatctagcttcttaccttcctcctggccttgccctgaggcccctcgaaccccagctgtgggcagcctacggcgtcagtccacacaggggccacctcggtactaagaacctttgtgtggaggtggccgatctggtgagtatcctagtccacgccgatactcctctccctgcatggcatagagcacagaaggactttctttcaggccttgatggtgaaggcctgtggtcacctgggagtcaagtgtctactgtttggcatgtgttcagagcccaggacgcccagaggattagacgcttcctgcagatggtgtgccccgctggggccggtgccctggagccaggggccccaggctcatgctacctggatgccggcttaaggcgccgccttagagaggagtggggagtgtcctgttggacattgctacaggcgcctggtgaggccgttctcgtgccagctggtgccccacatcaggtgcaaggcctggttagtacggtcagcgtcactcagcactttttaagccctgagacatcagcacttagtgcgcagctctgtcatcaaggcccttcactgccaccagattgccacctgttatatgcccagatggattgggccgtttttcaagcggtcaaagtagctgttgggacgcttcaagaggccaagtag

SEQ ID NO: 153304 - DNA, 6336 bp, Artificial Sequence
  derived and/or modified sequence
tctcccgggagccactcccatgggcgcctctccagcccctggcctggaagcaccaggaaccctggggatggggcagaccctcacagcccggggtctggagccggtgtcggagctcatctgggcccatgacctctccagacatttggcaaaatcaaggcccttagaccagggacagacccaagcccaggccctcccagaggtcctaggacgcaaccctttgtgcccttgggctctggaagaggtttgggaagggtttggggtggaagatggcaaagagcagcttggccaggtgaggatgaggcagggcagacacaggccagtggggcgtgccatgtgccacagatggagaggaccaggagccagtggcccggcaggcacagcccggttggcgtgggccagagcgcccatcactgacccgtgagaactcgactgcccctgccagctctggcactgccccctcccagccgccccgccctagcaccctggggggcaccccgcccaaccgtggcctggtccggcccctcccgccctttgctccagttcccgggcttggcacctatagtgggggtgccgcccgcctgccaggctccggggccgggcccacgggagggtggggcggctgggaagctggcacgctgccccgggggagcctctctcggcaggcgcccgggtgccgcgggggggagggggaacaaagggctcattctccccgtgcgcagccggtggcatcgccggggcgttggcggaagcccccggggcccgggagggggcaggcccaggcgcggccgccgaatcacgggctcctgtttcccgcagggtgctggaggaggaaaccggcggagcagcttccccactctcagttgcgcttctggcgatggcgatcagaggtcctgctgcgctctccgccgcgctctacctccattagccgcgctgcgcggtgctgcgccctcgccggtgcctctctcctgggtcccaggatcggcccccaccatccaggcacgacccccttccccggcccctcggcctttcccccaactcggccatctccgacccggggcgcgtgttccccccggcccggcgccttctctccctccgggggcacccgctccctagccccggcccggccctccccgcggcgcagcacggagtctcggcgtcccatggcgcaacctacggcctcggcccagaagctggtgcggccgatccgcgccgtgtgccgcatcctgcagatcccggagtccgacccctccaacctgcggccctagagcgcccccgccgccccgggggaaggagagcgcgagcgcgctgagcagacagagcgggagaacgcgtcctcgcccgccggccgggaggccccggagctggcccatggggagcaggcgcccggtgccggccacgacgaccgccaccgcccgcgccgcgaccggccggtgaagcccagggacccccctctgggagagccccatgagggcaggagagtgatggagagtacgcccagcttcctgaagggcaccccaacctgggagaagacggccccagagaacggcatcgtgagacaggagcccggcagcccgcctcgagatggactgcaccatgggccgctgtgcctgggagagcctgctcccttttggaggggcgtcctgagcaccccagactcctggcttccccctggcttcccccagggccccaaggacatgctcccacttgtggagggcgagggcccccagaatggggagaggaaggtcaactggctgggcagcaaagagggactgcgctggaaggaggccatgcttacccatccgctggcattctgcgggccagcgtgcccacctcgctgtggccccctgatgcctgagcatagtggtggccatctcaagagtgaccctgtggccttccggccctggcactgccctttccttctggagaccaagatcctggagcgagctcccttctgggtgcccacctgcttgccaccctacctagtgtctggcctgcccccagagcatccatgtgactggcccctgaccccgcacccctgggtatactccgggggccagcccaaagtgccctctgccttcagcttaggcagcaagggcttttactacaaggatccgagcattcccaggttggcaaaggagcccttggcagctgcggaacctgggttgtttggcttaaactctggtgggcacctgcagagagccggggaggccgaacgcccttcactgcaccagagggatggagagatgggagctggccggcagcagaatccttgcccgctcttcctggggcagccagacactgtgccctggacctcctggcccgcttgtcccccaggccttgttcatactcttggcaacgtctgggctgggccaggcgatgggaaccttgggtaccagctggggccaccagcaacaccaaggtgcccctctcctgagccgcctgtcacccagcggggctgctgttcatcctacccacccactaaaggtgggggtcttggcccttgtgggaagtgccaggagggcctggaggggggtgccagtggagccagcgaacccagcgaggaagtgaacaaggcctctggccccagggcctgtccccccagccaccacaccaagctgaagaagacatggctcacacggcactcggagcagtttgaatgtccacgcggctgccctgaggtcgaggagaggccggttgctcggctccgggccctcaaaagggcaggcagccccgaggtccagggagcaatgggcagtccagcccccaagcggccaccggacccttttccaggcactgcagaacagggggctgggggttggcaggaggtgcgggacacatcgatagggaacaaggatgtggactcgggacagcatgatgagcagaaaggaccccaagatggccaggccagtctccaggacccgggacttcaggacataccatgcctggctctccctgcaaaactggctcaatgccaaagttgtgcccaggcagctggagagggaggagggcacgcctgccactctcagcaagtgcggagatcgcctctgggaggggagctgcagcaggaggaagacacagccaccaactccagctctgaggaaggcccagggtccggccctgacagccggctcagcacaggcctcgccaagcacctgctcagtggtttgggggaccgactgtgccgcctgctgcggagggagcgggaggccctggcttgggcccagcgggaaggccaagggccagccgtgacagaggacagcccaggcattccacgctgctgcagccgttgccaccatggactcttcaacacccactggcgatgtccccgctgcagccaccggctgtgtgtggcctgtggtcgtgtggcaggcactgggcgggccagggagaaagcaggctttcaggagcagtccgcggaggagtgcacgcaggaggccgggcacgctgcctgttccctgatgctgacccagtttgtctccagccaggctttggcagagctgagcactgcaatgcaccaggtctgggtcaagtttgatatccgggggcactgcccctgccaagctgatgcccgggtatgggcccccggggatgcaggccagcagaaggaatcaacacagaaaacgcccccaactccacaaccttcctgcaatggcgacacccacaggaccaagagcatcaaagaggagacccccgattccgctgagaccccagcagaggaccgtgctggccgagggcccctgccttgtccttctctctgcgaactgctggcttctaccgcggtcaaactctgcttgggccatgagcgaatacacatggccttcgcccccgtcactccggccctgcccagtgatgaccgcatcaccaacatcctggacagcattatcgcacaggtggtggaacggaagatccaggagaaagccctggggccggggcttcgagctggcccgggtctgcgcaagggcctgggcctgcccctctctccagtgcggccccggctgcctcccccaggggctttgctgtggctgcaggagccccagccttgccctcggcgtggcttccacctcttccaggagcactggaggcagggccagcctgtgttggtgtcagggatccaaaggacattgcagggcaacctgtgggggacagaagctcttggggcacttggaggccaggtgcaggcgctgagccccctcggacctccccagcccagcagcctgggcagcacaacattctgggagggcttctcctggcctgagcttcgcccaaagtcagacgagggctctgtcctcctgctgcaccgagctttgggggatgaggacaccagcagggtggagaacctagctgccagtctgccacttccggagtactgcgccctccatggaaaactcaacctggcttcctacctcccaccgggccttgccctgcgtccactggagccccagctctgggcagcctatggtgtgagcccgcaccggggacacctggggaccaagaacctctgtgtggaggtggccgacctggtcagcatcctggtgcatgccgacacaccactgcctgcctggcaccgggcacagaaagacttcctttcaggcctggacggggaggggctctggtctccgggcagccaggtcagcactgtgtggcacgtgttccgggcacaggacgcccagcgcatccgccgctttctccagatggtgtgcccggccggggcaggcgccctggagcctggcgccccaggcagctgctacctggatgcagggctgcggcggcgcctgcgggaggagtggggcgtgagctgctggaccctgctccaggcccccggagaggccgtgctggtgcctgcaggggctccccaccaggtgcagggcctggtgagcacagtcagcgtcactcagcacttcctctcccctgagacctctgccctctctgctcagctctgccaccagggacccagccttccccctgactgccacctgctttatgcccagatggactgggctgtgttccaagcagtgaaggtggccgtggggacattacaggaggccaaatagagggatgctaggtgtctgggatcggggtggggacaggtagaccaggtgctcagcccaggcacaacttcagcaggggatggcgctaggggacttggggatttctggtcaaccccacaagcaccactctgggcacaagcagggcactctgttcccctcccccttaagccaacaaccacagtgccaccaagctcacacctgtccttctcaggctggcatctcccccaccctgtgccccttttcatggtaccaggcccgcactgggggcaattgacttcctccaatccccactcctccgagacccaggagacaaacagcccttccttggggaaacttgggaatcattctggcttaaacaacacctcctcctgctgctcactcccgctgagcccactctactgccccagctccgtttctaccaccgcatcctcactgggctcactgcaggcatgctgaacaaggggcctccaaccttctgccctcctgccaaaagatctggggagtgtgaggagagggtggcatcaggagctgctcaggcttggcggagggagcggcatgggcgatgtcactcagccccttcccggtccgcccgcttccctccttcatgatttccattaaagtctgttgttttgtgactgctgccagtgtggttggccctgcccctgcaggccacatggtccagggagggagggggacatggaaatctgccttagagacaaatggagtagggcagcccggagctggggcccaagggacaggacaccactgcctgctcttcgtctggggcctggggccttgcctcccactgaggagactttgggtggggtggggggctgtcccccaaagatgctcctgagtgcaagagcaggcaaggcagagtcctggggcacagccacgaggtgacctccctgtgcagagactcccgagccctactccacccagcaagctccagtccgccccatctctcccgtctaccctgacctggagatccagaagtatggcccagaagagcccttgccccgcctgtctgcccttggtggcagtggccatggccgacgccaggcccagccaccctgggactgagcctgactgcttcagacagccgacccctccttgtccccgctccacgcccgcagcctcctggtggcgctccgccctctcccgcttcctttgtgtatctcagccctacaaagaaaaacactcccactcttgtcatacctaattgttcctgctgtggtttggggaattttttttattaaataaagttttttattataagggtaatata

SEQ ID NO: 153305 - DNA, 3570 bp, Artificial Sequence
  derived and/or modified sequence
atggagagcacccccagcttcctgaagggcacccccacctgggagaagacagccccagaaaatggaattgtgcggcaggagcccggcagccccccaagagatggcctgcaccacggccccctgtgcctgggggagcccgcccccttctggaggggcgtgctgagcaccccagacagctggctgcccccaggcttcccccagggccccaaggacatgctgcccctggtggagggggagggcccccagaatggagagaggaaggtgaactggctgggcagcaaggagggcctgcgctggaaggaggccatgctgacccaccccctggccttctgtggccctgcctgccccccaagatgtggccccctgatgcctgagcacagcggcggccacctgaagagtgaccctgtggccttccggccctggcactgccccttcctgctggagaccaagatcctggagcgggcccccttctgggtgcccacctgcctgcccccctacctggtgtctggcctgcccccagagcacccctgtgactggcccctgaccccccacccctgggtgtacagcggcggccagcccaaggtgcccagcgccttcagcctgggcagcaagggcttctactacaaggaccccagcatcccccggctggccaaggagcccctggccgctgctgagcccggcctgtttggcctgaacagcggcggccacctgcagagagctggggaggccgagcggcccagcctgcaccagagagatggagagatgggcgccggccggcagcagaacccctgccccctcttcctgggccagcctgacacagtgccctggacctcctggccagcctgccccccaggcctggtgcacaccctgggcaatgtgtgggccggccctggagatggcaacctgggctaccagctgggccccccagccaccccccgctgccccagccctgagccccctgtgacccagaggggctgctgcagcagctacccacccaccaagggcggcggcctgggcccctgtgggaagtgccaggagggcctggagggcggggccagcggggccagcgagcccagcgaggaggtgaacaaggccagcggcccccgggcctgcccccccagccaccacaccaagctgaagaagacctggctgaccaggcacagcgagcagtttgagtgcccccggggctgcccagaggtggaggagaggcctgtggcccggctgcgggccctgaagagagctggcagccctgaggtgcagggcgccatgggcagccctgcccccaagaggcccccagaccccttccctggaacagctgagcagggcgccggcggctggcaggaggtgcgggacaccagcatcggcaacaaggatgtggacagcggccagcatgatgagcagaagggcccccaggacggccaggccagcctgcaggaccccggcctgcaggacatcccctgcctggccctgcctgccaagctggcccagtgccagagctgtgcccaggccgccggggagggcggcggccacgcctgccacagccagcaggtgcggcgcagccccctgggcggggagctgcagcaggaggaggacacagccaccaacagcagcagcgaggagggccctggcagcggccctgacagccggctgagcacaggcctggccaagcacctgctgagcggcctgggggaccggctgtgccgcctgctgcggcgggagcgggaggccctggcctgggcccagcgggagggccagggccctgctgtgacagaggacagccctggcatcccccgctgctgcagccgctgccaccacggcctcttcaacacccactggcgctgcccccgctgcagccaccggctgtgtgtggcctgtggccgggtggccggcaccggccgggcccgggagaaggccggcttccaggagcagagcgcagaagaatgtacccaggaggccggccatgctgcctgcagcctgatgctgacccagtttgtgagcagccaggccctggccgagctgagcacagccatgcaccaggtgtgggtgaagtttgacatccggggccactgcccctgccaggctgatgcccgggtgtgggcccctggagatgctggccagcagaaggagagcacccagaagaccccacccaccccccagcccagctgcaatggagacacccacaggaccaagagcatcaaggaggagaccccagattctgctgagaccccagcagaagatcgggccggccggggccccctgccctgccccagcctgtgtgagctgctggccagcacagctgtgaagctgtgcctgggccacgagcgcatccacatggcctttgcccctgtgaccccagccctgcccagtgatgaccgcatcaccaacatcctggacagcatcatcgcccaggtggtggagaggaagatccaggagaaggccctgggccctggcctgcgggccggccctggcctgaggaagggcctgggcctgcccctgagccctgtgcggccccggctgcccccacctggggccctgctgtggctgcaggagccccagccctgcccccggcggggcttccacctgttccaggagcactggaggcagggccagcctgtgctggtgtctggcatccagaggaccctgcagggcaacctgtggggcacagaggccctgggcgccctgggcggccaggtgcaggccctgagccccctgggccccccccagcccagcagcctgggcagcaccaccttctgggagggcttctcctggccagagctgcggcccaagagtgatgagggctctgtgctgctgctgcaccgggccctgggagatgaggacaccagccgggtggagaacctggccgccagcctgcccctgcctgagtactgtgccctgcacggcaagctgaacctggccagctacctgcccccaggcctggccctgcggcccctggagccccagctgtgggccgcctacggcgtgagcccccaccggggccacctgggcaccaagaacctgtgtgtggaggtggccgacctggtgtccatcctggtgcacgccgacacccccctgcctgcctggcaccgggcccagaaggacttcctgagcggcctggatggagagggcctgtggagccctggcagccaggtgtccacagtgtggcacgtgttccgggcccaggatgcccagaggatccgccgcttcctgcagatggtgtgcccagctggagctggggccctggagcccggggcccctggcagctgctacctggatgctggcctgcggcggcggctgcgggaggagtggggcgtgtcctgctggaccctgctgcaggcccctggagaggccgtgctggtgcctgctggggccccccaccaggtgcagggcctggtgtccacagtgtctgtgacccagcacttcctgagccctgagaccagcgccctgagcgcccagctgtgccaccagggccccagcctgcccccagactgccacctgctgtatgcccagatggactgggccgtgttccaggccgtgaaggtggccgtgggcaccctgcaggaggccaagtag

SEQ ID NO: 153306 - DNA, 3570 bp, Artificial Sequence
  derived and/or modified sequence
atggagagcacccccagcttcctgaagggcacccccacctgggagaagaccgcccctgagaacgggatcgttaggcaggagcccgggtccccacccagagacggactgcatcacggaccactctgcttgggcgagcccgctcctttttggcgaggggtgctttccacgccagatagttggctcccccctggtttcccacagggtccgaaggatatgctacccctggtggagggcgagggaccacagaatggggaacggaaggtcaactggctcggcagcaaggagggactcaggtggaaggaggcaatgctcacacatcccctcgccttttgcggccccgcctgtcccccacggtgtggacctcttatgccagaacacagcggcggtcatttgaagagtgacccggtggcatttcggccatggcattgtcctttcctgcttgaaaccaagattctcgaacgcgctccattctgggttcccacctgcctaccaccttatctggtttccggactgccgcccgagcacccttgcgattggcccttaaccccccacccctgggtttactctggtggacagccgaaggttccttcggccttcagcctaggcagtaaaggcttctactacaaggaccccagtatcccacggttagcgaaggaacccctcgctgctgcagagccaggtctattcgggttaaatagtggaggacaccttcaaagggctggggaagcggaaaggcctagcctgcatcagcgcgatggtgaaatgggcgctggccggcagcagaatccatgtccgttattccttggccagcctgatactgttccctggacttcttggccagcttgtcctccaggcctggttcacaccttggggaatgtatgggctggaccgggcgacggaaacctgggctaccaactgggaccccccgcaacgcctcggtgtccgagccctgaacctcctgtgacccagagagggtgctgctctagttatcctccaacaaaaggtggggggttgggcccttgcggcaaatgccaagaaggcctggaagggggggcaagtggagcttccgagccttctgaagaagtaaacaaggcgtcgggcccgagggcctgccccccatctcatcataccaagctgaaaaagacatggttgacgcgccacagcgaacagtttgagtgcccacggggctgtccggaagttgaggaaaggcccgttgcacgcttacgagcactcaagcgagctggatctccggaagtgcagggcgctatgggctcacccgccccaaaacgcccccccgacccttttcctgggacggctgagcagggagccgggggctggcaagaggtccgtgacaccagcattggcaacaaggatgtggattcggggcaacacgacgaacaaaaggggccccaggatgggcaagccagtcttcaagaccccgggctacaggatatcccctgcctcgctttacctgctaagctggcccaatgtcagtcgtgcgcacaggcggctggtgaaggtggcgggcatgcatgtcacagtcagcaggttcgcaggagtccgctggggggcgaacttcaacaggaagaggacaccgccacaaacagtagctctgaagaaggccccggctctgggcctgatagtcgattaagtaccggtcttgcaaaacatttactgtctgggctgggcgacaggttatgtagattgttacgtcgcgagcgcgaagcactggcctgggcccagagggagggtcaggggcccgccgtgacagaggactctcccgggataccccgttgctgcagcaggtgccatcatgggctcttcaacactcattggcgctgcccccgctgcagtcacaggctgtgcgtcgcctgtgggcgggtagcaggtactggccgcgcgagggaaaaggcaggattccaggagcagtccgcggaggaatgtacacaagaggcggggcatgccgcctgttctctaatgctgacacaatttgtgtctagtcaggctcttgccgagctgagcaccgcaatgcaccaggtgtgggtgaagtttgacatcagaggacattgcccatgtcaagctgacgctcgcgtatgggccccaggggatgccggtcagcaaaaagagtcaacgcagaagaccccccctacccctcagccaagctgtaacggtgacactcatagaacaaagtccattaaagaagagacccccgacagcgccgaaactccggctgaagaccgggctggccgaggtccccttccatgcccatccctatgtgagctgcttgcctcaacggcagtgaagctgtgcctggggcacgaacgcattcatatggctttcgcccccgtgacacccgcactccccagcgatgatcggatcaccaatattctcgatagtattattgcgcaggtagtcgaaaggaagatacaggaaaaggcacttgggccaggactccgtgccggccccggacttcgtaaaggactcggcctgcctctatcgcccgtgaggccacgactgcccccccccggcgctctgctctggctgcaggaacctcaaccatgtcctaggcgggggttccatctctttcaggagcattggaggcagggacaaccagtgctggtttcggggattcagcggaccctgcaagggaacttgtgggggactgaagctctgggggcattgggaggccaagtccaagccctctctcctctgggccccccacagcctagctccctcggttccactaccttttgggagggtttcagttggccagaactgcgacccaagagtgatgaaggctcagtgttactgctgcatcgtgcgctgggagacgaggatacctctagggtggaaaatctggcagcatctcttccgctgcccgagtactgcgctctacatggcaagctgaatctggcgtcttacttaccacctggccttgcgctgagacctctggaaccacaactgtgggccgcttatggagtgtcgccacaccgaggacatctgggaacaaagaatctgtgtgttgaagtggctgatcttgtctccatactggttcatgctgacactccacttcctgcctggcatagggcacagaaggacttcctctccggcctggacggggaaggcctctggtcacccggttcgcaggtgagcaccgtgtggcatgtgtttcgggcccaggacgcccagaggatccggcgattcctacaaatggtttgccccgccggggccggtgcccttgaaccgggcgcccctggatcttgttacttggatgcaggactccgcagacgcctccgggaagagtggggagtttcttgttggacgctgttgcaggcgcccggggaagccgtgctcgtgcccgctggcgcaccacatcaggtccaaggtctggtgtcgacagtcagcgtgactcagcatttcttgagtccagagactagtgccttgtccgctcagctgtgtcatcagggaccaagtctgcctccggattgtcacctgctgtacgcccaaatggactgggccgtgttccaagccgttaaagtggccgtcgggacccttcaggaggctaaatag

SEQ ID NO: 153307 - DNA, 3570 bp, Artificial Sequence
  derived and/or modified sequence
atggaatctactcctagctttcttaaagggactcctacatgggagaagaccgcgcctgaaaacggaatcgtgaggcaggaacccggttccccccctagggatgggctccatcacggacccctttgcctgggcgaacccgctccattctggcggggtgttctatcaacccccgatagttggctccctccaggcttcccacaggggccaaaggacatgctgcccctggtggaaggcgagggtcctcagaacggagaacggaaagtgaactggttgggttcaaaggaagggcttaggtggaaggaagcgatgttgactcacccgttggccttttgcggccctgcatgcccaccgaggtgcggacccctgatgcccgaacatagcggagggcatctgaaaagtgacccagtggcattcagaccttggcattgcccgtttttactggagacaaagatcctggaaagagctccattttgggtgcccacttgtctgcccccttatctggtgagcggattaccacctgagcatccctgtgactggccactcactcctcacccatgggtgtacagtggtggacagccaaaggtcccgagcgcgttcagtctgggaagcaaggggttttactataaagatccttccatccccagactcgcgaaagagcctttggctgccgctgaacctgggctctttgggcttaacagtgggggtcacctccagcgggctggggaagccgaacggccatctctacatcagcgtgacggcgagatgggggcaggcagacaacaaaatccttgtcctttattccttgggcagccagacacagtcccatggacctcctggcctgcgtgtcccccagggcttgttcacaccctcgggaatgtgtgggcagggcctggcgacggtaacttgggctaccagctgggacctcctgcgacacccagatgtcccagccccgaacccccagtaactcaaaggggatgttgcagtagctatcccccaacaaagggtggaggtcttggaccgtgtggcaagtgtcaagaagggctggagggaggggcttctggggcttcggagccctcagaagaagtgaacaaagcaagcgggcctagagcctgcccgccaagccatcacaccaagctgaagaaaacctggctaacacgccattcagagcagttcgaatgccctcgcggttgccccgaggttgaggagcgtcctgttgcaaggctcagagcactgaaacgcgctggctcacccgaagtgcagggcgctatgggctctcctgcaccaaagagacctcctgaccctttccctggaaccgccgagcaaggagcgggagggtggcaggaagtccgcgacacatccattgggaataaagacgtcgattccggccagcacgacgagcagaaggggccacaggacgggcaggcaagtttacaagatccaggactccaggacataccgtgtttagcgctgcctgctaagctcgctcagtgtcagagctgtgcacaggctgccggagagggaggaggacacgcatgccattcgcagcaggtacgaagatcccctcttggaggcgaactgcagcaggaggaagacactgctactaattcatctagcgaggagggacctgggtcaggtcctgatagtcgcctctccacggggctggccaaacacctacttagcggactgggtgatcggctttgtagattgctccggagggagcgagaagccctcgcttgggctcaaagagaggggcagggcccagccgtaactgaagactcccccggaattccgaggtgctgctcgagatgccaccacggcctttttaatacgcattggagatgtcctcgctgcagccacagactctgtgtggcttgtggcagggtggctggcactggtagggcacgcgagaaagcaggcttccaagagcaatccgccgaggagtgcacacaggaggccggacacgcggcatgctccctgatgctgacacagttcgtgtcgtcccaagctctcgctgagctaagcacagccatgcatcaggtgtgggtcaagtttgacatcaggggccattgtccatgtcaggccgatgcgagggtttgggcacccggtgatgctggccagcagaaggaatcaacgcaaaagacccctccgactccccagccaagctgcaatggagatacccacagaacgaaatctataaaggaggagacacccgacagcgctgaaactcctgcagaggaccgcgctggccgagggcctttaccctgtccgtctctgtgcgaactgttagccagcacggccgtcaagctctgcctgggacatgaaaggatacacatggcattcgcccctgtaacaccagcgctgccgagtgatgataggattaccaatatcttagattccatcattgctcaggtggtagagcggaaaatccaggaaaaagctctgggccctggcctaagggccggtcctggcttgagaaagggcctgggattacctctctctcctgtgcggccaagacttccgccacctggagccctcctatggctgcaagagccgcagccttgcccccgtagaggcttccatctgttccaggaacattggaggcaggggcaacccgtcctggtgtctggtattcagagaaccctccaggggaatctatggggaacagaagccctgggcgctctcgggggacaggtccaggctctatctccactgggccctcctcagcctagtagcttgggcagcactacattctgggaggggttttcctggcctgaactgagacctaaatctgatgagggcagtgtgcttctcctccacagggcactgggcgatgaggatacttccagagttgaaaatctggctgccagccttccacttccagaatactgcgctcttcacggcaagctgaacctcgcctcctatctcccgccagggcttgccctgcgcccactggaacctcaactgtgggccgcttacggcgtgtcacctcaccgaggccacctaggcaccaagaacctctgcgtggaggttgcggaccttgtgtcaattctcgtacacgcagatacccccctcccagcctggcaccgggctcagaaggatttcctctctgggctggacggggagggcctgtggagccctggttcacaggtcagcacagtgtggcacgtcttcagggctcaagatgcacaaaggatccggagattccttcagatggtgtgtcctgcaggtgcaggtgcactggaacctggggcaccaggcagctgctacttagacgcaggcctgcgcaggcgtctacgcgaagagtggggggtctcctgctggacgctgctccaggccccaggggaggcagtcctcgtgccagctggcgcacctcatcaagtgcaaggcttggtttccactgtcagcgtgactcagcactttctgtcaccggagactagcgccctgtcagcgcaattgtgccatcagggcccatcacttcccccagactgtcatctgctgtacgcacagatggattgggccgtgttccaagccgtgaaggtcgccgtcgggacgctgcaggaagctaaatag

SEQ ID NO: 153308 - DNA, 3570 bp, Artificial Sequence
  derived and/or modified sequence
atggagagcacccccagcttcctgaagggcacccccacctgggagaagaccgcccccgagaacggcatcgtgagacaggagcccggcagcccccccagagacggcctgcaccacggccccctgtgcctgggcgagcccgcccccttctggagaggcgtgctgagcacccccgacagctggctgccccccggcttcccccagggccccaaggacatgctgcccctggtggagggcgagggcccccagaacggcgagagaaaggtgaactggctgggcagcaaggagggcctgagatggaaggaggccatgctgacccaccccctggccttctgcggccccgcctgcccccccagatgcggccccctgatgcccgagcacagcggcggccacctgaagagcgaccccgtggccttcagaccctggcactgccccttcctgctggagaccaagatcctggagagagcccccttctgggtgcccacctgcctgcccccctacctggtgagcggcctgccccccgagcacccctgcgactggcccctgaccccccacccctgggtgtacagcggcggccagcccaaggtgcccagcgccttcagcctgggcagcaagggcttctactacaaggaccccagcatccccagactggccaaggagcccctggccgccgccgagcccggcctgttcggcctgaacagcggcggccacctgcagagagccggcgaggccgagagacccagcctgcaccagagagacggcgagatgggcgccggcagacagcagaacccctgccccctgttcctgggccagcccgacaccgtgccctggaccagctggcccgcctgcccccccggcctggtgcacaccctgggcaacgtgtgggccggccccggcgacggcaacctgggctaccagctgggcccccccgccacccccagatgccccagccccgagccccccgtgacccagagaggctgctgcagcagctacccccccaccaagggcggcggcctgggcccctgcggcaagtgccaggagggcctggagggcggcgccagcggcgccagcgagcccagcgaggaggtgaacaaggccagcggccccagagcctgcccccccagccaccacaccaagctgaagaagacctggctgaccagacacagcgagcagttcgagtgccccagaggctgccccgaggtggaggagagacccgtggccagactgagagccctgaagagagccggcagccccgaggtgcagggcgccatgggcagccccgcccccaagagaccccccgaccccttccccggcaccgccgagcagggcgccggcggctggcaggaggtgagagacaccagcatcggcaacaaggacgtggacagcggccagcacgacgagcagaagggcccccaggacggccaggccagcctgcaggaccccggcctgcaggacatcccctgcctggccctgcccgccaagctggcccagtgccagagctgcgcccaggccgccggcgagggcggcggccacgcctgccacagccagcaggtgagaagaagccccctgggcggcgagctgcagcaggaggaggacaccgccaccaacagcagcagcgaggagggccccggcagcggccccgacagcagactgagcaccggcctggccaagcacctgctgagcggcctgggcgacagactgtgcagactgctgagaagagagagagaggccctggcctgggcccagagagagggccagggccccgccgtgaccgaggacagccccggcatccccagatgctgcagcagatgccaccacggcctgttcaacacccactggagatgccccagatgcagccacagactgtgcgtggcctgcggcagagtggccggcaccggcagagccagagagaaggccggcttccaggagcagagcgccgaggagtgcacccaggaggccggccacgccgcctgcagcctgatgctgacccagttcgtgagcagccaggccctggccgagctgagcaccgccatgcaccaggtgtgggtgaagttcgacatcagaggccactgcccctgccaggccgacgccagagtgtgggcccccggcgacgccggccagcagaaggagagcacccagaagaccccccccaccccccagcccagctgcaacggcgacacccacagaaccaagagcatcaaggaggagacccccgacagcgccgagacccccgccgaggacagagccggcagaggccccctgccctgccccagcctgtgcgagctgctggccagcaccgccgtgaagctgtgcctgggccacgagagaatccacatggccttcgcccccgtgacccccgccctgcccagcgacgacagaatcaccaacatcctggacagcatcatcgcccaggtggtggagagaaagatccaggagaaggccctgggccccggcctgagagccggccccggcctgagaaagggcctgggcctgcccctgagccccgtgagacccagactgcccccccccggcgccctgctgtggctgcaggagccccagccctgccccagaagaggcttccacctgttccaggagcactggagacagggccagcccgtgctggtgagcggcatccagagaaccctgcagggcaacctgtggggcaccgaggccctgggcgccctgggcggccaggtgcaggccctgagccccctgggccccccccagcccagcagcctgggcagcaccaccttctgggagggcttcagctggcccgagctgagacccaagagcgacgagggcagcgtgctgctgctgcacagagccctgggcgacgaggacaccagcagagtggagaacctggccgccagcctgcccctgcccgagtactgcgccctgcacggcaagctgaacctggccagctacctgccccccggcctggccctgagacccctggagccccagctgtgggccgcctacggcgtgagcccccacagaggccacctgggcaccaagaacctgtgcgtggaggtggccgacctggtgagcatcctggtgcacgccgacacccccctgcccgcctggcacagagcccagaaggacttcctgagcggcctggacggcgagggcctgtggagccccggcagccaggtgagcaccgtgtggcacgtgttcagagcccaggacgcccagagaatcagaagattcctgcagatggtgtgccccgccggcgccggcgccctggagcccggcgcccccggcagctgctacctggacgccggcctgagaagaagactgagagaggagtggggcgtgagctgctggaccctgctgcaggcccccggcgaggccgtgctggtgcccgccggcgccccccaccaggtgcagggcctggtgagcaccgtgagcgtgacccagcacttcctgagccccgagaccagcgccctgagcgcccagctgtgccaccagggccccagcctgccccccgactgccacctgctgtacgcccagatggactgggccgtgttccaggccgtgaaggtggccgtgggcaccctgcaggaggccaagtag

SEQ ID NO: 153309 - protein, 800 aa, Artificial Sequence
  derived and/or modified sequence
MGSSKKHRGEKEAAGTTAAAGTGGATEQPPRHREHKKHKHRSGGSGGSGGERRKRSRERGGERGSGRRGAEAEARSSTHGRERSQAEPSERRVKREKRDDGYEAAASSKTSSGDASSLSIEETNKLRAKLGLKPLEVNAIKKEAGTKEEPVTADVINPMALRQREELREKLAAAKEKRLLNQKLGKIKTLGEDDPWLDDTAAWIERSRQLQKEKDLAEKRAKLLEEMDQEFGVSTLVEEEFGQRRQDLYSARDLQGLTVEHAIDSFREGETMILTLKDKGVLQEEEDVLVNVNLVDKERAEKNVELRKKKPDYLPYAEDESVDDLAQQKPRSILSKYDEELEGERPHSFRLEQGGTADGLRERELEEIRAKLRLQAQSLSTVGPRLASEYLTPEEMVTFKKTKRRVKKIRKKEKEVVVRADDLLPLGDQTQDGDFGSRLRGRGRRRVSEVEEEKEPVPQPLPSDDTRVENMDISDEEEGGAPPPGSPQVLEEDEAELELQKQLEKGRRLRQLQQLQQLRDSGEKVVEIVKKLESRQRGWEEDEDPERKGAIVFNATSEFCRTLGEIPTYGLAGNREEQEELMDFERDEERSANGGSESDGEENIGWSTVNLDEEKQQQDFSASSTTILDEEPIVNRGLAAALLLCQNKGLLETTVQKVARVKAPNKSLPSAVYCIEDKMAIDDKYSRREEYRGFTQDFKEKDGYKPDVKIEYVDETGRKLTPKEAFRQLSHRFHGKGSGKMKTERRMKKLDEEALLKKMSSSDTPLGTVALLQEKQKAQKTPYIVLSGSGKSMNANTITK

SEQ ID NO: 153310 - protein, 642 aa, Artificial Sequence
  derived and/or modified sequence
MALRQREELREKLAAAKEKRLLNQKLGKIKTLGEDDPWLDDTAAWIERSRQLQKEKDLAEKRAKLLEEMDQEFGVSTLVEEEFGQRRQDLYSARDLQGLTVEHAIDSFREGETMILTLKDKGVLQEEEDVLVNVNLVDKERAEKNVELRKKKPDYLPYAEDESVDDLAQQKPRSILSKYDEELEGERPHSFRLEQGGTADGLRERELEEIRAKLRLQAQSLSTVGPRLASEYLTPEEMVTFKKTKRRVKKIRKKEKEVVVRADDLLPLGDQTQDGDFGSRLRGRGRRRVSEVEEEKEPVPQPLPSDDTRVENMDISDEEEGGAPPPGSPQVLEEDEAELELQKQLEKGRRLRQLQQLQQLRDSGEKVVEIVKKLESRQRGWEEDEDPERKGAIVFNATSEFCRTLGEIPTYGLAGNREEQEELMDFERDEERSANGGSESDGEENIGWSTVNLDEEKQQQDFSASSTTILDEEPIVNRGLAAALLLCQNKGLLETTVQKVARVKAPNKSLPSAVYCIEDKMAIDDKYSRREEYRGFTQDFKEKDGYKPDVKIEYVDETGRKLTPKEAFRQLSHRFHGKGSGKMKTERRMKKLDEEALLKKMSSSDTPLGTVALLQEKQKAQKTPYIVLSGSGKSMNANTITK

SEQ ID NO: 153311 - DNA, 2403 bp, Artificial Sequence
  derived and/or modified sequence
atgggcagcagcaagaagcacagaggcgagaaggaggccgccggcaccaccgccgccgccggcaccggcggcgccaccgagcagccccccagacacagagagcacaagaagcacaagcacagaagcggcggcagcggcggcagcggcggcgagagaagaaagagaagcagagagagaggcggcgagagaggcagcggcagaagaggcgccgaggccgaggccagaagcagcacccacggcagagagagaagccaggccgagcccagcgagagaagagtgaagagagagaagagagacgacggctacgaggccgccgccagcagcaagaccagcagcggcgacgccagcagcctgagcatcgaggagaccaacaagctgagagccaagctgggcctgaagcccctggaggtgaacgccatcaagaaggaggccggcaccaaggaggagcccgtgaccgccgacgtgatcaaccccatggccctgagacagagagaggagctgagagagaagctggccgccgccaaggagaagagactgctgaaccagaagctgggcaagatcaagaccctgggcgaggacgacccctggctggacgacaccgccgcctggatcgagagaagcagacagctgcagaaggagaaggacctggccgagaagagagccaagctgctggaggagatggaccaggagttcggcgtgagcaccctggtggaggaggagttcggccagagaagacaggacctgtacagcgccagagacctgcagggcctgaccgtggagcacgccatcgacagcttcagagagggcgagaccatgatcctgaccctgaaggacaagggcgtgctgcaggaggaggaggacgtgctggtgaacgtgaacctggtggacaaggagagagccgagaagaacgtggagctgagaaagaagaagcccgactacctgccctacgccgaggacgagagcgtggacgacctggcccagcagaagcccagaagcatcctgagcaagtacgacgaggagctggagggcgagagaccccacagcttcagactggagcagggcggcaccgccgacggcctgagagagagagagctggaggagatcagagccaagctgagactgcaggcccagagcctgagcaccgtgggccccagactggccagcgagtacctgacccccgaggagatggtgaccttcaagaagaccaagagaagagtgaagaagatcagaaagaaggagaaggaggtggtggtgagagccgacgacctgctgcccctgggcgaccagacccaggacggcgacttcggcagcagactgagaggcagaggcagaagaagagtgagcgaggtggaggaggagaaggagcccgtgccccagcccctgcccagcgacgacaccagagtggagaacatggacatcagcgacgaggaggagggcggcgcccccccccccggcagcccccaggtgctggaggaggacgaggccgagctggagctgcagaagcagctggagaagggcagaagactgagacagctgcagcagctgcagcagctgagagacagcggcgagaaggtggtggagatcgtgaagaagctggagagcagacagagaggctgggaggaggacgaggaccccgagagaaagggcgccatcgtgttcaacgccaccagcgagttctgcagaaccctgggcgagatccccacctacggcctggccggcaacagagaggagcaggaggagctgatggacttcgagagagacgaggagagaagcgccaacggcggcagcgagagcgacggcgaggagaacatcggctggagcaccgtgaacctggacgaggagaagcagcagcaggacttcagcgccagcagcaccaccatcctggacgaggagcccatcgtgaacagaggcctggccgccgccctgctgctgtgccagaacaagggcctgctggagaccaccgtgcagaaggtggccagagtgaaggcccccaacaagagcctgcccagcgccgtgtactgcatcgaggacaagatggccatcgacgacaagtacagcagaagagaggagtacagaggcttcacccaggacttcaaggagaaggacggctacaagcccgacgtgaagatcgagtacgtggacgagaccggcagaaagctgacccccaaggaggccttcagacagctgagccacagattccacggcaagggcagcggcaagatgaagaccgagagaagaatgaagaagctggacgaggaggccctgctgaagaagatgagcagcagcgacacccccctgggcaccgtggccctgctgcaggagaagcagaaggcccagaagaccccctacatcgtgctgagcggcagcggcaagagcatgaacgccaacaccatcaccaagtag

SEQ ID NO: 153312 - DNA, 1929 bp, Artificial Sequence
  derived and/or modified sequence
atggccctgagacagagagaggagctgagagagaagctggccgccgccaaggagaagagactgctgaaccagaagctgggcaagatcaagaccctgggcgaggacgacccctggctggacgacaccgccgcctggatcgagagaagcagacagctgcagaaggagaaggacctggccgagaagagagccaagctgctggaggagatggaccaggagttcggcgtgagcaccctggtggaggaggagttcggccagagaagacaggacctgtacagcgccagagacctgcagggcctgaccgtggagcacgccatcgacagcttcagagagggcgagaccatgatcctgaccctgaaggacaagggcgtgctgcaggaggaggaggacgtgctggtgaacgtgaacctggtggacaaggagagagccgagaagaacgtggagctgagaaagaagaagcccgactacctgccctacgccgaggacgagagcgtggacgacctggcccagcagaagcccagaagcatcctgagcaagtacgacgaggagctggagggcgagagaccccacagcttcagactggagcagggcggcaccgccgacggcctgagagagagagagctggaggagatcagagccaagctgagactgcaggcccagagcctgagcaccgtgggccccagactggccagcgagtacctgacccccgaggagatggtgaccttcaagaagaccaagagaagagtgaagaagatcagaaagaaggagaaggaggtggtggtgagagccgacgacctgctgcccctgggcgaccagacccaggacggcgacttcggcagcagactgagaggcagaggcagaagaagagtgagcgaggtggaggaggagaaggagcccgtgccccagcccctgcccagcgacgacaccagagtggagaacatggacatcagcgacgaggaggagggcggcgcccccccccccggcagcccccaggtgctggaggaggacgaggccgagctggagctgcagaagcagctggagaagggcagaagactgagacagctgcagcagctgcagcagctgagagacagcggcgagaaggtggtggagatcgtgaagaagctggagagcagacagagaggctgggaggaggacgaggaccccgagagaaagggcgccatcgtgttcaacgccaccagcgagttctgcagaaccctgggcgagatccccacctacggcctggccggcaacagagaggagcaggaggagctgatggacttcgagagagacgaggagagaagcgccaacggcggcagcgagagcgacggcgaggagaacatcggctggagcaccgtgaacctggacgaggagaagcagcagcaggacttcagcgccagcagcaccaccatcctggacgaggagcccatcgtgaacagaggcctggccgccgccctgctgctgtgccagaacaagggcctgctggagaccaccgtgcagaaggtggccagagtgaaggcccccaacaagagcctgcccagcgccgtgtactgcatcgaggacaagatggccatcgacgacaagtacagcagaagagaggagtacagaggcttcacccaggacttcaaggagaaggacggctacaagcccgacgtgaagatcgagtacgtggacgagaccggcagaaagctgacccccaaggaggccttcagacagctgagccacagattccacggcaagggcagcggcaagatgaagaccgagagaagaatgaagaagctggacgaggaggccctgctgaagaagatgagcagcagcgacacccccctgggcaccgtggccctgctgcaggagaagcagaaggcccagaagaccccctacatcgtgctgagcggcagcggcaagagcatgaacgccaacaccatcaccaagtag

SEQ ID NO: 153313 - DNA, 2403 bp, Artificial Sequence
  derived and/or modified sequence
atgggctccagcaagaagcatcgcggcgaaaaagaagcagctgggaccaccgctgctgcagggaccggtggggctaccgaacagcctccccgccacagagagcataaaaagcacaaacacaggtccggcgggagcggaggtagcggtggtgagcgcagaaaaagatcacgcgaacggggtggtgagcgcgggagcggccggcggggggcagaggcggaggcacggtcatcaacacacggcagagagcgctcccaagctgaaccttccgagagaagggtaaaacgagaaaagagagatgacggatacgaagctgctgccagtagtaagacctcttcaggagacgcctcttccctgagtatcgaggagaccaacaagcttagggcaaagcttggtctcaagcccctagaggtaaacgctataaagaaggaagcaggaaccaaggaggagcccgttacagccgatgttattaatccgatggccctgcgccagagagaagaactgagggaaaaactggccgcagccaaggaaaaaaggctgttgaaccagaagctgggcaaaataaagaccctgggcgaagacgatccatggttggatgacaccgccgcttggatcgaaagaagtcgccagctgcagaaggagaaggatcttgctgagaaaagggcaaagcttctcgaggagatggaccaggagttcggagtgagcacactcgtagaggaggagtttgggcaaagacgccaggatctttactcggctagagacctacagggactgaccgtagaacatgccattgattcatttagagagggtgagacaatgattcttactttaaaggataaaggggtgctgcaggaggaagaagacgtcttggtgaatgtcaacctggtggataaggagagagcggaaaagaatgtggaattgcgaaaaaagaagcctgactacttgccgtatgcagaggatgaatcagtagatgacttagctcaacaaaagcctcgcagcatcctcagcaagtacgatgaggaactggagggagaacgacctcactcctttcgccttgaacaagggggaactgctgatggcctgcgggaacgtgaattagaggagataagagccaaactccgcttgcaggcacagagtctgtccactgtgggccctaggttagcttctgagtatctgactcctgaggagatggtgacttttaagaaaactaagcggcgagtgaagaagatcaggaaaaaggaaaaagaggtggtggtgagggctgatgatcttcttcccttgggcgatcagacacaggatggcgactttgggagtcgactgagaggccgaggcaggagacgggtcagtgaggtggaagaggaaaaagaaccagtcccccagcctctgcctagtgacgatactagagttgaaaacatggacatcagtgatgaagaggaaggaggcgctcccccacctggttccccccaagtccttgaggaggacgaggccgaattggagctgcagaagcagctggagaaaggacgccgtctgaggcagctgcagcaactgcaacagctaagggacagcggcgaaaaagtagtggagatcgtgaagaagcttgaatctcggcagcggggctgggaagaggacgaggatcccgaacgcaagggggcgattgtgttcaacgccacctcagaattttgccgtacgctcggggagattcccacctacggtctggctgggaaccgggaagagcaagaggagctgatggactttgaacgagatgaggagagatcagccaacggcggttctgagtctgacggggaggagaacatcgggtggtcaactgtcaacctcgacgaagagaagcagcaacaggacttctccgcttccagtaccactatcttggatgaggaaccaatcgtgaacagaggcctggccgcggctttgcttctctgtcaaaacaaaggacttctggagaccacagtacagaaagttgctcgggtgaaggctcctaacaagtccctgcctagcgcagtgtactgtatcgaggataagatggctatcgacgataaatatagccgacgcgaggaatatcgaggattcacccaggatttcaaggagaaggacggttataagcccgacgtgaaaatagaatacgttgacgagacaggccggaaactgacacctaaagaagcctttagacagctgagccaccgtttccatggaaaagggtcaggaaaaatgaagacggaacggcgtatgaaaaagctggatgaggaggctctcctcaaaaagatgtcctcatctgatacacctctgggcacggtagccctcctgcaagaaaaacaaaaagctcagaagacaccatacatcgtcctgtccggatctggtaaatcaatgaacgcaaatacaataactaaatag

SEQ ID NO: 153314 - DNA, 1929 bp, Artificial Sequence
  derived and/or modified sequence
atggccttacgccagcgcgaggaattgcgcgaaaagttggccgctgctaaggaaaagaggcttttgaaccagaaacttggtaagatcaagacactaggtgaggacgacccctggcttgacgacaccgcggcctggatagaacgatctaggcagctgcagaaagagaaggacctggcggagaagagggcaaagttacttgaagagatggaccaggagtttggtgtatccaccttggttgaagaagagttcggtcagagaagacaggatctatactccgctcgcgaccttcagggactgactgtcgagcacgccattgatagttttcgggagggtgaaactatgatcctgactctaaaagataaaggtgtgcttcaggaggaggaagatgtcctggttaacgttaacctcgtcgacaaggaacgtgccgaaaagaacgtggagttacggaaaaagaagcctgactacttgccatacgcggaggatgagagcgtggacgacctggctcaacagaagcccaggagcatcctcagcaaatacgatgaagaactggagggagagcggccacattcttttagactggagcagggcggaacagccgatggtctaagagaaagggaattggaagaaatcagggccaagctgcgtctgcaggcacagagcctgtcaactgtaggcccaagactagccagtgagtacctaacaccagaggagatggtcacttttaagaagacaaagaggcgagtcaagaaaatccgcaagaaagagaaagaggtggtggtgagagccgacgatctcctgcccctgggcgatcagacacaggacggggacttcggttccagactccgcgggcgcggacgtaggcgcgtttcggaagtggaggaggaaaaagagccagtgcctcagccactgccaagcgatgacactagggttgagaatatggacatttctgacgaggaagagggaggcgctccccctccaggcagccctcaggtccttgaagaggacgaggcggagcttgaactgcagaaacagctcgagaaaggacgccggctgcgccaattgcagcagctccagcaactgcgcgactccggagagaaggtggtcgaaatcgtgaaaaagctcgaatcaaggcagagggggtgggaggaagacgaggatccggaaagaaaaggagccatcgtgtttaacgcaacgtccgagttttgtaggaccctgggggagataccgacctacggattggccgggaaccgcgaggagcaagaagagctgatggacttcgagagggacgaggaaagatccgccaacggcggctcggagagtgacggagaggagaacatagggtggagcacagtcaaccttgacgaggagaagcagcagcaggatttcagcgccagctcaacgacaatcctggacgaagagccaatcgttaacagaggactggctgccgctctcttactgtgccagaacaaagggctcctcgagaccactgtgcagaaagttgcaagggtcaaggcaccaaataagtctctgccttcagctgtgtactgtattgaggacaaaatggccatcgatgacaagtactcaagaagggaagagtacagaggattcacacaggatttcaaggaaaaggatggttataaaccagatgtcaagatcgagtacgtagacgagacaggaagaaaattgaccccaaaagaggcttttagacaattatcccataggttccatggtaagggctccggaaagatgaagactgaacgccggatgaaaaaactagacgaggaggccctgctgaagaagatgagcagttcagatacacctctggggaccgtggccttgttgcaggaaaagcaaaaagcccaaaaaaccccatatattgtgttgagtggctcagggaagagcatgaacgcaaatactatcacgaaatag

SEQ ID NO: 153315 - DNA, 2403 bp, Artificial Sequence
  derived and/or modified sequence
atgggcagcagcaagaagcacagaggagagaaggaggccgccggcaccacagctgctgctggcaccggcggggccacagagcagcccccaagacaccgggagcacaagaagcacaagcacaggtctgggggcagcggcggcagcggcggggagaggaggaagaggagccgggagcggggcggggagcggggcagcggcagaagaggagctgaggccgaggcccggagcagcacccacggccgggagaggagccaggccgagcccagcgagaggagagtgaagcgggagaagagagatgatggctatgaggccgccgccagcagcaagaccagcagtggagatgccagcagcctgagcattgaggagaccaacaagctgcgggccaagctgggcctgaagcccctggaggtgaatgccatcaagaaggaggccggcaccaaggaggagcctgtgacagcagatgtgatcaaccccatggccctgcggcagcgggaggagctgcgggagaagctggccgccgccaaggagaagaggctgctgaaccagaagctgggcaagatcaagaccctgggggaggatgacccctggctggatgacacagctgcctggattgaaagaagccggcagctgcagaaggagaaggacctggccgagaagagggccaagctgctggaggagatggaccaggagtttggagtgtccaccctggtggaggaggagtttggccagaggcggcaggacctgtacagcgcccgggacctgcagggcctgactgtggagcacgccatcgacagcttccgggagggggagaccatgatcctgaccctgaaggacaagggcgtgctgcaggaggaggaggatgtgctggtgaatgtgaacctggtggacaaggagcgggcagagaagaatgtggagctgaggaagaagaagccagactacctgccctatgcagaagatgaatctgtggatgacctggcccagcagaagcccaggagcatcctgagcaaatatgatgaggagctggagggggagcggccccacagcttccggctggagcagggcggcacagcagatggcctgcgggagcgggagctggaggagatccgggccaagctgcggctgcaggcccagagcctgagcacagtgggcccccggctggccagcgagtacctgaccccagaggagatggtgaccttcaagaagaccaagagaagagtgaagaagatcaggaagaaggagaaggaggtggtggtgcgggcagatgacctgctgcccctgggggaccagacccaggatggagactttggcagccggctgcggggccggggcagaagaagagtgtctgaggtggaggaggagaaggagcctgtgccccagcccctgcccagtgatgacaccagggtggagaacatggacatcagtgatgaggaggagggcggggcccctcctcctggcagcccccaggtgctggaggaggatgaagctgagctggagctgcagaagcagctggagaagggccgccgcctgcggcagctgcagcagctgcagcagctgcgggacagcggggagaaggtggtggagatcgtgaagaagctggagagccggcagaggggctgggaggaggatgaagatcctgagaggaagggggccatcgtgttcaatgccaccagcgagttctgcaggaccctgggggagatccccacctacggcctggccggcaaccgggaggagcaggaggagctgatggactttgaaagagatgaggagaggtctgccaatggaggcagcgagagtgatggagaggagaacatcggctggagcacagtgaacctggatgaggagaagcagcagcaggacttcagcgccagcagcaccaccatcctggatgaggagcccatcgtgaacagaggcctggccgccgccctgctgctgtgccagaacaagggcctgctggagaccaccgtgcagaaggtggcccgggtgaaggcccccaacaagagcctgcccagcgctgtgtactgcatcgaggacaagatggccattgatgacaagtacagcagaagagaggagtaccggggcttcacccaggacttcaaggagaaggatggctacaagccagatgtgaagattgaatatgtggatgagaccggcaggaagctgacccccaaggaggccttccggcagctgagccaccgcttccacggcaagggcagcggcaagatgaagacagaaagaaggatgaagaagctggatgaggaggccctgctgaagaagatgagcagcagtgacacccccctgggcaccgtggccctgctgcaggagaagcagaaggcccagaagaccccctacatcgtgctgagcggcagcggcaagtccatgaatgccaacaccatcaccaagtag

SEQ ID NO: 153316 - DNA, 1929 bp, Artificial Sequence
  derived and/or modified sequence
atggccctgcggcagcgggaggagctgcgggagaagctggccgccgccaaggagaagaggctgctgaaccagaagctgggcaagatcaagaccctgggggaggatgacccctggctggatgacacagctgcctggattgaaagaagccggcagctgcagaaggagaaggacctggccgagaagagggccaagctgctggaggagatggaccaggagtttggagtgtccaccctggtggaggaggagtttggccagaggcggcaggacctgtacagcgcccgggacctgcagggcctgactgtggagcacgccatcgacagcttccgggagggggagaccatgatcctgaccctgaaggacaagggcgtgctgcaggaggaggaggatgtgctggtgaatgtgaacctggtggacaaggagcgggcagagaagaatgtggagctgaggaagaagaagccagactacctgccctatgcagaagatgaatctgtggatgacctggcccagcagaagcccaggagcatcctgagcaaatatgatgaggagctggagggggagcggccccacagcttccggctggagcagggcggcacagcagatggcctgcgggagcgggagctggaggagatccgggccaagctgcggctgcaggcccagagcctgagcacagtgggcccccggctggccagcgagtacctgaccccagaggagatggtgaccttcaagaagaccaagagaagagtgaagaagatcaggaagaaggagaaggaggtggtggtgcgggcagatgacctgctgcccctgggggaccagacccaggatggagactttggcagccggctgcggggccggggcagaagaagagtgtctgaggtggaggaggagaaggagcctgtgccccagcccctgcccagtgatgacaccagggtggagaacatggacatcagtgatgaggaggagggcggggcccctcctcctggcagcccccaggtgctggaggaggatgaagctgagctggagctgcagaagcagctggagaagggccgccgcctgcggcagctgcagcagctgcagcagctgcgggacagcggggagaaggtggtggagatcgtgaagaagctggagagccggcagaggggctgggaggaggatgaagatcctgagaggaagggggccatcgtgttcaatgccaccagcgagttctgcaggaccctgggggagatccccacctacggcctggccggcaaccgggaggagcaggaggagctgatggactttgaaagagatgaggagaggtctgccaatggaggcagcgagagtgatggagaggagaacatcggctggagcacagtgaacctggatgaggagaagcagcagcaggacttcagcgccagcagcaccaccatcctggatgaggagcccatcgtgaacagaggcctggccgccgccctgctgctgtgccagaacaagggcctgctggagaccaccgtgcagaaggtggcccgggtgaaggcccccaacaagagcctgcccagcgctgtgtactgcatcgaggacaagatggccattgatgacaagtacagcagaagagaggagtaccggggcttcacccaggacttcaaggagaaggatggctacaagccagatgtgaagattgaatatgtggatgagaccggcaggaagctgacccccaaggaggccttccggcagctgagccaccgcttccacggcaagggcagcggcaagatgaagacagaaagaaggatgaagaagctggatgaggaggccctgctgaagaagatgagcagcagtgacacccccctgggcaccgtggccctgctgcaggagaagcagaaggcccagaagaccccctacatcgtgctgagcggcagcggcaagtccatgaatgccaacaccatcaccaagtag

SEQ ID NO: 153317 - DNA, 2403 bp, Artificial Sequence
  derived and/or modified sequence
atgggcagcagcaagaagcaccggggcgagaaggaggccgccggcacaacagccgctgcgggcacaggaggcgctaccgaacagcccccaagacatagggaacacaaaaagcacaagcacaggtctggagggtcggggggctccgggggagagcgcaggaaaagaagccgtgagaggggaggcgagcgcggaagtgggagaagaggagctgaagccgaggcccggagttctacccatggacgtgagcgaagtcaagctgagccctccgaacgtcgggtcaagcgagagaaacgggatgacgggtatgaggctgctgcgagttccaaaacgagctctggcgacgcctcctctctctcaattgaagaaacaaacaagttgcgcgctaagctggggctgaagcctctggaagtgaacgcaatcaaaaaggaggctgggactaaggaggaaccagtgaccgccgacgtcataaatccgatggcattgcgacagcgtgaagagttacgggagaagctggcagccgccaaggagaagaggcttctgaaccaaaaattggggaagatcaagaccctgggggaggacgacccctggcttgacgacaccgctgcatggatcgaaagatctaggcagctacagaaggagaaggatttggctgagaaaagagcgaaactgttagaggagatggatcaagagtttggggtgtcgactcttgttgaggaagagtttggtcagcgtcgccaggatctgtactccgctagggatctgcagggcctgaccgtcgagcacgccattgactcttttcgcgaaggtgagaccatgatacttacgttaaaggataagggagtactccaggaagaagaagatgtcctcgtaaatgtgaacctcgtagataaggagcgggctgagaaaaacgtcgaactgagaaagaaaaaacctgactacttaccatacgccgaggacgagtccgttgacgatcttgcccaacagaagcctcggtctatcctatcgaaatacgacgaggaactggaaggcgagagaccccacagctttagactcgaacaagggggtacagccgacggtctacgggagagggagctggaagagatacgcgccaagttacgcttacaggcccagtcactgtccactgtcggaccccgcctagcctccgaatatttaacacctgaggaaatggtgacgtttaaaaagactaaacgcagagttaaaaagataagaaaaaaagaaaaggaggttgtggtgagggccgacgacctgcttccgctcggagatcagacgcaggacggcgatttcggcagccgactcaggggcaggggacggcgccgggtgagtgaggtggaagaggagaaggagccagtgccccagcctttgcccagcgatgacacaagagtagaaaacatggatatctccgatgaagaagagggaggtgcgcccccacccggtagcccccaggttctcgaagaggatgaggcagagttagagctccagaaacagctggaaaaaggccgccgcctcaggcaactccaacagctgcagcagctcagggactctggagagaaagtggttgaaattgtaaaaaagctggaatctagacaacgcggctgggaggaagatgaggatccagagcgtaagggtgcgatcgtgtttaatgccacctccgagttctgcaggaccctgggcgagatccccacctacggtctggccgggaacagggaagagcaggaggagcttatggatttcgagcgtgacgaagagcggagcgctaacggtggctctgaatcggacggagaagaaaacatcggatggtcaactgtgaacctcgacgaggagaaacagcagcaagacttttcagcatcttctacaacaatcctggacgaagagccgatcgtcaatcggggccttgccgcagctctcctgctatgtcaaaacaaaggacttctggaaactactgtccaaaaggtcgcccgcgtcaaggcacctaataaatcactcccctccgccgtgtactgcatcgaagataagatggccatcgacgacaagtatagccgacgggaggaatatagaggattcacacaggactttaaagaaaaggatggatataagcctgatgtgaaaattgagtacgtcgacgagactggtcgtaaactaacccctaaggaggcctttagacagctgagccatcggttccacggtaagggtagtggcaaaatgaagacagagcggcggatgaaaaaactggatgaggaggccctcctcaagaaaatgtctagctcggatacaccactgggtaccgtagctttgctgcaggagaagcagaaggcgcagaagacaccttacatcgtactatccggctctgggaagagcatgaacgcgaacaccataacaaaatag

SEQ ID NO: 153318 - DNA, 1929 bp, Artificial Sequence
  derived and/or modified sequence
atggccctgcggcagcgggaggagctgcgggagaagctggccgccgctaaggagaaaagactcctgaatcaaaagctgggcaagattaagaccctgggagaagatgatccctggctcgatgacaccgccgcatggatcgagagaagtcgccaactgcagaaggagaaggatctggcggaaaaacgagccaagctgctagaagagatggatcaagagttcggagtatccaccctagtggaagaggaatttgggcagcgccggcaagacctgtactccgcacgggatctgcagggattaactgttgagcacgccatcgatagcttcagggaaggcgagactatgatccttacacttaaggacaaaggagtcctccaggaggaggaggatgtgctagtgaatgtcaacctggtagacaaggagcgcgccgaaaagaacgtggagttacggaagaagaagccggactatcttccttatgcagaagacgaatctgtcgacgaccttgcgcaacagaaaccgcgatctatcctgtccaagtatgacgaagaattagagggcgaacgtccacactcgttccggctggagcaaggcgggacagccgatggtctgagagagcgggagctggaggagattagagctaaattgcggctccaagcacaaagtttgtccaccgtaggccctagactggcctcagagtacttaacgcccgaagagatggtgaccttcaaaaaaactaagaggagagtgaaaaaaattcgaaagaaggagaaggaagtcgtggtcagagccgatgacctcctgccgttgggggaccagacccaagacggtgacttcgggtctcggttgaggggcagaggacgtaggcgtgtttctgaggttgaagaagaaaaggaaccagtcccacaacccctgccctccgacgataccagagtggaaaacatggatatcagcgacgaggaggaaggaggcgcccccccccccggatccccccaggtgctggaggaagacgaagctgaattagagctgcaaaaacagttagagaagggcaggaggctgcgccagctacagcagcttcagcagctgagagatagcggggaaaaagtggtcgaaatcgtgaagaagctcgaaagccgccagagaggatgggaggaggatgaggacccagagcgtaagggcgccatagtgttcaacgccacaagcgaattctgtagaacgttaggggagatcccgacgtatggactggccgggaatagagaggagcaggaggagctcatggactttgagagggatgaggagcggtccgctaacgggggctctgagagcgatggcgaagagaacatcgggtggagtaccgtgaatctggatgaagaaaaacagcagcaggacttctctgcttctagcaccactattctggacgaggaacctatcgtgaaccggggacttgctgccgcactgcttctctgccagaataaaggattactggagactaccgtgcagaaagtggcgcgggttaaagctccgaacaagtccctgccttccgccgtatactgcatcgaagataagatggcaatcgacgacaaatacagcaggcgcgaagagtatagaggatttacccaggacttcaaagagaaagacgggtacaagcccgacgtcaaaatcgagtacgtagatgaaaccggcaggaaattaacccctaaagaagcatttcgtcagctctctcaccggtttcatggaaagggttctgggaaaatgaaaactgagcggcgaatgaagaaattggacgaggaagcccttttgaagaaaatgagcagctccgatacaccgctgggaacagtggcactcctgcaggagaaacagaaggctcaaaaaacgccctatatcgtgctgagcggttcggggaaatctatgaatgctaataccattacaaagtag

SEQ ID NO: 153319 - DNA, 2403 bp, Artificial Sequence
  derived and/or modified sequence
atggggtcttcaaaaaagcaccggggagaaaaggaggctgctggtacaactgccgcagccggaacgggtggtgccactgaacaacctcctaggcatagagagcacaagaagcacaagcataggtctggcggatctgggggatccggaggggagagacggaaacgatctagggaacgtggcggagagcggggttcgggtcggcgtggcgctgaggcagaggcacgcagctccacccacggaagagaaagaagccaggcggaaccttcagagcggcgagtcaagagagagaaacgcgatgacggatatgaagcagccgcaagcagcaaaacgtcctctggcgacgccagttccctgtcgattgaggaaactaataaactgcgtgctaagctcggactgaagccactggaggtcaacgctatcaaaaaggaagccggtactaaggaggagcctgtgacagctgatgtcattaatcccatggcgctcaggcaacgggaagaactgagagaaaagcttgctgccgctaaggagaagcggctgctgaatcagaaactgggaaagatcaaaactctcggggaggatgatccttggcttgacgacacagccgcttggattgaacggtcacgccaactgcagaaagagaaagatctggcagagaaacgcgctaaattgctggaggagatggaccaggagttcggagtatctaccttggtggaagaagaatttggtcagcgtaggcaagacctctatagtgccagggacttgcagggtcttacagtagaacatgcaatcgacagcttcagagagggggagacgatgattcttactctgaaagataagggcgttctgcaagaagaggaggacgtgctggttaacgtcaatcttgttgacaaggaaagagcggagaagaatgttgaactgagaaaaaagaaaccagactatctcccatacgctgaagacgaatccgtggacgacctggcgcagcagaagcccaggtcaattttatcaaagtacgacgaagaactggaaggggagcggcctcattcgtttcggctggagcaaggcggaaccgctgacggcctacgggaacgtgagctcgaggaaatcagagctaagctgagactgcaagcccagtctttgtccaccgtggggcctcggctggcatccgagtacctcacacccgaggaaatggtaacctttaaaaaaacgaaaagacgcgtgaaaaagataagaaagaaagagaaagaggtagtggtacgagccgacgacctcttgcctttgggagatcagacacaggacggtgattttggctcccgtctgcgtggacgcggtagaaggcgggtgtctgaagtcgaagaagagaaggagcctgttccccagcccctgccctccgacgatactcgcgttgaaaatatggacatatctgacgaagaagagggcggtgctccaccgcctggatctccacaggtcctggaggaggacgaggctgaactcgagctgcagaagcagctggaaaagggtaggcggctgagacagcttcagcagctccagcagctgagggattccggtgagaaagtagtggagatcgtgaaaaaactagagtccaggcagaggggatgggaggaagatgaggaccctgagcgtaaaggcgcaattgtcttcaatgctaccagcgaattttgtagaaccctgggagagattccaacctatggactggccggaaatagggaggagcaggaggagttaatggactttgagcgggacgaggaacgatccgcaaatggcggatctgaatccgacggcgaagagaacattgggtggagcactgtgaatctggacgaggagaaacaacaacaggatttttcagcatctagtaccactatcctcgatgaggaaccgattgtcaaccggggactggctgccgcactgctgctgtgccaaaataaggggttactggaaactaccgtgcaaaaggtggctcgggtgaaggcccctaacaagagtttaccttctgctgtgtactgtatagaggacaagatggccattgatgacaagtattctcgtagggaggaataccgtggttttacacaggatttcaaggagaaagatggctataaacccgatgtgaaaatcgagtatgtggacgaaaccggccgaaagctaacacccaaggaagccttccgccagcttagccaccgtttccatggaaagggctctgggaagatgaaaacagaacgacggatgaagaaattggacgaggaagccctcctgaagaagatgagcagctcagacacacctttgggcactgtcgcactgctccaggaaaagcagaaggcacagaaaacaccatacatcgtccttagtgggtccggtaagagtatgaacgcaaacaccatcacaaaatag

SEQ ID NO: 153320 - DNA, 1929 bp, Artificial Sequence
  derived and/or modified sequence
atggccctacgacagagagaggaactgagagagaagcttgcggctgcgaaagagaagagattgctcaaccaaaaactcggaaaaatcaaaactctcggtgaggacgatccctggttggacgataccgcagcctggatcgagcgatcccgccaacttcaaaaagaaaaagatttagccgagaagcgagcaaaactgcttgaggaaatggaccaggaatttggcgttagtacactggtggaagaagagttcggccagagacggcaggacctttacagcgctagggatctacagggactgactgtggagcacgccattgacagctttcgcgagggagagacaatgattctgacattaaaggataagggtgtactccaggaggaagaggacgtgctcgttaacgttaatctggtcgataaggagcgggcagagaagaacgttgaactgcgcaagaagaaaccagattaccttccttatgctgaagacgagagcgttgatgatctggcccagcaaaaaccacgcagcatcttgtctaaatacgacgaggaactcgagggggagcgaccccactcctttagactggaacaaggcggtaccgctgacggattgcgggagcgggagttggaggagataagagcgaagctgcggctccaagcacagtcactaagcacagtgggccctcgtctcgcatctgaatacctcacgcccgaggagatggtgacttttaaaaagacaaaacgacgtgtcaagaaaatacggaagaaggagaaggaagttgtcgttcgagctgatgatctcctgcccttaggcgatcagacgcaggacggggatttcggctctaggctgagaggccgaggtagaaggagggttagcgaagttgaggaggagaaagagcccgtcccacagccacttccctccgatgacacacgggtggagaatatggatatctctgacgaggaggaaggaggggcaccccctccaggcagcccgcaggtgctcgaggaagacgaagcagagctcgagctgcagaagcagttagagaaaggtaggcggctacggcagctgcaacagttgcagcagcttcgggacagtggggaaaaagtagttgagatagtcaagaagctcgagagccggcagcggggttgggaagaagacgaggaccctgagaggaaaggcgcaattgtcttcaatgccactagcgaattctgcagaacacttggtgagatccctacatacggcttggctggaaatagagaggagcaggaggagctgatggatttcgaacgcgacgaagaaaggtcggccaatgggggatccgagagtgatggggaagagaatataggatggagtacggttaacctggatgaggaaaagcagcagcaggacttctcagcttcaagtactacaatactcgatgaggaacccatcgtcaataggggcctcgcagccgctcttctgctgtgtcagaacaagggtcttctggaaactacggttcagaaggtggccagggtgaaggctccaaataaatctctgccttccgctgtctactgtattgaagacaagatggccatcgacgataagtacagcagacgcgaagagtaccggggattcacccaagactttaaggaaaaagacggctacaagcccgacgtgaagatcgaatacgtcgatgaaaccggcaggaagctaactcctaaagaggcctttcggcagctgtctcacagatttcacggaaagggatctgggaagatgaagaccgagagaagaatgaaaaagttagatgaggaggcacttctaaagaagatgtcttcatctgatacgcctctgggtaccgtcgccctgttgcaggagaaacagaaagcgcagaaaactccttatatcgtgttgtccggctctggcaagtccatgaacgcaaacacaattaccaagtag

SEQ ID NO: 153321 - DNA, 3293 bp, Artificial Sequence
  derived and/or modified sequence
aacacgacagcggctgccgagcgacccggaagtattcccattttgcgttgtctgggctcggcggcagccgggctcggagtggacgtgccactatggggtcgtccaagaagcatcgcggagagaaggaggcggccgggacgacggcggcggccggcaccgggggtgccaccgagcagccgccgcggcaccgggaacacaaaaaacacaagcaccggagtggcggcagtggcggtagcggtggcgaacgacggaagcggagccgggaacgtgggggcgagcgcgggagcgggcggcgcggggccgaagctgaggcccggagcagcacgcacgggcgggagcgcagccaggcagagccctccgagcggcgcgtgaagcgggagaagcgcgatgacggctacgaggccgctgccagctccaaaactagctcaggcgatgcctcctcactcagcatcgaggagactaacaaactccgggcaaagttggggctgaaacccttggaggttaatgccatcaagaaggaggcgggcaccaaggaggagcccgtgacagctgatgtcatcaaccctatggccttgcgacagcgagaggagctgcgggagaagctggcggctgccaaggagaagcgcctgctgaaccaaaagctggggaagataaagaccctaggagaggatgacccctggctggacgacactgcagcctggatcgagaggagccggcagctgcagaaggagaaggacctggcagagaagagggccaagttactggaggagatggaccaagagtttggtgtcagcactctggtggaggaggagttcgggcagaggcggcaggacctgtacagtgcccgggacctgcagggcctcaccgtggagcatgccattgattccttccgagaaggggagacaatgattcttaccctcaaggacaaaggcgtgctgcaggaggaggaggacgtgctggtgaacgtgaacctggtggataaggagcgggcagagaaaaatgtggagctgcggaagaagaagcctgactacctgccctatgccgaggacgagagcgtggacgacctggcgcagcaaaaacctcgctctatcctgtccaagtatgacgaagagcttgaaggggagcggccacattccttccgcttggagcagggcggcacggctgatggcctgcgggagcgggagctggaggagatccgggccaagctgcggctgcaggctcagtccctgagcacagtggggccccggctggcctccgaatacctcacgcctgaggagatggtgacctttaaaaagaccaagcggagggtgaagaaaatccgcaagaaggagaaggaggtagtagtgcgggcagatgacttgctgcctctcggggaccagactcaggatggggactttggttccagactgcggggacggggtcgccgccgagtgtccgaagtggaggaggagaaggagcctgtgcctcagcccctgccgtcggacgacacccgagtggagaacatggacatcagtgatgaggaggaaggtggagctccaccgccggggtccccgcaggtgctggaggaggacgaggcggagctggagctgcagaagcagctggagaagggacgccggctgcgacagttacagcagctacagcagctgcgagacagtggcgagaaggtggtggagattgtgaagaagctggagtctcgccagcggggctgggaggaggatgaggatcccgagcggaagggggccatcgtgttcaacgccacgtccgagttctgccgcaccttgggggagatccccacctacgggctggctggcaatcgcgaggagcaggaggagctcatggactttgaacgggatgaggagcgctcagccaacggtggctccgaatctgacggggaggagaacatcggctggagcacggtgaacctggacgaggagaagcagcagcaggatttctctgcttcctccaccaccatcctggacgaggaaccgatcgtgaatagggggctggcagctgccctgctcctgtgtcagaacaaagggctgctggagaccacagtgcagaaggtggcccgggtgaaggcccccaacaagtcgctgccctcagccgtgtactgcatcgaggataagatggccatcgatgacaagtacagccggagggaggaataccgaggcttcacacaggacttcaaggagaaggacggctacaaacccgacgttaagatcgaatacgtggatgagacgggccggaaactcacacccaaggaggctttccggcagctgtcgcaccgcttccatggcaagggctcaggcaagatgaagacagagcggcggatgaagaagctggacgaggaggcgctcctgaagaagatgagctccagcgacacgcccctgggcaccgtggccctgctccaggagaagcagaaggctcagaagaccccctacatcgtgctcagcggcagcggcaagagcatgaacgcgaacaccatcaccaagtgacagcgccctcccgccccggccctgcctcaaccttcatattaaataaagctccctccttattttttcctccctggtcgtggtacagattccagggttggatctttggttgggtgtggcacagagtctggctcctgctaggtgagacctggccatcaaatgacacaaacaactaaacgatggaagagagagcgagcccgggtcctctaaggctccttccttctcccctggctgtcggtcacacctctgcagggccggctctctgatagaaagtggaaggcggttttagaaactcatcaccctgctctctcctggcctcgggggctgcacaggtcactgtcctgtaatgtctcccggtcagggcagcccaggactgcccagcctggtgggctggggattgggctttgggtagggcacaggtgccaccttctgtcctggctgtcctgtgccaccctggtctgtgtctagaggagtgaaactcccagggttgggctgggagtatttggtgcacgcggtatggggagggctgagctcagtgcctcctgggagacttgtcccgtgtacagtgacccagaaagatgagattccttggcctgaactctgtgatagagtgtgactgagctgctgggggacatgtgagcctcaaatccatagaaagacaaacggccaccttgggtgcccaggatactggtgcctggccccacgtacacccacatacttctcagatggctcccacattttaagattttaaaaatgaaaccaaaaaataaattgaagaaaactgtaaactttaaagaataa

SEQ ID NO: 153322 - DNA, 2420 bp, Artificial Sequence
  derived and/or modified sequence
attttgcgttgtctgggctcggcggcagccgggctcggagtggacgtgccactatggggtcgtccaagaagcatcgcggagagaaggaggcggccgggacgacggcggcggccggcaccgggggtgccaccgagcagccgccgcggcaccgggaacacaaaaaacacaagcaccggagtggcggcagtggcggtagcggtggcgaacgacggaagcggagccctccgagcggcgcgtgaagcgggagaagcgcgatgacggctacgaggccgctgccagctccaaaactagctcaggcgatgcctcctcactcagcatcgaggagactaacaaactccgggcaaagttggggctgaaacccttggaggttaatgccatcaagaaggaggcgggcaccaaggaggagcccgtgacagctgatgtcatcaaccctatggccttgcgacagcgagaggagctgcgggagaagctggcggctgccaaggagaagcgcctgctgaaccaaaagctggggaagataaagaccctaggagaggatgacccctggctggacgacactgcagcctggatcgagaggagccggcagctgcagaaggagaaggacctggcagagaagagggccaagttactggaggagatggaccaagagtttggtgtcagcactctggtggaggaggagttcgggcagaggcggcaggacctgtacagtgcccgggacctgcagggcctcaccgtggagcatgccattgattccttccgagaaggggagacaatgattcttaccctcaaggacaaaggcgtgctgcaggaggaggaggacgtgctggtgaacgtgaacctggtggataaggagcgggcagagaaaaatgtggagctgcggaagaagaagcctgactacctgccctatgccgaggacgagagcgtggacgacctggcgcagcaaaaacctcgctctatcctgtccaagtatgacgaagagcttgaaggggagcggccacattccttccgcttggagcagggcggcacggctgatggcctgcgggagcgggagctggaggagatccgggccaagctgcggctgcaggctcagtccctgagcacagtggggccccggctggcctccgaatacctcacgcctgaggagatggtgacctttaaaaagaccaagcggagggtgaagaaaatccgcaagaaggagaaggaggtagtagtgcgggcagatgacttgctgcctctcggggaccagactcaggatggggactttggttccagactgcggggacggggtcgccgccgagtgtccgaagtggaggaggagaaggagcctgtgcctcagcccctgccgtcggacgacacccgagtggagaacatggacatcagtgatgaggaggaaggtggagctccaccgccggggtccccgcaggtgctggaggaggacgaggcggagctggagctgcagaagcagctggagaagggacgccggctgcgacagttacagcagctacagcagctgcgagacagtggcgagaaggtggtggagattgtgaagaagctggagtctcgccagcggggctgggaggaggatgaggatcccgagcggaagggggccatcgtgttcaacgccacgtccgagttctgccgcaccttgggggagatccccacctacgggctggctggcaatcgcgaggagcaggaggagctcatggactttgaacgggatgaggagcgctcagccaacggtggctccgaatctgacggggaggagaacatcggctggagcacggtgaacctggacgaggagaagcagcagcaggatttctctgcttcctccaccaccatcctggacgaggaaccgatcgtgaatagggggctggcagctgccctgctcctgtgtcagaacaaagggctgctggagaccacagtgcagaaggtggcccgggtgaaggcccccaacaagtcgctgccctcagccgtgtactgcatcgaggataagatggccatcgatgacaagtacagccggagggaggaataccgaggcttcacacaggacttcaaggagaaggacggctacaaacccgacgttaagatcgaatacgtggatgagacgggccggaaactcacacccaaggaggctttccggcagctgtcgcaccgcttccatggcaagggctcaggcaagatgaagacagagcggcggatgaagaagctggacgaggaggcgctcctgaagaagatgagctccagcgacacgcccctgggcaccgtggccctgctccaggagaagcagaaggctcagaagaccccctacatcgtgctcagcggcagcggcaagagcatgaacgcgaacaccatcaccaagtgacagcgccctcccgccccggccctgcctcaaccttcatattaaataaagctccctcctt

SEQ ID NO: 153323 - protein, 480 aa, Artificial Sequence
  derived and/or modified sequence
MAARCSTRWLLVVVGTPRLPAISGRGARPPREGVVGAWLSRKLSVPAFASSLTSCGPRALLTLRPGVSLTGTKHNPFICTASFHTSAPLAKEDYYQILGVPRNASQKEIKKAYYQLAKKYHPDTNKDDPKAKEKFSQLAEAYEVLSDEVKRKQYDAYGSAGFDPGASGSQHSYWKGGPTVDPEELFRKIFGEFSSSSFGDFQTVFDQPQEYFMELTFNQAAKGVNKEFTVNIMDTCERCNGKGNEPGTKVQHCHYCGGSGMETINTGPFVMRSTCRRCGGRGSIIISPCVVCRGAGQAKQKKRVMIPVPAGVEDGQTVRMPVGKREIFITFRVQKSPVFRRDGADIHSDLFISIAQALLGGTARAQGLYETINVTIPPGTQTDQKIRMGGKGIPRINSYGYGDHYIHIKIRVPKRLTSRQQSLILSYAEDETDVEGTVNGVTLTSSGGSTMDSSAGSKARREAGEDEEGFLSKLKKMFTS

SEQ ID NO: 153324 - DNA, 1443 bp, Artificial Sequence
  derived and/or modified sequence
atggctgctcgctgcagtacgaggtggctgctcgtggtagttggcacccctcgcttacctgcgatcagcggtaggggcgctcgccccccaagagaaggcgtcgtcggtgcctggctgagccgcaagctctcggtgccagcctttgcctcatcgctcactagctgcgggcctagggccctgcttacactgaggcccggcgtctccctcactggcacgaagcataatccattcatctgcacagcatcctttcacacttcagcacctttagctaaagaagattactatcaaattctgggagtaccccgcaatgcatctcagaaagaaattaagaaagcgtattatcagctggccaaaaaataccacccggacacaaacaaggatgatccaaaggcaaaggaaaagttctcccaactcgctgaggcgtatgaagtcctgtcagatgaggtcaaacggaaacaatatgatgcctacggaagcgccggctttgaccctggtgccagcggctctcagcacagttactggaagggaggcccaaccgtcgaccccgaagaactgtttaggaaaatcttcggggaattctcatcatccagttttggcgacttccagactgtgtttgaccaaccacaggagtattttatggagctgacctttaaccaagccgcaaaaggtgtgaacaaggagttcaccgtgaatataatggacacgtgcgaaagatgcaatggcaaggggaacgaacccggaaccaaggtccagcactgccattattgtggcggtagcggtatggagaccataaacaccggcccgttcgtcatgcggtccacctgtcgtagatgcggcggaagggggtcaattatcatttcgccctgcgtcgtttgcagaggcgccgggcaggcgaagcagaaaaagcgcgtgatgatcccggtccccgccggagtcgaggatggtcaaacggttagaatgcctgtgggaaagagagagattttcatcactttccgggtacaaaagagccccgtctttcgacgcgatggcgcagacatacatagcgatctttttatttccattgcgcaggccctgctgggaggcaccgccagagcccagggcctctatgaaactatcaatgtcaccattcctccaggaacgcagaccgaccagaaaattcgcatggggggaaaaggtattccaagaatcaattcttacggatacggcgatcattacattcatattaagatacgggtccctaagaggttaacgtcccggcaacagagcctgattttgagttatgcggaggatgagactgatgtcgaaggaaccgttaacggcgtcacattaacatcatccggcggatccacaatggattccagcgctggcagcaaagcccggcgggaggcaggagaggacgaagaaggatttttaagtaagcttaaaaagatgttcacaagttag

SEQ ID NO: 153325 - DNA, 1443 bp, Artificial Sequence
  derived and/or modified sequence
atggccgcccgctgcagcacccgctggctgctggtggtggtgggcaccccccggctgcctgccatcagcggccgcggggcccggcccccccgggagggcgtggtgggcgcctggctgagcaggaagctgtctgtgcctgcctttgccagcagcctgaccagctgtggcccccgggccctgctgaccctgcggcctggggtgtccctgaccggcaccaagcacaaccccttcatctgcacagccagcttccacaccagcgcccccctggccaaggaggactactaccagatcctgggcgtgcccagaaatgccagccagaaggagatcaagaaggcctactaccagctggccaagaagtaccacccagacaccaacaaggatgaccccaaggccaaggagaagttcagccagctggccgaggcctatgaggtgctgagtgatgaggtgaagaggaagcagtatgatgcctacggcagcgctggctttgaccccggggccagcggcagccagcacagctactggaagggcggccccaccgtggaccctgaggagctgttcaggaagatctttggagagttcagcagcagcagctttggagacttccagacagtgtttgaccagccccaggagtacttcatggagctgaccttcaaccaggccgccaagggcgtgaacaaggagttcaccgtgaacatcatggacacctgtgagcgctgcaatggaaaaggaaatgagcccggcaccaaggtgcagcactgccactactgcggcggcagcggcatggagaccatcaacacaggcccctttgtgatgaggagcacctgccgccgctgtggcggccggggcagcatcatcatcagcccctgtgtggtgtgcagaggagctggccaggccaagcagaagaagagggtgatgatccctgtgcctgctggggtggaggatggccagacagtgaggatgcctgtgggcaagcgggagatcttcatcaccttccgggtgcagaagagccctgtgttcagaagagatggagctgacatccacagcgacctcttcatcagcatcgcccaggccctgctgggcggcacagcccgggcccagggcctgtatgagaccatcaacgtgaccatccccccaggcacccagacagaccagaagatccgcatgggcggcaagggcatcccccgcatcaacagctatggctatggagaccactacatccacatcaagatccgggtgcccaagaggctgaccagccggcagcagagcctcatcctgtcctatgcagaagatgaaacagatgtggagggcaccgtgaatggagtgaccctgaccagcagcggcggcagcaccatggacagcagcgctggcagcaaggcccggcgggaggccggagaagatgaggagggcttcctgagcaagctgaagaagatgttcaccagctag

SEQ ID NO: 153326 - DNA, 1443 bp, Artificial Sequence
  derived and/or modified sequence
atggccgcccggtgcagcacccggtggctgctggtggtggtgggcaccccacgcctacccgcaatatcaggccggggcgcccgcccaccaagggagggtgtggttggcgcatggctgtcccggaagctatctgtgccagcgttcgcttcctcgctcacatcctgcggtcctcgcgctctcttgaccttgcgccccggagtgagtttgactggcactaagcataatcccttcatctgtacagctagctttcacacatcagcccccctggccaaggaagactactatcagatcctgggagtcccacgcaacgccagccagaaggagatcaagaaggcatactatcagctagccaagaagtatcatccagacacaaataaggacgaccctaaagccaaagaaaagtttagccaactcgcggaggcttatgaggtactttccgacgaagtcaagcggaagcaatacgacgcttatggctctgccggttttgaccccggtgcttcaggatcacagcattcctattggaaaggaggacctactgtggaccctgaggaacttttccggaaaattttcggcgagtttagctcctcaagcttcggcgactttcagactgtatttgaccaaccccaggagtactttatggaactgacgttcaaccaagccgccaaaggggtcaacaaggagtttaccgtgaacatcatggacacctgcgagaggtgcaatggaaaggggaacgagcctggaacaaaggttcagcactgccattactgtgggggatccggcatggagactatcaacactggaccgttcgtcatgaggtctacttgccggcgatgtggcggacgcggtagtattatcatcagcccttgcgtggtctgccgaggcgccggccaggctaagcaaaagaaaagggtaatgatccctgtgcccgccggagtggaagatggccaaacggtcaggatgcctgttggtaaacgggaaatttttatcaccttccgggtgcaaaagtctcccgtgttcaggcgcgatggggcggatatccattccgacctgttcataagtattgctcaggccctgctgggaggaacggcacgcgcgcagggcctgtacgaaactatcaatgtcacaattcccccaggaacccaaaccgatcaaaagattagaatgggagggaagggtattcccaggatcaacagctacggctacggggaccactatatccatattaagattagagtgcctaagcgcctaacctcgaggcaacagagcctgatccttagctatgctgaagacgaaaccgacgttgaggggacggtgaatggcgttaccctcacatccagcggcggttccacgatggacagcagcgcagggtctaaggctcggcgcgaggccggagaggatgaagagggctttttatcaaaactcaagaaaatgttcacctcctag

SEQ ID NO: 153327 - DNA, 1443 bp, Artificial Sequence
  derived and/or modified sequence
atggctgcaaggtgttctacccgatggctgctcgtggttgtaggcactccccgtctgcccgctatttctgggaggggggctcggccaccacgagaaggtgtggtgggtgcctggctgtccagaaagctcagtgtccccgcatttgcgagctctcttacttcttgtggtcccagggccctgcttactctccgacccggtgtgtctctgacaggcacaaagcacaacccatttatttgtacagccagtttccacacatcagctcccttagctaaggaggattactaccagattctgggagtcccaaggaatgcctcgcaaaaggagataaagaaagcttactatcaacttgcgaagaagtaccacccagataccaacaaagatgacccaaaggccaaggaaaagttctcccaactagccgaggcctacgaagtactgagcgatgaggtgaaaaggaagcaatacgacgcctacgggtctgctggttttgatcccggagcatcaggctcccaacacagctattggaaaggtgggccaactgtggatcccgaagaactgttccgaaaaatttttggggagttttcttcgagctcgttcggagacttccagactgtgttcgatcagccccaggagtacttcatggaattaaccttcaaccaggcggctaagggggtaaataaggagttcaccgtgaatatcatggatacttgcgagagatgcaacgggaaagggaacgagccagggaccaaggtgcagcactgccattattgtggcggttcgggcatggaaaccattaacaccgggccattcgttatgcggtctacctgtcgcagatgtggcggacggggatccatcatcatttccccttgtgtggtgtgcagaggagccggacaggcaaaacagaaaaagagagtcatgattcccgtgcctgctggtgtagaggatgggcagactgtcagaatgcccgtagggaagcgggaaatcttcattacctttcgggtccaaaagtcccctgttttccgaagagatggtgcagacattcactcagatctgttcatatcaatcgctcaggcactgttgggaggcactgcacgcgcacaggggttgtacgaaaccatcaatgtcacaatcccgccaggtactcaaactgaccagaagatccgaatgggtggtaaaggcattcccagaattaactcctacgggtacggggaccattatattcacatcaaaatccgcgtgcctaagcggctgaccagccgccagcaatctctgattctttcttacgcagaggatgagaccgatgtagagggcacagtgaacggagttactctcacgtccagtgggggatctaccatggacagctccgctgggagtaaggcccgaagagaagccggtgaagacgaagaaggtttcctctcaaagctgaagaaaatgttcactagctag

SEQ ID NO: 153328 - DNA, 1443 bp, Artificial Sequence
  derived and/or modified sequence
atggccgccagatgcagcaccagatggctgctggtggtggtgggcacccccagactgcccgccatcagcggcagaggcgccagaccccccagagagggcgtggtgggcgcctggctgagcagaaagctgagcgtgcccgccttcgccagcagcctgaccagctgcggccccagagccctgctgaccctgagacccggcgtgagcctgaccggcaccaagcacaaccccttcatctgcaccgccagcttccacaccagcgcccccctggccaaggaggactactaccagatcctgggcgtgcccagaaacgccagccagaaggagatcaagaaggcctactaccagctggccaagaagtaccaccccgacaccaacaaggacgaccccaaggccaaggagaagttcagccagctggccgaggcctacgaggtgctgagcgacgaggtgaagagaaagcagtacgacgcctacggcagcgccggcttcgaccccggcgccagcggcagccagcacagctactggaagggcggccccaccgtggaccccgaggagctgttcagaaagatcttcggcgagttcagcagcagcagcttcggcgacttccagaccgtgttcgaccagccccaggagtacttcatggagctgaccttcaaccaggccgccaagggcgtgaacaaggagttcaccgtgaacatcatggacacctgcgagagatgcaacggcaagggcaacgagcccggcaccaaggtgcagcactgccactactgcggcggcagcggcatggagaccatcaacaccggccccttcgtgatgagaagcacctgcagaagatgcggcggcagaggcagcatcatcatcagcccctgcgtggtgtgcagaggcgccggccaggccaagcagaagaagagagtgatgatccccgtgcccgccggcgtggaggacggccagaccgtgagaatgcccgtgggcaagagagagatcttcatcaccttcagagtgcagaagagccccgtgttcagaagagacggcgccgacatccacagcgacctgttcatcagcatcgcccaggccctgctgggcggcaccgccagagcccagggcctgtacgagaccatcaacgtgaccatcccccccggcacccagaccgaccagaagatcagaatgggcggcaagggcatccccagaatcaacagctacggctacggcgaccactacatccacatcaagatcagagtgcccaagagactgaccagcagacagcagagcctgatcctgagctacgccgaggacgagaccgacgtggagggcaccgtgaacggcgtgaccctgaccagcagcggcggcagcaccatggacagcagcgccggcagcaaggccagaagagaggccggcgaggacgaggagggcttcctgagcaagctgaagaagatgttcaccagctag

SEQ ID NO: 153329 - DNA, 2763 bp, Artificial Sequence
  derived and/or modified sequence
cgcctctacgcgcgcccgccgttcccgcgaggcccacctagagccgggcggcgcaggcgcagagtccccgggccaagatggctgcgcggtgctccacacgctggttgctggtggttgtggggaccccgcggctgccggctatatcgggtagaggggcccggccgcccagggagggcgtggtgggggcatggctgagccgcaagctgagcgtccccgcctttgcgtcttccctgacctcttgcggcccccgagcgctgctgacattgagacctggtgtcagccttacaggaacaaaacataaccctttcatttgtactgcctccttccacacgagtgcccctttggccaaagaagattattatcagatattaggagtgcctcgaaatgccagccagaaagagatcaagaaagcctattatcagcttgccaagaagtatcaccctgacacaaataaggatgatcccaaagccaaggagaagttctcccagctggcagaagcctatgaggttttgagtgatgaggtgaagaggaagcagtacgatgcctacggctctgcaggcttcgatcctggggccagcggctcccagcatagctactggaagggaggccccactgtggaccccgaggagctgttcaggaagatctttggcgagttctcatcctcttcatttggagatttccagaccgtgtttgatcagcctcaggaatacttcatggagttgacattcaatcaagctgcaaagggggtcaacaaggagttcaccgtgaacatcatggacacgtgtgagcgctgcaacggcaaggggaacgagcccggcaccaaggtgcagcattgccactactgtggcggctccggcatggaaaccatcaacacaggcccttttgtgatgcgttccacgtgtaggagatgtggtggccgcggctccatcatcatatcgccctgtgtggtctgcaggggagcaggacaagccaagcagaaaaagcgagtgatgatccctgtgcctgcaggagtcgaggatggccagaccgtgaggatgcctgtgggaaaaagggaaattttcattacgttcagggtgcagaaaagccctgtgttccggagggacggcgcagacatccactccgacctctttatttctatagctcaggctcttcttgggggtacagccagagcccagggcctgtacgagacgatcaacgtgacgatcccccctgggactcagacagaccagaagattcggatgggtgggaaaggcatcccccggattaacagctacggctacggagaccactacatccacatcaagatacgagttccaaagaggctaacgagccggcagcagagcctgatcctgagctacgccgaggacgagacagatgtggaggggacggtgaacggcgtcaccctcaccagctctggtggcagcaccatggatagctccgcaggaagcaaggctaggcgtgaggctggggaggacgaggagggattcctttccaaacttaagaaaatgtttacctcatgatatcccagccgaggaaaaagatccactggaaactaggccgggaagcagcagcccctccaagggccagggcacctgggagacgggaggattccagaacagcagcactgagctcccacccgcagagcctctggacggccttggcaacagcaaaatcatgggacaacacctctctccacggaaaggtcacagtggacagcccgggcagtaggatgcagccccagaggctggtggcagtttcctgtccattggtaggtgacggcccctggctcaggcagagggagatggttagactcttgcagggctaaaactctaatttggaattgaatattgtggatatcttagttaaaggccatgcttacagcttagaaatgaagccttaagctgcatcaagttacgaagtgattaatttccttctcagcaaacctccgggaggttccagaatgagttcttcctgacaggttgtcttcactgggagcgtggggcccccaggccccaccagcaccgtcctcccctaatgaggggccctgccgaggcatcagctgctctgctcagttagtttttattcccggggtaccaagcagctgcacagtcggtgcctgggaggcacgtagaggcccagagagtccctgggggttctgctctgaccgtgtgggtggtgatccttgtcaggatgtacagtccttgctcccaccccatccgggatggccgcctgtccctgactattgagtcctgttgttgtaagccaggcatggagggctcctgcccttctgctgagccacagcccattgcagcactgtgctggccagacttcagctgccttgggaactgaagccctgccactgttgctagtcaggggcttggttctcccacttacactgttgacatctattttctgaagtgtgtttaaattattcagtgctaatcattgttttttcctttgtaaatgttgattcagaaaaggaaagcacaggctaagcagttgaaggttccccaccattcagtgagagcagaacccccattccccagcctctgctggtagcatgtcgcagtttccatgtgtttcaggatcttcgggctgtcgttagacaggttaatgaagaacacttctcaacagtttcctttttgttttcctttataattcactaaaataaagcatctattagtgtctgatttaggaatgtaaaatgattctgtattaatgtaaataagattatctattgcaaaaagatatttcaaacctaaa

SEQ ID NO: 153330 - protein, 240 aa, Artificial Sequence
  derived and/or modified sequence
MKVKKGGGGAGTATESAPGPSGQSVAPIPQPPAESESGSESEPDAGPGPRPGPLQRKQPIGPEDVLGLQRITGDYLCSPEENIYKIDFVRFKIRDMDSGTVLFEIKKPPVSERLPINRRDLDPNAGRFVRYQFTPAFLRLRQVGATVEFTVGDKPVNNFRMIERHYFRNQLLKSFDFHFGFCIPSSKNTCEHIYDFPPLSEELISEMIRHPYETQSDSFYFVDDRLVMHNKADYSYSGTP

SEQ ID NO: 153331 - DNA, 723 bp, Artificial Sequence
  derived and/or modified sequence
atgaaggtgaagaagggcggcggcggcgccggcaccgccaccgagagcgcccccggccccagcggccagagcgtggcccccatcccccagccccccgccgagagcgagagcggcagcgagagcgagcccgacgccggccccggccccagacccggccccctgcagagaaagcagcccatcggccccgaggacgtgctgggcctgcagagaatcaccggcgactacctgtgcagccccgaggagaacatctacaagatcgacttcgtgagattcaagatcagagacatggacagcggcaccgtgctgttcgagatcaagaagccccccgtgagcgagagactgcccatcaacagaagagacctggaccccaacgccggcagattcgtgagataccagttcacccccgccttcctgagactgagacaggtgggcgccaccgtggagttcaccgtgggcgacaagcccgtgaacaacttcagaatgatcgagagacactacttcagaaaccagctgctgaagagcttcgacttccacttcggcttctgcatccccagcagcaagaacacctgcgagcacatctacgacttcccccccctgagcgaggagctgatcagcgagatgatcagacacccctacgagacccagagcgacagcttctacttcgtggacgacagactggtgatgcacaacaaggccgactacagctacagcggcaccccctag

SEQ ID NO: 153332 - DNA, 723 bp, Artificial Sequence
  derived and/or modified sequence
atgaaggtgaaaaagggtggcggcggagccggaactgctaccgagagcgctcccggcccctctggtcagtccgttgcgcctattcctcagcccccagctgagtcggaatcgggctcagagtctgagcccgatgctgggcctggccccaggcctggacctctgcaacggaagcagccaatcggcccagaggacgtactcgggcttcagagaatcactggcgactacttgtgctcgccggaagaaaatatttataagatcgactttgtccgctttaagattcgcgatatggacagcggtaccgtgctctttgagattaaaaaaccaccagtctctgagcggctccccatcaaccggcgagacctcgaccccaatgccggaagattcgtcaggtaccagttcacccccgctttcttgcgattaagacaggtcggcgcgaccgtcgaattcacagtaggcgataaacctgtgaacaacttccgcatgattgaaaggcactacttccggaatcagctgctcaaatccttcgatttccacttcggattctgtatacccagttctaagaatacttgcgagcacatatatgacttccctcccctgagtgaggagctgatctccgaaatgatccgtcacccctatgaaactcagtctgattcattctattttgtggacgatagacttgttatgcataacaaggccgactacagttatagcggaaccccttag

SEQ ID NO: 153333 - DNA, 723 bp, Artificial Sequence
  derived and/or modified sequence
atgaaggtgaagaagggcggcggcggggccggcacagccacagagagcgcccctggccccagcggccagagcgtggcccccatcccccagcccccagctgagagcgagagcggcagcgagagcgagccagatgctggccctggccccaggcctggccccctgcagaggaagcagcccatcggcccagaagatgtgctgggcctgcagaggatcaccggggactacctgtgcagccctgaggagaacatctacaagattgactttgtgcgcttcaagatccgggacatggacagcggcaccgtgctgtttgagatcaagaagccccctgtgtctgagcggctgcccatcaacagaagagacctggaccccaatgccggccgctttgtgcgctaccagttcaccccagccttcctgcggctgcggcaggtgggcgccaccgtggagttcaccgtgggggacaagcctgtgaacaacttcaggatgattgaaagacactacttcaggaaccagctgctgaagagctttgacttccacttcggcttctgcatccccagcagcaagaacacctgtgagcacatctatgacttcccccccctgtctgaggagctgatcagcgagatgatccgccacccctatgagacccagagcgacagcttctactttgtggatgaccggctggtgatgcacaacaaggctgactacagctacagcggcaccccctag

SEQ ID NO: 153334 - DNA, 723 bp, Artificial Sequence
  derived and/or modified sequence
atgaaggtgaagaagggcggcggcggcgccggcaccgccaccgagtccgctccggggccttcaggccagtctgtggccccgatcccgcagccaccagcagagtcagagtccggctctgagtcagagcctgatgctggccccgggcccagacctggcccacttcagcggaagcagcccatcggccctgaggacgtcctaggacttcagaggattacgggggactatttgtgttcaccggaagaaaacatttataaaatcgacttcgtgagattcaagatccgagacatggattctggcactgttctctttgaaattaagaaacctccagtcagcgagcgacttccaatcaataggcgagatctggatccaaatgccggccgcttcgtcagatatcagtttactcccgcgtttctcaggctcagacaagtgggggcaaccgtggagttcacggtgggcgataagcccgttaacaattttcgcatgattgagaggcactactttaggaaccagctgttgaaatcctttgactttcacttcggcttttgtataccgagcagtaaaaatacctgtgagcacatctatgacttcccgccgctgtccgaagagttaatctcggaaatgatccggcacccttatgaaacacaatccgatagcttttacttcgtggacgatcgcctcgtgatgcataacaaagcggactattcctactccggtaccccatag

SEQ ID NO: 153335 - DNA, 723 bp, Artificial Sequence
  derived and/or modified sequence
atgaaggtgaaaaagggcggagggggagctggcaccgctacagagtccgcccctgggccttccggacagagcgtggccccaattccccagcctcctgcggaaagcgaatctggaagcgagagcgagccagacgctggacccggtccacggccaggccctctgcagcgcaagcagccaatcgggcctgaagatgtgttgggattacaaagaatcaccggtgattatctctgcagccctgaggagaacatctataagatcgattttgttcggtttaagattcgcgatatggacagcggaaccgttctttttgagattaagaagccacccgtatctgaaagacttcccatcaatagacgagacctggatccaaacgccggtcggtttgtcaggtatcagtttacgcctgcctttctgcggctcaggcaagtgggcgctacagtggagtttacggtaggcgacaagcctgtgaataacttccggatgatagaacggcattatttccggaatcagcttcttaagagcttcgacttccatttcgggttttgtatacctagttccaaaaatacatgcgaacatatctacgactttccccctttgtccgaagagctaatctccgaaatgattcgacacccctacgagacccagagtgattctttttactttgtcgacgaccgcctggtgatgcacaataaggctgactattcttattccggcacaccatag

SEQ ID NO: 153336 - DNA, 1397 bp, Artificial Sequence
  derived and/or modified sequence
ggctgcggatgctcccacttcccccggctccagccggcgcaggcagcggcggcagcagcaggcgagcctcggccccgcaaggccatgaaggtgaagaagggcggcggtggggccgggacggcgacggagtccgctccggggccctcgggccagagcgtggcccccataccacagccgcctgcggaatccgaatctgggtccgagtcggagccggacgcaggcccagggcccaggccggggccgctgcagaggaagcagccgatcgggccggaggacgtgctggggctgcagcggatcaccggtgactacctctgctcccctgaggagaatatctacaagatcgactttgtcaggtttaagattcgggacatggactcaggcactgtcctctttgaaatcaagaagcccccagtctcagaacggttgcccatcaaccggcgggacctggaccccaatgctgggcgctttgtccgctaccagttcacgcctgccttcctccgcctgaggcaggtgggagccacggtggagttcacagtgggagacaagcctgtcaacaacttccgcatgatcgagaggcactacttccgcaaccagctactcaaaagcttcgacttccactttggcttctgcatccccagcagcaagaacacctgcgagcacatttacgacttcccccctctctccgaggagctgatcagcgagatgatccgccacccgtatgagacccagtctgacagcttctacttcgtggatgaccggctggtgatgcacaataaagcagactattcctacagcgggacaccctgaccccacggctgccctgaccccaggaggctccagttctgggctgggagctgtgacctccccaacgctcacccctcaaccccaagtcctctgcttggggagttctccaggagctccggaccctgagtcaatgttgggaggaagggtacctggtgtccccagtcaagcccatgaagcccatgcggcctgctacatggggtggggtcgtagggaggctgtttgcctccacgtctaggaaggcctgtgagaggagcagtcaggacttccggacaacttagctgggccctacttgggcccaagtttcagaatagtgttcccctatcaaggctgtgactagatcaggcagggatccattccctgtcccctgcccactaccttcaggccatttagagttgtaaatttacaaagatccacggtgggctccagctgccaagccacccaagggagtctgggccctaggcctagccccatccctccccatgaggggccaagacactgcctaaggtgtgggagggactggctgagattgcagcccatggtaggagctggaccaactgtatatagttttcaataaactttttccttttctgttc

SEQ ID NO: 153337 - protein, 448 aa, Artificial Sequence
  derived and/or modified sequence
MAMSELGTRKPSDGTVSHLLNVVESELQAGREKGDPTEKQLQIILEDAPLWQRFKEVTNEMIVTKNGRRMFPVLKISVTGLDPNAMYSLLLDFVPTDSHRWKYVNGEWVPAGKPEVSSHSCVYIHPDSPNFGAHWMKAPISFSKVKLTNKLNGGGQIMLNSLHKYEPQVHIVRVGSAHRMVTNCSFPETQFIAVTAYQNEEITALKIKYNPFAKAFLDAKERNHLRDVPEAISESQHVTYSHLGGWIFSNPDGVCTAGNSNYQYAAPLPLPAPHTHHGCEHYSGLRGHRQAPYPSAYMHRNHSPSVNLIESSSNNLQVFSGPDSWTSLSSTPHASILSVPHTNGPINPGPSPYPCLWTISNGAGGPSGPGPEVHASTPGAFLLGNPAVTSPPSVLSTQAPTSAGVEVLGEPSLTSIAVSTWTAVASHPFAGWGGPGAGGHHSPSSLDG

SEQ ID NO: 153338 - protein, 325 aa, Artificial Sequence
  derived and/or modified sequence
MIVTKNGRRMFPVLKISVTGLDPNAMYSLLLDFVPTDSHRWKYVNGEWVPAGKPEVSSHSCVYIHPDSPNFGAHWMKAPISFSKVKLTNKLNGGGQIMLNSLHKYEPQVHIVRVGSAHRMVTNCSFPETQFIAVTAYQNEEITALKIKYNPFAKAFLDAKERNHLRDVPEAISESQHVTYSHLNLIESSSNNLQVFSGPDSWTSLSSTPHASILSVPHTNGPINPGPSPYPCLWTISNGAGGPSGPGPEVHASTPGAFLLGNPAVTSPPSVLSTQAPTSAGVEVLGEPSLTSIAVSTWTAVASHPFAGWGGPGAGGHHSPSSLDG

SEQ ID NO: 153339 - protein, 318 aa, Artificial Sequence
  derived and/or modified sequence
  misc_feature (1)..(1): Xaa can be any naturally occurring amino acid
XRMFPVLKISVTGLDPNAMYSLLLDFVPTDSHRWKYVNGEWVPAGKPEVSSHSCVYIHPDSPNFGAHWMKAPISFSKVKLTNKLNGGGQIMLNSLHKYEPQVHIVRVGSAHRMVTNCSFPETQFIAVTAYQNEEITALKIKYNPFAKAFLDAKERNHLRDVPEAISESQHVTYSHLNLIESSSNNLQVFSGPDSWTSLSSTPHASILSVPHTNGPINPGPSPYPCLWTISNGAGGPSGPGPEVHASTPGAFLLGNPAVTSPPSVLSTQAPTSAGVEVLGEPSLTSIAVSTWTAVASHPFAGWGGPGAGGHHSPSSLDG

SEQ ID NO: 153340 - protein, 281 aa, Artificial Sequence
  derived and/or modified sequence
  misc_feature (1)..(1): Xaa can be any naturally occurring amino acid
XKERELNWFYRRQRVLFAHVYPTFTNTSCLCKCKITALKIKYNPFAKAFLDAKERNHLRDVPEAISESQHVTYSHLGGWIFSNPDGVCTAGNSNYQYAAPLPLPAPHTHHGCEHYSGLRGHRQAPYPSAYMHRNHSPSVNLIESSSNNLQVFSGPDSWTSLSSTPHASILSVPHTNGPINPGPSPYPCLWTISNGAGGPSGPGPEVHASTPGAFLLGNPAVTSPPSVLSTQAPTSAGVEVLGEPSLTSIAVSTWTAVASHPFAGWGGPGAGGHHSPSSLDG

SEQ ID NO: 153341 - DNA, 2882 bp, Artificial Sequence
  derived and/or modified sequence
tagaagcaggcaagttgggtaacggctctcggcaaagttcgagaagtgcctatggccatgagtgagctgggcactcggaagcccagcgatggcactgtttctcatctgctcaatgtggtggagagtgagcttcaggcagggagggaaaaaggcgaccctacggagaagcaacttcagatcatcctggaggatgcacctctctggcagagattcaaggaagtcactaatgagatgattgtgaccaagaatggcagacggatgtttccagtcctaaagattagtgtcacagggttggaccccaatgccatgtactccctcctgctggactttgtccctacggacagtcaccgctggaagtacgtcaacggggaatgggtgcccgctggcaagccagaggtctccagccacagctgcgtctacattcacccggactcccccaactttggggcccactggatgaaagctcccatctccttcagcaaagtgaagctgaccaacaagctcaatggaggcgggcagataatgttgaattctctgcataaatatgaaccccaggttcacatagtgcgtgttggaagtgcccatcgaatggtaacaaactgctccttccctgaaacccagttcatagccgtgactgcctatcagaatgaggagataacggctctcaaaatcaagtacaatccttttgccaaagccttcttggatgccaaggaaagaaatcacctaagagacgtaccggaggctatctctgagagccagcatgtgacctattctcacttgggaggctggatcttttccaatccagatggagtgtgcacagcaggaaactccaattaccagtatgccgctcctctgcctctgcctgctccccacacccaccatggctgtgagcactattcgggtctccgaggacaccggcaggctccctacccttctgcgtacatgcacagaaaccattctccctcagtgaatttgatagaaagctcaagcaataatctgcaagttttctcgggacctgacagctggacttccttatcctccacaccccatgccagcatcctgtctgtaccccacaccaacggaccaatcaatccagggcccagcccctacccgtgcctgtggaccatcagcaatggtgccggaggccccagtgggccaggcccggaggtgcacgccagcaccccaggagcatttctcctcggaaacccagctgtgacttcacccccttctgtgctctccacccaagcacccacttcggctggtgtggaggttctgggggagccctcgctaaccagcattgctgtgtccacctggacagcagtggcctcgcatcccttcgcgggctggggtggcccaggagcgggtgggcaccattctccttcctcactggatggttaagcaggatcctaggagcctctttgcacagcgatccttccatgtgtagagtgcttagaaaccccatcaactgatctagtgagtcagactgtggaatctcccttcccactagctggaggtggaggtgggttattacagaagtcatactgggagagggttcagtttggatgatgctagttagatcatttgcatctctccaccattttcttctgcactcccattttctctgcagcttattcttgccatgcttaggtgacagaagtttgttaagtaccatccttgtgccctgcctcttattctcaaatcgttctggaaagcctcacttccttttctgtggagaaggtgcaaagctgttaaatgagctcagagtttacctagctaaggccactgcttcctgctttgtgaagcctggaaagtatgtgtggccacagggctcaggttcacacttctgctttgagaccaggatggggtgtaagccatagagtaaggttaacaaaaagaataaagctaatcatgtattacaaacagcagtgtgcccagacttgtggaaatgaagtcatgtcactcctctgctcagaaaccttcaatggttcaccattaccagtggaatgaagtcaattctcctcactataactgggtgtggtagtttaagcctataatctcagcccttttggaggccaaggtaagaggatcgcttgaggtcaggagttcgagaccagcttgtgcaacaaagtgagagcctgtctctacaaaaaatagtcatgcacacaaaattagctgggcatggtggcctgtgcctatagtcccaactacttagaggaggatcgcttgatctcaggaggttgaggctgcagtgaattatgattgtggcattgcactccagcctgggtggtagatcaaggctttgtttcatttgaaaaaaaagaaagaaagaaagaaagaaagaaatcctactacgagcgatcacaccatctggcctgaaaccacttccccagcttaggtccctctgttatcctgttggcctcctatgtattggtcaaggcaggcatctctgttctctgaacattcattgcactttcccacctctataccttgcctgtgccttagtgtcctcttttttccagttcacctgtgcgaatccgacccacctcccagagcctggctgaaacgtcactccctgcatccaacatctgatctgctgagatatgtctgatctatctctgctcgctgttctcccgttgtttttgcctctgccatagagctcacctcattttgccttgtatttttgttacctgtgagtgtgtctctccctattagactgtaagcctctcgagggtgaggcctagccttcttgtctttgtaacccacagcagctggtactgtgccttgcctattgtaggtgcccaataaacatttgctgaactgaaaaaaaaaaaaaaaaaaaaaaaaaaaaaaaaaaaaaaaaaaaaaaaaaaaaaaaaaaaaaa

SEQ ID NO: 153342 - DNA, 1347 bp, Artificial Sequence
  derived and/or modified sequence
atggccatgagcgagctgggcaccagaaagcccagcgacggcaccgtgagccacctgctgaacgtggtggagagcgagctgcaggccggcagagagaagggcgaccccaccgagaagcagctgcagatcatcctggaggacgcccccctgtggcagagattcaaggaggtgaccaacgagatgatcgtgaccaagaacggcagaagaatgttccccgtgctgaagatcagcgtgaccggcctggaccccaacgccatgtacagcctgctgctggacttcgtgcccaccgacagccacagatggaagtacgtgaacggcgagtgggtgcccgccggcaagcccgaggtgagcagccacagctgcgtgtacatccaccccgacagccccaacttcggcgcccactggatgaaggcccccatcagcttcagcaaggtgaagctgaccaacaagctgaacggcggcggccagatcatgctgaacagcctgcacaagtacgagccccaggtgcacatcgtgagagtgggcagcgcccacagaatggtgaccaactgcagcttccccgagacccagttcatcgccgtgaccgcctaccagaacgaggagatcaccgccctgaagatcaagtacaaccccttcgccaaggccttcctggacgccaaggagagaaaccacctgagagacgtgcccgaggccatcagcgagagccagcacgtgacctacagccacctgggcggctggatcttcagcaaccccgacggcgtgtgcaccgccggcaacagcaactaccagtacgccgcccccctgcccctgcccgccccccacacccaccacggctgcgagcactacagcggcctgagaggccacagacaggccccctaccccagcgcctacatgcacagaaaccacagccccagcgtgaacctgatcgagagcagcagcaacaacctgcaggtgttcagcggccccgacagctggaccagcctgagcagcaccccccacgccagcatcctgagcgtgccccacaccaacggccccatcaaccccggccccagcccctacccctgcctgtggaccatcagcaacggcgccggcggccccagcggccccggccccgaggtgcacgccagcacccccggcgccttcctgctgggcaaccccgccgtgaccagcccccccagcgtgctgagcacccaggcccccaccagcgccggcgtggaggtgctgggcgagcccagcctgaccagcatcgccgtgagcacctggaccgccgtggccagccaccccttcgccggctggggcggccccggcgccggcggccaccacagccccagcagcctggacggctag

SEQ ID NO: 153343 - DNA, 978 bp, Artificial Sequence
  derived and/or modified sequence
atgatcgtgaccaagaacggcagaagaatgttccccgtgctgaagatcagcgtgaccggcctggaccccaacgccatgtacagcctgctgctggacttcgtgcccaccgacagccacagatggaagtacgtgaacggcgagtgggtgcccgccggcaagcccgaggtgagcagccacagctgcgtgtacatccaccccgacagccccaacttcggcgcccactggatgaaggcccccatcagcttcagcaaggtgaagctgaccaacaagctgaacggcggcggccagatcatgctgaacagcctgcacaagtacgagccccaggtgcacatcgtgagagtgggcagcgcccacagaatggtgaccaactgcagcttccccgagacccagttcatcgccgtgaccgcctaccagaacgaggagatcaccgccctgaagatcaagtacaaccccttcgccaaggccttcctggacgccaaggagagaaaccacctgagagacgtgcccgaggccatcagcgagagccagcacgtgacctacagccacctgaacctgatcgagagcagcagcaacaacctgcaggtgttcagcggccccgacagctggaccagcctgagcagcaccccccacgccagcatcctgagcgtgccccacaccaacggccccatcaaccccggccccagcccctacccctgcctgtggaccatcagcaacggcgccggcggccccagcggccccggccccgaggtgcacgccagcacccccggcgccttcctgctgggcaaccccgccgtgaccagcccccccagcgtgctgagcacccaggcccccaccagcgccggcgtggaggtgctgggcgagcccagcctgaccagcatcgccgtgagcacctggaccgccgtggccagccaccccttcgccggctggggcggccccggcgccggcggccaccacagccccagcagcctggacggctag

SEQ ID NO: 153344 - DNA, 957 bp, Artificial Sequence
  derived and/or modified sequence
tgaagaatgttccccgtgctgaagatcagcgtgaccggcctggaccccaacgccatgtacagcctgctgctggacttcgtgcccaccgacagccacagatggaagtacgtgaacggcgagtgggtgcccgccggcaagcccgaggtgagcagccacagctgcgtgtacatccaccccgacagccccaacttcggcgcccactggatgaaggcccccatcagcttcagcaaggtgaagctgaccaacaagctgaacggcggcggccagatcatgctgaacagcctgcacaagtacgagccccaggtgcacatcgtgagagtgggcagcgcccacagaatggtgaccaactgcagcttccccgagacccagttcatcgccgtgaccgcctaccagaacgaggagatcaccgccctgaagatcaagtacaaccccttcgccaaggccttcctggacgccaaggagagaaaccacctgagagacgtgcccgaggccatcagcgagagccagcacgtgacctacagccacctgaacctgatcgagagcagcagcaacaacctgcaggtgttcagcggccccgacagctggaccagcctgagcagcaccccccacgccagcatcctgagcgtgccccacaccaacggccccatcaaccccggccccagcccctacccctgcctgtggaccatcagcaacggcgccggcggccccagcggccccggccccgaggtgcacgccagcacccccggcgccttcctgctgggcaaccccgccgtgaccagcccccccagcgtgctgagcacccaggcccccaccagcgccggcgtggaggtgctgggcgagcccagcctgaccagcatcgccgtgagcacctggaccgccgtggccagccaccccttcgccggctggggcggccccggcgccggcggccaccacagccccagcagcctggacggctag

SEQ ID NO: 153345 - DNA, 846 bp, Artificial Sequence
  derived and/or modified sequence
tgaaaggagagagagctgaactggttctacagaagacagagagtgctgttcgcccacgtgtaccccaccttcaccaacaccagctgcctgtgcaagtgcaagatcaccgccctgaagatcaagtacaaccccttcgccaaggccttcctggacgccaaggagagaaaccacctgagagacgtgcccgaggccatcagcgagagccagcacgtgacctacagccacctgggcggctggatcttcagcaaccccgacggcgtgtgcaccgccggcaacagcaactaccagtacgccgcccccctgcccctgcccgccccccacacccaccacggctgcgagcactacagcggcctgagaggccacagacaggccccctaccccagcgcctacatgcacagaaaccacagccccagcgtgaacctgatcgagagcagcagcaacaacctgcaggtgttcagcggccccgacagctggaccagcctgagcagcaccccccacgccagcatcctgagcgtgccccacaccaacggccccatcaaccccggccccagcccctacccctgcctgtggaccatcagcaacggcgccggcggccccagcggccccggccccgaggtgcacgccagcacccccggcgccttcctgctgggcaaccccgccgtgaccagcccccccagcgtgctgagcacccaggcccccaccagcgccggcgtggaggtgctgggcgagcccagcctgaccagcatcgccgtgagcacctggaccgccgtggccagccaccccttcgccggctggggcggccccggcgccggcggccaccacagccccagcagcctggacggctag

SEQ ID NO: 153346 - DNA, 1347 bp, Artificial Sequence
  derived and/or modified sequence
atggccatgtcagaactggggactcgcaagccttcagacggtacagtatctcatctgctgaacgtcgtggaaagtgagcttcaggcaggaagggagaaaggcgatcccaccgagaaacagctgcaaattatcctcgaagatgcccccctttggcaacgattcaaagaggtgacaaacgaaatgatagtcactaagaatggcagacggatgtttcccgtgctgaagatctctgtgacgggactggacccgaatgctatgtatagcctgttgctggacttcgtgcctaccgacagtcatagatggaagtatgttaacggagagtgggtcccagctggaaaaccagaagtttctagccacagttgcgtctatattcaccccgattcacccaacttcggagctcattggatgaaggctccgatcagttttagcaaggttaaactgaccaacaaattaaacggaggtggtcagataatgctaaattctctccataaatatgaaccccaggtgcacatcgtccgcgtgggatccgctcaccggatggtgaccaactgctcattcccggaaacccagttcatcgcggtcacagcgtatcagaacgaagagattactgcccttaagatcaagtataacccgttcgcaaaagcattcctggatgccaaggagcgcaatcacctgcgggatgtgcctgaggcaatatccgaatcacagcacgtcacatacagccacctgggcgggtggatcttctcaaacccagatggggtctgtacagcgggcaactcaaactatcagtacgcagctcctttgccgctgcccgctccacacactcaccacggatgtgagcactactcggggttgcggggccatcgacaggctccttatccatccgcttatatgcacaggaatcatagtccaagtgtgaacttgatcgagtcctccagtaataacctgcaggtattctcgggtcccgattcctggacctcattgagcagtacaccccatgctagtatcttgagcgtcccacacaccaacggtcccattaacccaggaccatctccgtatccttgcctctggactatttccaatggtgccggaggcccaagcggacccggccccgaggttcatgctagcacgcccggagccttccttttaggaaaccccgccgtgacaagtcctcccagtgtcctgtctacacaggccccgacgagcgctggagtggaggttctgggcgagccctcactgaccagcatcgcagtttctacctggactgcggtggcctcccacccctttgcagggtgggggggacctggagcaggcggacaccatagtccctcctccttagacggatag

SEQ ID NO: 153347 - DNA, 978 bp, Artificial Sequence
  derived and/or modified sequence
atgatcgtaacaaaaaacgggcggcgcatgtttcccgttctgaaaatcagcgtgactggactggacccaaatgcaatgtacagcttattgcttgatttcgttccaaccgactctcatagatggaagtacgtcaacggcgagtgggtgcccgctggaaaaccagaagtgtcttcacattcatgtgtgtatatccatccagattcacctaatttcggtgctcactggatgaaagcgcccatctcattctctaaggtgaaacttacaaataagctaaatggcggcgggcaaattatgctcaattcactgcacaagtacgagccacaggtgcacatagtgcgtgtcggctccgctcaccgcatggttactaattgctcctttccagagacccaatttatcgccgtgacggcttaccagaatgaggaaattactgccctcaaaatcaaatataatcctttcgcgaaggctttcctggatgcaaaggagcggaatcacctcagggacgtaccagaggccatctctgagagccagcatgtgacttatagccacctaaatctgatagagtcgtccagtaataatctgcaagtcttctcaggccccgactcttggacctcgctttcttctaccccgcatgccagtattctttcggtgccccacacgaacgggcccatcaatccaggaccctccccctacccttgcctgtggaccatatcaaacggcgccgggggtccttccggcccgggacctgaggtgcacgcatcaactcccggggctttccttttaggcaacccggctgtcacttccccaccgagcgtgctcagtacccaggctcccacatctgctggtgtggaggtgctcggtgagcccagtctaaccagcatcgctgtaagtacgtggactgctgtggcaagtcacccctttgctggctgggggggtcccggtgctgggggccaccattccccctcctctttggatggctag

SEQ ID NO: 153348 - DNA, 957 bp, Artificial Sequence
  derived and/or modified sequence
tagcgcatgttccctgtgctgaagatatccgtcaccggcttagatcccaacgctatgtattccctccttcttgacttcgtcccgacagatagccacagatggaagtacgtgaacggtgagtgggtaccagccggcaagcctgaggtgtccagccactcatgtgtttacatccaccccgacagtcctaatttcggtgctcactggatgaaagccccgatttctttcagcaaagtaaagctcaccaacaaattgaacggcggcggacagatcatgctgaattctctgcacaagtatgagccacaggtgcatatcgtgcgggtgggttcagctcatcgcatggttactaattgctcttttccggagacgcaattcattgccgtaacagcctaccagaacgaagaaattactgcattgaagataaagtacaacccattcgccaaggcctttcttgacgctaaagagcggaatcacctgcgagatgtgccggaggccatatcggaaagtcaacacgttacctactctcatctcaatctgattgagagctcatcgaataatctgcaagtgtttagtggcccagatagctggacaagcctcagctcgaccccacatgcgagcatcctatctgtcccccatacgaacggaccaatcaacccaggaccctcaccttacccctgtctgtggaccatcagcaatggcgcaggtggaccgtctggccccggcccagaagtgcacgctagcacgcccggagcatttctccttggcaaccccgccgttacaagcccaccttcagtactcagcactcaggctcccacttcagctggggtcgaggtccttggcgaaccaagcctgacctcaatcgccgtgtctacttggacagcagtggcttcccaccccttcgccggctggggtggaccgggcgccgggggacaccactccccctcttccctggacggatag

SEQ ID NO: 153349 - DNA, 846 bp, Artificial Sequence
  derived and/or modified sequence
tgaaaggaacgcgaactgaactggttctaccgccggcagcgagtactctttgcccacgtctatcccaccttcacaaatacgtcatgcctctgtaaatgcaaaatcacggcgctcaaaatcaaatacaacccctttgccaaggcattcctcgatgcaaaggaaagaaatcatctgcgcgacgtccccgaggccataagcgaatcccagcacgtgacttattcccacttagggggctggatcttctctaatcctgatggggtctgcaccgcagggaatagcaactaccaatatgccgcacccctaccactccccgcacctcatacccatcatggttgcgaacactacagcggactcagggggcaccgccaggcgccatacccttcggcctatatgcatagaaaccactcaccgagcgtgaaccttattgagtcgagtagcaataacctccaggtgttcagtggccccgatagttggacaagcctgagctctacccctcacgcaagcatacttagcgttccccatacgaacggccctataaatccgggaccctccccctacccttgtctttggacaataagcaacggagccggagggcccagcggacccggtcccgaggtgcacgcttcgacgcctggtgccttcctgctgggtaatcctgccgtgacaagtcccccgagtgtgctgtcgacacaggccccaacttccgcaggagtcgaagttctcggggaaccctccctaacctccattgcggtttccacatggacagccgttgcctctcaccctttcgccggatggggcggacccggtgcaggtggccaccatagtccctcttctctggatggatag

SEQ ID NO: 153350 - DNA, 1347 bp, Artificial Sequence
  derived and/or modified sequence
atggccatgtctgagctgggcaccaggaagcccagtgatggcaccgtgagccacctgctgaatgtggtggagagcgagctgcaggccggccgggagaagggggaccccacagagaagcagctgcagatcatcctggaggatgcccccctgtggcagcgcttcaaggaggtgaccaatgagatgattgtgaccaagaatggccgcaggatgtttcctgtgctgaagatctctgtgacaggcctggaccccaatgccatgtacagcctgctgctggactttgtgcccacagacagccaccgctggaagtatgtgaatggagagtgggtgcctgctgggaagccagaggtgagcagccacagctgtgtgtacatccacccagacagccccaactttggagcccactggatgaaggcccccatctccttcagcaaggtgaagctgaccaacaagctgaatggaggcggccagatcatgctgaacagcctgcacaagtatgagccccaggtgcacatcgtgcgggtgggcagcgcccacaggatggtgaccaactgcagcttccctgagacccagttcatcgctgtgacagcctaccagaatgaggagatcacagccctgaagatcaagtacaacccctttgccaaggccttcctggatgccaaggagaggaaccacctgagagatgtgcctgaggccatcagcgagagccagcacgtgacctacagccacctgggcggctggatcttcagcaacccagatggagtgtgcacagctggcaacagcaactaccagtatgctgcccccctgcccctgcctgccccccacacccaccacggctgtgagcactacagcggcctgcggggccaccggcaggccccctaccccagcgcctacatgcacaggaaccacagccccagcgtgaacctgattgagagcagcagcaacaacctgcaggtgttcagcggccctgacagctggaccagcctgagcagcacccctcatgccagcatcctgtctgtgccccacaccaacggccccatcaaccctggccccagcccctacccctgcctgtggaccatcagcaatggagctgggggccccagcggccctggccctgaggtgcacgccagcacccctggggccttcctgctgggcaacccagctgtgaccagccccccatctgtgctgagcacccaggcccccaccagcgctggggtggaggtgctgggggagcccagcctgaccagcattgctgtgtccacctggacagctgtggccagccacccctttgctggctggggcggccctggagctgggggccaccacagccccagcagcctggatggatag

SEQ ID NO: 153351 - DNA, 978 bp, Artificial Sequence
  derived and/or modified sequence
atgattgtgaccaagaatggccgcaggatgtttcctgtgctgaagatctctgtgacaggcctggaccccaatgccatgtacagcctgctgctggactttgtgcccacagacagccaccgctggaagtatgtgaatggagagtgggtgcctgctgggaagccagaggtgagcagccacagctgtgtgtacatccacccagacagccccaactttggagcccactggatgaaggcccccatctccttcagcaaggtgaagctgaccaacaagctgaatggaggcggccagatcatgctgaacagcctgcacaagtatgagccccaggtgcacatcgtgcgggtgggcagcgcccacaggatggtgaccaactgcagcttccctgagacccagttcatcgctgtgacagcctaccagaatgaggagatcacagccctgaagatcaagtacaacccctttgccaaggccttcctggatgccaaggagaggaaccacctgagagatgtgcctgaggccatcagcgagagccagcacgtgacctacagccacctgaacctgattgagagcagcagcaacaacctgcaggtgttttctggccctgacagctggaccagcctgagcagcaccccccacgccagcatcctgtctgtgccccacaccaacggccccatcaaccctggccccagcccctacccctgcctgtggaccatcagcaatggagctgggggccccagcggccctggccctgaggtgcacgccagcacccctggggccttcctgctgggcaacccagctgtgaccagcccccccagcgtgctgagcacccaggcccccaccagcgctggggtggaggtgctgggggagcccagcctgaccagcattgctgtgtccacctggacagctgtggccagccacccctttgctggctggggcggccctggggccggcggccaccacagccccagcagcctggatggatag

SEQ ID NO: 153352 - DNA, 957 bp, Artificial Sequence
  derived and/or modified sequence
tgaagaatgtttcctgtgctgaagatctctgtgacaggcctggaccccaatgccatgtacagcctgctgctggactttgtgcccacagacagccaccgctggaagtatgtgaatggagagtgggtgcctgctgggaagccagaggtgagcagccacagctgtgtgtacatccacccagacagccccaactttggagcccactggatgaaggcccccatctccttcagcaaggtgaagctgaccaacaagctgaatggaggcggccagatcatgctgaacagcctgcacaagtatgagccccaggtgcacatcgtgcgggtgggcagcgcccacaggatggtgaccaactgcagcttccctgagacccagttcatcgctgtgacagcctaccagaatgaggagatcacagccctgaagatcaagtacaacccctttgccaaggccttcctggatgccaaggagaggaaccacctgagagatgtgcctgaggccatcagcgagagccagcacgtgacctacagccacctgaacctgattgagagcagcagcaacaacctgcaggtgttcagcggccctgacagctggaccagcctgagcagcacccctcatgccagcatcctgtctgtgccccacaccaacggccccatcaaccctggccccagcccctacccctgcctgtggaccatcagcaatggagctgggggccccagcggccctggccctgaggtgcacgccagcacccctggggccttcctgctgggcaacccagctgtgaccagccccccatctgtgctgagcacccaggcccccaccagcgctggggtggaggtgctgggggagcccagcctgaccagcattgctgtgtccacctggacagctgtggccagccacccctttgctggctggggcggccctggagctgggggccaccacagccccagcagcctggatggatag

SEQ ID NO: 153353 - DNA, 846 bp, Artificial Sequence
  derived and/or modified sequence
tgaaaggagcgggagctgaactggttctaccgccggcagagggtgctgtttgcccacgtgtaccccaccttcaccaacaccagctgcctgtgcaagtgcaagatcacagccctgaagatcaagtacaacccctttgccaaggccttcctggatgccaaggagaggaaccacctgagagatgtgcctgaggccatcagcgagagccagcacgtgacctacagccacctgggcggctggatcttcagcaacccagatggagtgtgcacagctggcaacagcaactaccagtatgctgcccccctgcccctgcctgccccccacacccaccacggctgtgagcactacagcggcctgcggggccaccggcaggccccctaccccagcgcctacatgcacaggaaccacagccccagcgtgaacctgattgagagcagcagcaacaacctgcaggtgttttctggccctgacagctggaccagcctgagcagcaccccccacgccagcatcctgtctgtgccccacaccaacggccccatcaaccctggccccagcccctacccctgcctgtggaccatcagcaatggagctgggggccccagcggccctggccctgaggtgcacgccagcacccctggggccttcctgctgggcaacccagctgtgaccagcccccccagcgtgctgagcacccaggcccccaccagcgctggggtggaggtgctgggggagcccagcctgaccagcattgctgtgtccacctggacagctgtggccagccacccctttgctggctggggcggccctggggccggcggccaccacagccccagcagcctggatggatag

SEQ ID NO: 153354 - DNA, 1347 bp, Artificial Sequence
  derived and/or modified sequence
atggccatgagcgagctgggcacccggaagcccagcgacggcaccgtcagccatctgctaaatgtcgttgaatcagaattgcaggccggccgagaaaaaggagaccccaccgaaaagcagttacaaatcattctcgaggatgctccgctgtggcagcgttttaaggaagtcaccaatgaaatgatcgtgactaagaacggccgtaggatgtttccagtgctgaaaataagcgtaacggggctggaccccaacgcaatgtattctctgctcctggacttcgtacccactgactcacatagatggaaatatgtgaatggagaatgggtccctgctggcaaacctgaagttagctcccattcatgcgtgtatatccaccccgactcgcccaattttggagctcactggatgaaagccccgatctccttttcaaaagttaagttgaccaataaactgaatggtggtggtcagatcatgctgaactccctgcacaagtatgaaccacaggtgcacatcgtaagggttggcagcgctcacagaatggtgacaaactgctcgtttcctgaaacacagtttatagctgtgaccgcttatcagaatgaggagattacagcactcaaaataaaatacaatcctttcgcaaaagccttcctcgatgcaaaagagcggaaccaccttagggacgtgccagaagcaatctcagagtcccaacatgtgacatatagtcacctggggggctggattttttccaacccagacggggtgtgtaccgccggtaactctaattaccagtacgccgctccactgccacttccggccccacatactcaccatggctgcgaacattactccggcctgcgggggcatcggcaggccccctacccttcagcttacatgcaccggaatcatagcccttcggttaatttaatagaatcctctagcaataatttgcaggtgttttctggtcctgattcttggacatccctgtcgtccacacctcatgccagcatcctgtctgtgccacataccaacgggcccatcaacccgggaccttccccgtacccttgtctgtggactatctctaatggcgcgggtggcccatccggacccggaccagaggtacatgcctcaacccccggcgcctttcttctggggaatcctgcggtcaccagcccaccatccgttctgtcaacgcaggccccaacatcagccggtgtggaagtgcttggtgagccgagcttgactagtatcgctgtgtccacctggacagctgtagcatctcacccctttgctggatgggggggtcctggtgctggcgggcatcatagtccttctagcctggacggttag

SEQ ID NO: 153355 - DNA, 978 bp, Artificial Sequence
  derived and/or modified sequence
atgatcgtgaccaagaacggccggcggatgttccccgtgctgaagatctccgtaaccggactggacccaaatgcaatgtatagcttattgctggactttgtcccaactgactctcaccgctggaagtatgttaatggggaatgggtgccagccggaaaacccgaggttagcagtcatagctgcgtgtacatacatcccgattcgcccaacttcggagcacattggatgaaggcacccatttccttctctaaggtgaagttgacgaataagttgaacggtgggggacagatcatgctgaacagtttgcacaaatatgaaccgcaggtacatatagtacgtgtgggctccgctcataggatggtcactaactgttcttttcccgaaacccagtttatagccgtaaccgcttatcagaacgaagagattaccgctctgaagatcaagtataatcccttcgccaaggcattcctggacgccaaagagcgcaatcacttgagggacgtgccagaagccatcagtgagagccagcacgtaacgtattcccatcttaatttgatcgaaagctctagtaacaatcttcaggtgttcagcggccctgattcttggacttctctgtcctcaaccccacacgcctcaatccttagcgtccctcacaccaacggcccaattaaccccggccctagtccctatccatgtctgtggacgataagcaacggagccggcggtccgtctgggccgggacctgaggtccatgccagtacgccaggagcctttctcttgggcaacccagctgtgacaagccccccatctgtcttgagcacccaagcaccaacttcagctggtgtggaagtgctaggcgagccatcgctgacaagtatcgcagtgtccacctggactgctgtcgcatctcatccatttgctggctggggtggtcctggagctggcggacatcacagcccctccagcctggacgggtag

SEQ ID NO: 153356 - DNA, 957 bp, Artificial Sequence
  derived and/or modified sequence
tgacggatgttccccgtgctgaagatcagcgtgaccggcctggacccaaacgcgatgtactctcttctgttggacttcgtgcccaccgactcccacagatggaagtacgtgaatggtgaatgggtccccgcggggaagcccgaggtctcatctcacagttgcgtgtacatacatccagattcccccaacttcggcgctcactggatgaaggcaccaatttctttctctaaggtcaagctgacaaacaaactgaatggaggtgggcagataatgctgaatagtttgcataagtatgagccccaggtgcacatcgtgcgggttggttccgcgcatcgcatggtgactaattgtagctttcctgaaacccagtttatcgctgtcactgcataccaaaacgaagagattaccgcactgaaaataaagtataaccccttcgccaaagcgttcctcgacgccaaggagcgaaaccatctgcgtgatgtgcctgaagctataagcgagtctcagcacgtgacatatagtcacctgaacttgatcgagtcatccagtaacaacttacaggtgttctcgggaccagattcatggaccagcctcagttcaaccccccacgcaagtattctgagtgtcccacacactaatgggccaatcaatcctgggccttccccttacccatgtctttggaccatatccaacggtgctggtggaccgagcgggccggggcctgaagtgcacgctagtactcccggtgctttcctccttgggaatcccgcagtaacctctccaccgtctgtgctgtccacccaggctccaacgtcggctggcgtcgaagttctgggtgagccatccctgacatctattgccgtatccacatggacagctgtggcctcacaccccttcgccggatggggaggccctggtgctggtggacaccactcaccatcttccctggatggatag

SEQ ID NO: 153357 - DNA, 846 bp, Artificial Sequence
  derived and/or modified sequence
tgaaaggagcgggagctgaactggttctaccggcggcagcgggtgctgttcgcgcacgtgtacccgacatttactaacacatcctgcctctgtaagtgcaagattaccgccctcaagatcaaatacaaccccttcgctaaggctttcctggacgctaaagagcggaatcatttgcgtgatgtacccgaggccatctcagaatcacagcatgtgacttatagccatctgggggggtggatcttctctaacccagatggcgtatgcaccgccgggaacagcaactatcagtatgctgccccgttaccacttcctgctcctcacacacaccacggctgcgaacattactctgggcttaggggccaccggcaggcgccctacccgtccgcgtatatgcataggaatcacagcccttcggttaaccttatagagagctcctctaataacttgcaggtttttagtgggcctgactcctggacgtcgctctcctctacaccccacgctagtatattgtctgtgccacacaccaacggacctatcaacccggggccttctccctatccatgtttatggacaattagtaacggagctggcgggccctcagggccaggacccgaagtgcatgccagtacgccaggggcctttctattgggtaaccctgccgtcacaagtcccccgtcagttctcagcacacaggcccccacctctgcgggcgtggaagtcttgggtgagcccagcttaacttcaattgccgttagcacctggaccgccgtggcctcgcacccttttgccggatggggggggccaggggcaggaggccatcattcccccagttctctggatggctag

SEQ ID NO: 153358 - DNA, 1347 bp, Artificial Sequence
  derived and/or modified sequence
atggctatgagtgaattagggacccgcaaacccagcgatgggaccgtaagccatcttcttaatgtggtggagtcagaactgcaggccggtcgggagaaaggcgatccaaccgaaaaacaacttcagatcattctggaggacgcacctctgtggcagaggttcaaagaagtcacaaacgaaatgattgttacgaaaaacggcagacggatgtttcccgtgctgaagatctccgtgacaggcctggatcctaacgccatgtattcgctactgctcgattttgtcccaaccgatagtcacagatggaagtacgtgaacggtgagtgggtcccagccggtaaacctgaagtgagctctcattcctgtgtgtatatacaccctgactcacctaattttggcgcacattggatgaaagctcccattagctttagcaaagtgaaactgacgaataaactaaatgggggagggcagattatgttgaactccctccacaagtacgagcctcaggtacatattgtgcgcgtgggctctgcccatagaatggtgactaattgcagcttcccagaaacccagtttattgccgtaacggcttaccagaatgaggaaatcactgcactgaagataaagtacaacccgttcgctaaagcttttctcgatgcaaaagaacggaatcacctgagagatgtgcctgaggcaattagcgagtcacagcatgtgacttactctcacctgggcggatggattttttcaaaccccgacggagtgtgtactgcgggaaactccaactatcaatacgccgctccgctgcccctgcccgctcctcatacccatcatggttgcgaacactattccggcctgcgtggacacagacaagcgccatacccatctgcatacatgcatcggaatcattcaccttctgttaacctcatcgaatcatccagtaacaatctccaggttttctccggaccagatagttggacgagcctttccagcacccctcatgcttctatcctgtccgtaccccacactaacggacctatcaacccaggaccatccccgtacccgtgcttatggaccatctccaacggggcagggggacccagtgggcctggacctgaagtccacgcaagtacccccggagcttttctgctgggtaaccccgcagttactagtccaccctccgtattgtccacccaggctccaaccagcgccggagtggaggtgttgggggagccatctctgaccagtattgccgtgtctacgtggaccgcagtggcctctcatccattcgcaggttggggaggccctggtgccggtggtcatcactctccctcctcactcgacggatag

SEQ ID NO: 153359 - DNA, 978 bp, Artificial Sequence
  derived and/or modified sequence
atgatcgtcaccaaaaatggcaggagaatgttccccgtgctgaagatatctgtgactggcctagaccctaatgccatgtactccctgctgctagactttgtccccactgacagccatcgctggaaatacgttaatggtgaatgggttccagcaggaaagccggaagtgagttcccactcatgtgtgtacatccaccctgactcccctaacttcggcgcacactggatgaaggccccaatatcttttagcaaggtcaagctgaccaataaattgaacggcggtggacagattatgctgaattcactgcacaagtatgagccacaggtgcacatagttcgcgtgggctctgcgcataggatggttactaattgtagcttccctgagacacaatttatcgccgtgacagcatatcagaatgaggaaatcaccgccctgaagattaagtataatccattcgcaaaggcttttcttgacgctaaagagcgcaatcacttacgggacgtgcccgaagcgatcagcgagagtcagcacgtaacttacagtcacctgaatctcatcgagagttcctctaataatctccaggttttttcaggcccagactcgtggacgtcactgtcatctactccacatgcttccattctgtcggttccgcacactaacggacccatcaacccgggacccagcccatatccctgtctctggaccatatctaatggcgctggcggaccatctggcccaggacccgaagtgcatgctagtactcctggggcatttctcctgggcaatcctgccgtcacctccccaccatctgtgttatctacccaggctccaacgagtgcaggagtcgaggtgttgggagagccatctctgacttctatagccgtgagcacctggaccgctgtcgcctcccacccttttgccggatggggtggacctggagccggagggcatcactctccaagcagtctggacggctag

SEQ ID NO: 153360 - DNA, 957 bp, Artificial Sequence
  derived and/or modified sequence
tgaaggatgttccctgtgcttaagatcagcgtgaccggactcgaccccaatgccatgtactcactcttgctcgatttcgttcccacggatagccacaggtggaaatatgtgaatggcgagtgggtccctgctggcaaaccagaagtgtcctctcattcctgcgtctacatccatcccgactcacccaactttggcgctcactggatgaaggcacctatcagcttcagtaaagttaagttgacaaacaaacttaacggagggggtcaaataatgctgaatagcctgcacaagtatgagccacaggtacacattgtgagagtggggagtgctcataggatggtcacaaattgctctttccccgagactcagtttatcgctgtaacagcctatcagaatgaggaaataaccgcactcaagatcaagtataatccttttgctaaagcgttccttgacgccaaagagcggaaccacctgcgggacgttccggaggctatcagcgaatctcagcatgtcacttacagccatctgaacttaatagagagttcttcgaataaccttcaagtgttctccggccctgacagctggacgtcattgagttcaactccccacgcaagcattcttagcgtgccccatacaaacgggccaattaaccccggaccctccccctatccttgtctgtggacgatcagcaacggtgccggagggccatccggtcctggaccagaggtccatgcttctactcctggagcttttctgctcgggaatccagccgtcacctctcccccatcggtgttaagcacgcaagccccaacgtctgcaggagtcgaggtgctgggggagccatcactgacctctattgctgtctctacatggacagctgttgcctctcacccctttgccggatggggcggtccgggtgccggtggacatcattctcctagttccctggacggatag

SEQ ID NO: 153361 - DNA, 846 bp, Artificial Sequence
  derived and/or modified sequence
taaaaagaacgagagctcaattggttctacagacgtcagcgggttctgttcgcccacgtgtaccctacattcaccaacacaagctgcctgtgtaaatgcaagatcactgcactaaagattaagtacaatcctttcgccaaggcgttcctcgacgctaaggagagaaatcacttgagagatgtgccagaagcaattagcgaatcccagcacgtgacttacagccacctggggggttggatattcagtaaccctgacggggtgtgtacagccggtaatagcaactatcagtacgccgctcccctacccctgcctgctccccacacccaccacgggtgtgaacattattctggcctgagggggcacaggcaagctccatatccctcagcttacatgcacagaaatcacagcccatctgtcaacctgattgagagctcctctaacaatctacaggttttttccggacccgatagctggacatccctatccagcacaccccacgctagtatcctgtccgtgccccatactaacggtcccataaacccaggcccatccccttatccctgcttgtggacaattagcaatggagcaggcggtccaagcgggccaggacctgaagtgcacgctagtactcccggagcctttttgctggggaatccggcagtgacttccccccctagtgtcctcagcacacaggctccgacatcagccggagtagaggtgctaggagagcccagtctgacctctatcgctgtgtctacctggaccgctgtggcctcacacccctttgccggatggggaggtccaggagcgggagggcaccacagtccatccagtctggacgggtag

SEQ ID NO: 153362 - DNA, 2822 bp, Artificial Sequence
  derived and/or modified sequence
tagaagcaggcaagttgggtaacggctctcggcaaagttcgagaagtgcctatggccatgagtgagctgggcactcggaagcccagcgatggcactgtttctcatctgctcaatgtggtggagagtgagcttcaggcagggagggaaaaaggcgaccctacggagaagcaacttcagatcatcctggaggatgcacctctctggcagagattcaaggaagtcactaatgagatgattgtgaccaagaatggcagacggatgtttccagtcctaaagattagtgtcacagggttggaccccaatgccatgtactccctcctgctggactttgtccctacggacagtcaccgctggaagtacgtcaacggggaatgggtgcccgctggcaagccagaggtctccagccacagctgcgtctacattcacccggactcccccaactttggggcccactggatgaaagctcccatctccttcagcaaagtgaagctgaccaacaagctcaatggaggcgggcagataatgttgaattctctgcataaatatgaaccccaggttcacatagtgcgtgttggaagtgcccatcgaatggtaacaaactgctccttccctgaaacccagttcatagccgtgactgcctatcagaatgaggagataacggctctcaaaatcaagtacaatccttttgccaaagccttcttggatgccaaggaaagaaatcacctaagagacgtaccggaggctatctctgagagccagcatgtgacctattctcacttgggaggctggatcttttccaatccagatggagtgtgcacagcaggaaactccaattaccagtatgccgctcctctgcctctgcctgctccccacacccaccatggctgtgagcactattcgggtctccgaggacaccggcaggctccctacccttctgcgtacatgcacagaaaccattctccctcagtgaatttgatagaaagctcaagcaataatctgcaagttttctcgggacctgacagctggacttccttatcctccacaccccatgccagcatcctgtctgtaccccacaccaacggaccaatcaatccagggcccagcccctacccgtgcctgtggaccatcagcaatggtgccggaggccccagtgggccaggcccggaggtgcacgccagcaccccaggagcatttctcctcggaaacccagctgtgacttcacccccttctgtgctctccacccaagcacccacttcggctggtgtggaggttctgggggagccctcgctaaccagcattgctgtgtccacctggacagcagtggcctcgcatcccttcgcgggctggggtggcccaggagcgggtgggcaccattctccttcctcactggatggttaagcaggatcctaggagcctctttgcacagcgatccttccatgtgtagagtgcttagaaaccccatcaactgatctagtgagtcagactgtggaatctcccttcccactagctggaggtggaggtgggttattacagaagtcatactgggagagggttcagtttggatgatgctagttagatcatttgcatctctccaccattttcttctgcactcccattttctctgcagcttattcttgccatgcttaggtgacagaagtttgttaagtaccatccttgtgccctgcctcttattctcaaatcgttctggaaagcctcacttccttttctgtggagaaggtgcaaagctgttaaatgagctcagagtttacctagctaaggccactgcttcctgctttgtgaagcctggaaagtatgtgtggccacagggctcaggttcacacttctgctttgagaccaggatggggtgtaagccatagagtaaggttaacaaaaagaataaagctaatcatgtattacaaacagcagtgtgcccagacttgtggaaatgaagtcatgtcactcctctgctcagaaaccttcaatggttcaccattaccagtggaatgaagtcaattctcctcactataactgggtgtggtagtttaagcctataatctcagcccttttggaggccaaggtaagaggatcgcttgaggtcaggagttcgagaccagcttgtgcaacaaagtgagagcctgtctctacaaaaaatagtcatgcacacaaaattagctgggcatggtggcctgtgcctatagtcccaactacttagaggaggatcgcttgatctcaggaggttgaggctgcagtgaattatgattgtggcattgcactccagcctgggtggtagatcaaggctttgtttcatttgaaaaaaaagaaagaaagaaagaaagaaagaaatcctactacgagcgatcacaccatctggcctgaaaccacttccccagcttaggtccctctgttatcctgttggcctcctatgtattggtcaaggcaggcatctctgttctctgaacattcattgcactttcccacctctataccttgcctgtgccttagtgtcctcttttttccagttcacctgtgcgaatccgacccacctcccagagcctggctgaaacgtcactccctgcatccaacatctgatctgctgagatatgtctgatctatctctgctcgctgttctcccgttgtttttgcctctgccatagagctcacctcattttgccttgtatttttgttacctgtgagtgtgtctctccctattagactgtaagcctctcgagggtgaggcctagccttcttgtctttgtaacccacagcagctggtactgtgccttgcctattgtaggtgcccaataaacatttgctgaactgaa

SEQ ID NO: 153363 - DNA, 2631 bp, Artificial Sequence
  derived and/or modified sequence
tagaagcaggcaagttgggtaacggctctcggcaaagttcgagaagtgcctatggccatgagtgagctgggcactcggaagcccagcgatggcactgtttctcatctgctcaatgtggtggagagtgagcttcaggcagggagggaaaaaggcgaccctacggagaagcaacttcagatcatcctggaggatgcacctctctggcagagattcaaggaagtcactaatgagatgattgtgaccaagaatggcagacggatgtttccagtcctaaagattagtgtcacagggttggaccccaatgccatgtactccctcctgctggactttgtccctacggacagtcaccgctggaagtacgtcaacggggaatgggtgcccgctggcaagccagaggtctccagccacagctgcgtctacattcacccggactcccccaactttggggcccactggatgaaagctcccatctccttcagcaaagtgaagctgaccaacaagctcaatggaggcgggcagataatgttgaattctctgcataaatatgaaccccaggttcacatagtgcgtgttggaagtgcccatcgaatggtaacaaactgctccttccctgaaacccagttcatagccgtgactgcctatcagaatgaggagataacggctctcaaaatcaagtacaatccttttgccaaagccttcttggatgccaaggaaagaaatcacctaagagacgtaccggaggctatctctgagagccagcatgtgacctattctcacttgaatttgatagaaagctcaagcaataatctgcaagttttctcgggacctgacagctggacttccttatcctccacaccccatgccagcatcctgtctgtaccccacaccaacggaccaatcaatccagggcccagcccctacccgtgcctgtggaccatcagcaatggtgccggaggccccagtgggccaggcccggaggtgcacgccagcaccccaggagcatttctcctcggaaacccagctgtgacttcacccccttctgtgctctccacccaagcacccacttcggctggtgtggaggttctgggggagccctcgctaaccagcattgctgtgtccacctggacagcagtggcctcgcatcccttcgcgggctggggtggcccaggagcgggtgggcaccattctccttcctcactggatggttaagcaggatcctaggagcctctttgcacagcgatccttccatgtgtagagtgcttagaaaccccatcaactgatctagtgagtcagactgtggaatctcccttcccactagctggaggtggaggtgggttattacagaagtcatactgggagagggttcagtttggatgatgctagttagatcatttgcatctctccaccattttcttctgcactcccattttctctgcagcttattcttgccatgcttaggtgacagaagtttgttaagtaccatccttgtgccctgcctcttattctcaaatcgttctggaaagcctcacttccttttctgtggagaaggtgcaaagctgttaaatgagctcagagtttacctagctaaggccactgcttcctgctttgtgaagcctggaaagtatgtgtggccacagggctcaggttcacacttctgctttgagaccaggatggggtgtaagccatagagtaaggttaacaaaaagaataaagctaatcatgtattacaaacagcagtgtgcccagacttgtggaaatgaagtcatgtcactcctctgctcagaaaccttcaatggttcaccattaccagtggaatgaagtcaattctcctcactataactgggtgtggtagtttaagcctataatctcagcccttttggaggccaaggtaagaggatcgcttgaggtcaggagttcgagaccagcttgtgcaacaaagtgagagcctgtctctacaaaaaatagtcatgcacacaaaattagctgggcatggtggcctgtgcctatagtcccaactacttagaggaggatcgcttgatctcaggaggttgaggctgcagtgaattatgattgtggcattgcactccagcctgggtggtagatcaaggctttgtttcatttgaaaaaaaagaaagaaagaaagaaagaaagaaatcctactacgagcgatcacaccatctggcctgaaaccacttccccagcttaggtccctctgttatcctgttggcctcctatgtattggtcaaggcaggcatctctgttctctgaacattcattgcactttcccacctctataccttgcctgtgccttagtgtcctcttttttccagttcacctgtgcgaatccgacccacctcccagagcctggctgaaacgtcactccctgcatccaacatctgatctgctgagatatgtctgatctatctctgctcgctgttctcccgttgtttttgcctctgccatagagctcacctcattttgccttgtatttttgttacctgtgagtgtgtctctccctattagactgtaagcctctcgagggtgaggcctagccttcttgtctttgtaacccacagcagctggtactgtgccttgcctattgtaggtgcccaataaacatttgctgaactg

SEQ ID NO: 153364 - DNA, 2377 bp, Artificial Sequence
  derived and/or modified sequence
acggatgtttccagtcctaaagattagtgtcacagggttggaccccaatgccatgtactccctcctgctggactttgtccctacggacagtcaccgctggaagtacgtcaacggggaatgggtgcccgctggcaagccagaggtctccagccacagctgcgtctacattcacccggactcccccaactttggggcccactggatgaaagctcccatctccttcagcaaagtgaagctgaccaacaagctcaatggaggcgggcagataatgttgaattctctgcataaatatgaaccccaggttcacatagtgcgtgttggaagtgcccatcgaatggtaacaaactgctccttccctgaaacccagttcatagccgtgactgcctatcagaatgaggagataacggctctcaaaatcaagtacaatccttttgccaaagccttcttggatgccaaggaaagaaatcacctaagagacgtaccggaggctatctctgagagccagcatgtgacctattctcacttgaatttgatagaaagctcaagcaataatctgcaagttttctcgggacctgacagctggacttccttatcctccacaccccatgccagcatcctgtctgtaccccacaccaacggaccaatcaatccagggcccagcccctacccgtgcctgtggaccatcagcaatggtgccggaggccccagtgggccaggcccggaggtgcacgccagcaccccaggagcatttctcctcggaaacccagctgtgacttcacccccttctgtgctctccacccaagcacccacttcggctggtgtggaggttctgggggagccctcgctaaccagcattgctgtgtccacctggacagcagtggcctcgcatcccttcgcgggctggggtggcccaggagcgggtgggcaccattctccttcctcactggatggttaagcaggatcctaggagcctctttgcacagcgatccttccatgtgtagagtgcttagaaaccccatcaactgatctagtgagtcagactgtggaatctcccttcccactagctggaggtggaggtgggttattacagaagtcatactgggagagggttcagtttggatgatgctagttagatcatttgcatctctccaccattttcttctgcactcccattttctctgcagcttattcttgccatgcttaggtgacagaagtttgttaagtaccatccttgtgccctgcctcttattctcaaatcgttctggaaagcctcacttccttttctgtggagaaggtgcaaagctgttaaatgagctcagagtttacctagctaaggccactgcttcctgctttgtgaagcctggaaagtatgtgtggccacagggctcaggttcacacttctgctttgagaccaggatggggtgtaagccatagagtaaggttaacaaaaagaataaagctaatcatgtattacaaacagcagtgtgcccagacttgtggaaatgaagtcatgtcactcctctgctcagaaaccttcaatggttcaccattaccagtggaatgaagtcaattctcctcactataactgggtgtggtagtttaagcctataatctcagcccttttggaggccaaggtaagaggatcgcttgaggtcaggagttcgagaccagcttgtgcaacaaagtgagagcctgtctctacaaaaaatagtcatgcacacaaaattagctgggcatggtggcctgtgcctatagtcccaactacttagaggaggatcgcttgatctcaggaggttgaggctgcagtgaattatgattgtggcattgcactccagcctgggtggtagatcaaggctttgtttcatttgaaaaaaaagaaagaaagaaagaaagaaagaaatcctactacgagcgatcacaccatctggcctgaaaccacttccccagcttaggtccctctgttatcctgttggcctcctatgtattggtcaaggcaggcatctctgttctctgaacattcattgcactttcccacctctataccttgcctgtgccttagtgtcctcttttttccagttcacctgtgcgaatccgacccacctcccagagcctggctgaaacgtcactccctgcatccaacatctgatctgctgagatatgtctgatctatctctgctcgctgttctcccgttgtttttgcctctgccatagagctcacctcattttgccttgtatttttgttacctgtgagtgtgtctctccctattagactgtaagcctctcgagggtgaggcctagccttcttgtctttgtaacccacagcagctggtactgtgccttgcctattgtaggtgcccaataaacatttgctgaactg

SEQ ID NO: 153365 - DNA, 1757 bp, Artificial Sequence
  derived and/or modified sequence
aaaagagagggaattaaactggttttacagaagacaaagggttctgtttgcccatgtgtatcctacttttactaacacttcttgtctttgtaaatgcaagataacggctctcaaaatcaagtacaatccttttgccaaagccttcttggatgccaaggaaagaaatcacctaagagacgtaccggaggctatctctgagagccagcatgtgacctattctcacttgggaggctggatcttttccaatccagatggagtgtgcacagcaggaaactccaattaccagtatgccgctcctctgcctctgcctgctccccacacccaccatggctgtgagcactattcgggtctccgaggacaccggcaggctccctacccttctgcgtacatgcacagaaaccattctccctcagtgaatttgatagaaagctcaagcaataatctgcaagttttctcgggacctgacagctggacttccttatcctccacaccccatgccagcatcctgtctgtaccccacaccaacggaccaatcaatccagggcccagcccctacccgtgcctgtggaccatcagcaatggtgccggaggccccagtgggccaggcccggaggtgcacgccagcaccccaggagcatttctcctcggaaacccagctgtgacttcacccccttctgtgctctccacccaagcacccacttcggctggtgtggaggttctgggggagccctcgctaaccagcattgctgtgtccacctggacagcagtggcctcgcatcccttcgcgggctggggtggcccaggagcgggtgggcaccattctccttcctcactggatggttaagcaggatcctaggagcctctttgcacagcgatccttccatgtgtagagtgcttagaaaccccatcaactgatctagtgagtcagactgtggaatctcccttcccactagctggaggtggaggtgggttattacagaagtcatactgggagagggttcagtttggatgatgctagttagatcatttgcatctctccaccattttcttctgcactcccattttctctgcagcttattcttgccatgcttaggtgacagaagtttgttaagtaccatccttgtgccctgcctcttattctcaaatcgttctggaaagcctcacttccttttctgtggagaaggtgcaaagctgttaaatgagctcagagtttacctagctaaggccactgcttcctgctttgtgaagcctggaaagtatgtgtggccacagggctcaggttcacacttctgctttgagaccaggatggggtgtaagccatagagtaaggttaacaaaaagaataaagctaatcatgtattacaaacagcagtgtgcccagacttgtggaaatgaagtcatgtcactcctctgctcagaaaccttcaatggttcaccattaccagtggaatgaagtcaattctcctcactataactgggtgtggtagtttaagcctataatctcagcccttttggaggccaaggtaagaggatcgcttgaggtcaggagttcgagaccagcttgtgcaacaaagtgagagcctgtctctacaaaaaatagtcatgcacacaaaattagctgggcatggtggcctgtgcctatagtcccaactacttagaggaggatcgcttgatctcaggaggttgaggctgcagtgaattatgattgtggcattgcactccagcctgggtggtagatcaaggctttgtttcatttg

SEQ ID NO: 153366 - protein, 494 aa, Artificial Sequence
  derived and/or modified sequence
MPLYSVTVKWGKEKFEGVELNTDEPPMVFKAQLFALTGVQPARQKVMVKGGTLKDDDWGNIKIKNGMTLLMMGSADALPEEPSAKTVFVEDMTEEQLASAMELPCGLTNLGNTCYMNATVQCIRSVPELKDALKRYAGALRASGEMASAQYITAALRDLFDSMDKTSSSIPPIILLQFLHMAFPQFAEKGEQGQYLQQDANECWIQMMRVLQQKLEAIEDDSVKETDSSSASAATPSKKKSLIDQFFGVEFETTMKCTESEEEEVTKGKENQLQLSCFINQEVKYLFTGLKLRLQEEITKQSPTLQRNALYIKSSKISRLPAYLTIQMVRFFYKEKESVNAKVLKDVKFPLMLDMYELCTPELQEKMVSFRSKFKDLEDKKVNQQPNTSDKKSSPQKEVKYEPFSFADDIGSNNCGYYDLQAVLTHQGRSSSSGHYVSWVKRKQDEWIKFDDDKVSIVTPEDILRLSGGGDWHIAYVLLYGPRRVEIMEEESEQ

SEQ ID NO: 153367 - protein, 483 aa, Artificial Sequence
  derived and/or modified sequence
MPLYSVTVKWGKEKFEGVELNTDEPPMVFKAQLFALTGVQPARQKVMVKGGTLKGMTLLMMGSADALPEEPSAKTVFVEDMTEEQLASAMELPCGLTNLGNTCYMNATVQCIRSVPELKDALKRYAGALRASGEMASAQYITAALRDLFDSMDKTSSSIPPIILLQFLHMAFPQFAEKGEQGQYLQQDANECWIQMMRVLQQKLEAIEDDSVKETDSSSASAATPSKKKSLIDQFFGVEFETTMKCTESEEEEVTKGKENQLQLSCFINQEVKYLFTGLKLRLQEEITKQSPTLQRNALYIKSSKISRLPAYLTIQMVRFFYKEKESVNAKVLKDVKFPLMLDMYELCTPELQEKMVSFRSKFKDLEDKKVNQQPNTSDKKSSPQKEVKYEPFSFADDIGSNNCGYYDLQAVLTHQGRSSSSGHYVSWVKRKQDEWIKFDDDKVSIVTPEDILRLSGGGDWHIAYVLLYGPRRVEIMEEESEQ

SEQ ID NO: 153368 - DNA, 1485 bp, Artificial Sequence
  derived and/or modified sequence
atgcccctgtacagcgtgaccgtgaagtggggcaaggagaagttcgagggcgtggagctgaacaccgacgagccccccatggtgttcaaggcccagctgttcgccctgaccggcgtgcagcccgccagacagaaggtgatggtgaagggcggcaccctgaaggacgacgactggggcaacatcaagatcaagaacggcatgaccctgctgatgatgggcagcgccgacgccctgcccgaggagcccagcgccaagaccgtgttcgtggaggacatgaccgaggagcagctggccagcgccatggagctgccctgcggcctgaccaacctgggcaacacctgctacatgaacgccaccgtgcagtgcatcagaagcgtgcccgagctgaaggacgccctgaagagatacgccggcgccctgagagccagcggcgagatggccagcgcccagtacatcaccgccgccctgagagacctgttcgacagcatggacaagaccagcagcagcatcccccccatcatcctgctgcagttcctgcacatggccttcccccagttcgccgagaagggcgagcagggccagtacctgcagcaggacgccaacgagtgctggatccagatgatgagagtgctgcagcagaagctggaggccatcgaggacgacagcgtgaaggagaccgacagcagcagcgccagcgccgccacccccagcaagaagaagagcctgatcgaccagttcttcggcgtggagttcgagaccaccatgaagtgcaccgagagcgaggaggaggaggtgaccaagggcaaggagaaccagctgcagctgagctgcttcatcaaccaggaggtgaagtacctgttcaccggcctgaagctgagactgcaggaggagatcaccaagcagagccccaccctgcagagaaacgccctgtacatcaagagcagcaagatcagcagactgcccgcctacctgaccatccagatggtgagattcttctacaaggagaaggagagcgtgaacgccaaggtgctgaaggacgtgaagttccccctgatgctggacatgtacgagctgtgcacccccgagctgcaggagaagatggtgagcttcagaagcaagttcaaggacctggaggacaagaaggtgaaccagcagcccaacaccagcgacaagaagagcagcccccagaaggaggtgaagtacgagcccttcagcttcgccgacgacatcggcagcaacaactgcggctactacgacctgcaggccgtgctgacccaccagggcagaagcagcagcagcggccactacgtgagctgggtgaagagaaagcaggacgagtggatcaagttcgacgacgacaaggtgagcatcgtgacccccgaggacatcctgagactgagcggcggcggcgactggcacatcgcctacgtgctgctgtacggccccagaagagtggagatcatggaggaggagagcgagcagtag

SEQ ID NO: 153369 - DNA, 1452 bp, Artificial Sequence
  derived and/or modified sequence
atgcccctgtacagcgtgaccgtgaagtggggcaaggagaagttcgagggcgtggagctgaacaccgacgagccccccatggtgttcaaggcccagctgttcgccctgaccggcgtgcagcccgccagacagaaggtgatggtgaagggcggcaccctgaagggcatgaccctgctgatgatgggcagcgccgacgccctgcccgaggagcccagcgccaagaccgtgttcgtggaggacatgaccgaggagcagctggccagcgccatggagctgccctgcggcctgaccaacctgggcaacacctgctacatgaacgccaccgtgcagtgcatcagaagcgtgcccgagctgaaggacgccctgaagagatacgccggcgccctgagagccagcggcgagatggccagcgcccagtacatcaccgccgccctgagagacctgttcgacagcatggacaagaccagcagcagcatcccccccatcatcctgctgcagttcctgcacatggccttcccccagttcgccgagaagggcgagcagggccagtacctgcagcaggacgccaacgagtgctggatccagatgatgagagtgctgcagcagaagctggaggccatcgaggacgacagcgtgaaggagaccgacagcagcagcgccagcgccgccacccccagcaagaagaagagcctgatcgaccagttcttcggcgtggagttcgagaccaccatgaagtgcaccgagagcgaggaggaggaggtgaccaagggcaaggagaaccagctgcagctgagctgcttcatcaaccaggaggtgaagtacctgttcaccggcctgaagctgagactgcaggaggagatcaccaagcagagccccaccctgcagagaaacgccctgtacatcaagagcagcaagatcagcagactgcccgcctacctgaccatccagatggtgagattcttctacaaggagaaggagagcgtgaacgccaaggtgctgaaggacgtgaagttccccctgatgctggacatgtacgagctgtgcacccccgagctgcaggagaagatggtgagcttcagaagcaagttcaaggacctggaggacaagaaggtgaaccagcagcccaacaccagcgacaagaagagcagcccccagaaggaggtgaagtacgagcccttcagcttcgccgacgacatcggcagcaacaactgcggctactacgacctgcaggccgtgctgacccaccagggcagaagcagcagcagcggccactacgtgagctgggtgaagagaaagcaggacgagtggatcaagttcgacgacgacaaggtgagcatcgtgacccccgaggacatcctgagactgagcggcggcggcgactggcacatcgcctacgtgctgctgtacggccccagaagagtggagatcatggaggaggagagcgagcagtag

SEQ ID NO: 153370 - DNA, 1485 bp, Artificial Sequence
  derived and/or modified sequence
atgcccctgtactctgtaacagtgaagtggggtaaagaaaagtttgagggcgtcgagttgaacacggacgaaccacctatggtgttcaaggcacaactttttgcgttaaccggggtgcagcctgctagacagaaagtgatggtgaagggtggcaccctaaaagacgatgactggggaaatatcaagatcaagaacggaatgaccctgttgatgatgggatccgccgatgccctacctgaggagccttcggctaaaacggtcttcgtagaggatatgacagaggagcagctcgcctcagcaatggagctcccttgcggcctcactaatctggggaatacttgttatatgaacgcaaccgtgcaatgtatacggagcgtgcctgagctcaaagatgctctaaaacgatacgctggcgcccttagagcctcaggggaaatggcaagcgcacagtacatcacagcagcactgagggatttgtttgattccatggacaagacatcctcttctattcccccaatcatcctcctccaatttctgcatatggcttttcctcagtttgctgagaagggcgaacagggccagtacctccagcaagacgccaacgagtgctggatacagatgatgagagtcctgcaacagaagctagaggcaatcgaggacgattccgtaaaagaaacggattccagttccgcttctgccgctacaccttctaagaaaaaaagcctgattgaccagttctttggagtggaattcgagacaaccatgaagtgtaccgagtctgaggaggaggaagttacgaaaggcaaagaaaaccagctgcagctgtcttgcttcatcaatcaggaggtgaagtacctgttcacaggtctcaagctccgcttgcaggaagagatcaccaagcaaagccctaccctgcagcggaatgctctgtatattaagtctagcaaaatctcacgacttcctgcgtatctgacaatacaaatggttcggttcttttacaaagaaaaagaaagtgtaaatgctaaggtcctgaaagacgttaaatttcccctgatgttagacatgtatgagctgtgcactcccgaactgcaggaaaagatggttagctttagatccaagtttaaagatctagaggacaagaaggtgaaccagcagccaaacacttccgataagaagtcctcaccacagaaggaggtaaaatacgagccttttagcttcgccgacgacattggctcgaacaattgcgggtattacgatctgcaagccgtgctgacacaccaaggacgctcttctagcagcggccattatgtgtcctgggtaaaacgcaagcaggacgaatggatcaaatttgatgatgacaaggtctctatcgtcacaccagaagacatactcaggctgagcggcgggggcgattggcacattgcctacgtgctgctctatggccctcggcgcgttgagattatggaagaagaaagcgagcagtag

SEQ ID NO: 153371 - DNA, 1452 bp, Artificial Sequence
  derived and/or modified sequence
atgcccctatactcggtgactgtgaagtggggcaaagaaaagttcgaaggagtggaattgaataccgacgagccacccatggtatttaaagcccaattgttcgcgctcacaggcgtacagcccgcccgtcagaaagttatggtgaaaggaggtactctgaaggggatgacgttgctgatgatgggctccgcagatgccctgcctgaggaacctagcgccaaaacagttttcgtggaagacatgactgaagagcagctggcctccgccatggagctcccttgcgggctgaccaaccttggcaatacctgctacatgaatgccacagtgcagtgcatcagatctgttcctgagttaaaggacgccttgaagcgctatgccggagccctgcgggcctcaggcgaaatggcatctgctcagtacattactgcagctctgagggatttattcgacagcatggataaaacgagcagtagcatcccccccattattctgttgcagtttctacatatggctttcccacaatttgccgagaaaggggaacaggggcaatacctgcaacaggatgcaaatgagtgctggattcagatgatgagggttctccaacagaagcttgaagcaattgaagacgactctgtcaaggagaccgactcctccagcgcgtccgccgcaacaccgagcaagaaaaaaagccttatcgaccagttttttggcgtggaatttgagaccaccatgaagtgcactgagtctgaggaggaggaagttacaaaaggaaaggagaaccagctacagctctcttgctttataaatcaggaggtgaagtacctcttcacaggccttaaactgcgactgcaggaggagattacaaaacagtctcctactcttcagcgcaacgcgctctacatcaagagttccaaaatttcccgtttacccgcctatctgacaatacagatggtgagatttttctataaagaaaaagaatctgtcaatgctaaggtgctgaaggacgtgaaattccctttgatgctggatatgtatgaactgtgcacaccggagctgcaagagaaaatggtctctttccgatccaagtttaaggaccttgaggataaaaaggtgaaccagcagcctaacacttctgacaagaagtcaagcccgcagaaggaagtcaagtacgaacctttctcttttgccgatgacattggctctaataattgcggctactatgatctccaagcagtgttaacacatcaaggcaggagctctagtagcggccactacgtcagctgggtgaaaaggaagcaggatgaatggattaagtttgacgacgataaagtgtcgatagttaccccagaagacatcctgaggctgtccgggggaggggattggcacattgcatacgtgctgctatacggacccagacgggtagaaattatggaggaggagtcagaacaatag

SEQ ID NO: 153372 - DNA, 1485 bp, Artificial Sequence
  derived and/or modified sequence
atgcccctgtacagcgtgacagtgaagtggggcaaggagaagtttgaaggagtggagctgaacacagatgagccccccatggtgttcaaggcccagctgtttgccctgactggagtgcagcctgcccggcagaaggtgatggtgaagggcggcaccctgaaggatgatgactggggcaacatcaagatcaagaatggcatgaccctgctgatgatgggcagcgcagatgccctgcctgaggagcccagcgccaagacagtgtttgtggaggacatgacagaggagcagctggccagcgccatggagctgccctgtggcctgaccaacctgggcaacacctgctacatgaatgccaccgtgcagtgcatccgctctgtgcctgagctgaaggatgccctgaagagatatgctggggccctgcgggccagcggggagatggccagcgcccagtacatcacagctgccctgcgggacctgtttgacagcatggacaagaccagcagcagcatcccccccatcatcctgctgcagttcctgcacatggccttcccccagtttgctgagaagggggagcagggccagtacctgcagcaggatgccaatgaatgctggatccagatgatgagggtgctgcagcagaagctggaggccattgaagatgacagcgtgaaggagacagacagcagcagcgccagcgctgccacccccagcaagaagaagagcctgattgaccagttctttggagtggagtttgagaccaccatgaagtgcacagagagcgaggaggaggaggtgaccaagggcaaggagaaccagctgcagctgagctgcttcatcaaccaggaggtgaagtacctgttcaccggcctgaagctgcggctgcaggaggagatcaccaagcagagccccaccctgcagagaaatgccctgtacatcaagagcagcaagatcagccggctgcctgcctacctgaccatccagatggtgcgcttcttctacaaggagaaggagagcgtgaatgccaaggtgctgaaggatgtgaagttccccctgatgctggacatgtatgagctgtgcaccccagagctgcaggagaagatggtgtccttccgcagcaagttcaaggacctggaggacaagaaggtgaaccagcagcccaacaccagtgacaagaagagcagcccccagaaggaggtgaagtatgagcccttctcctttgctgatgacatcggcagcaacaactgtggctactatgacctgcaggccgtgctgacccaccagggccgcagcagcagcagcggccactacgtgtcctgggtgaagaggaagcaggatgagtggatcaagtttgatgatgacaaggtgtccatcgtgaccccagaggacatcctgcggctgagcggcggcggggactggcacatcgcctacgtgctgctgtatggccccaggagagtggagatcatggaggaggagagcgagcagtag

SEQ ID NO: 153373 - DNA, 1452 bp, Artificial Sequence
  derived and/or modified sequence
atgcccctgtacagcgtgacagtgaagtggggcaaggagaagtttgaaggagtggagctgaacacagatgagccccccatggtgttcaaggcccagctgtttgccctgactggagtgcagcctgcccggcagaaggtgatggtgaagggcggcaccctgaagggcatgaccctgctgatgatgggcagcgcagatgccctgcctgaggagcccagcgccaagacagtgtttgtggaggacatgacagaggagcagctggccagcgccatggagctgccctgtggcctgaccaacctgggcaacacctgctacatgaatgccaccgtgcagtgcatccgctctgtgcctgagctgaaggatgccctgaagagatatgctggggccctgcgggccagcggggagatggccagcgcccagtacatcacagctgccctgcgggacctgtttgacagcatggacaagaccagcagcagcatcccccccatcatcctgctgcagttcctgcacatggccttcccccagtttgctgagaagggggagcagggccagtacctgcagcaggatgccaatgaatgctggatccagatgatgagggtgctgcagcagaagctggaggccattgaagatgattctgtgaaggagacagacagcagcagcgccagcgctgccacccccagcaagaagaagagcctgattgaccagttcttcggcgtggagtttgagaccaccatgaagtgcacagaaagtgaggaggaggaggtgaccaagggcaaggagaaccagctgcagctgagctgcttcatcaaccaggaggtgaagtacctgttcaccggcctgaagctgcggctgcaggaggagatcaccaagcagagccccaccctgcagagaaatgccctgtacatcaagagcagcaagatcagccggctgcctgcctacctgaccatccagatggtgcgcttcttctacaaggagaaggagagcgtgaatgccaaggtgctgaaggatgtgaagttccccctgatgctggacatgtatgagctgtgcaccccagagctgcaggagaagatggtgtccttccgcagcaagttcaaggacctggaggacaagaaggtgaaccagcagcccaacaccagtgacaagaagagcagcccccagaaggaggtgaagtatgagcccttctcctttgctgatgacatcggcagcaacaactgtggctactatgacctgcaggccgtgctgacccaccagggccgcagcagcagcagcggccactacgtgtcctgggtgaagaggaagcaggatgagtggatcaagtttgatgatgacaaggtgtccatcgtgaccccagaggacatcctgcggctgagcggcggcggggactggcacatcgcctacgtgctgctgtatggcccccggcgggtggagatcatggaggaggagagcgagcagtag

SEQ ID NO: 153374 - DNA, 1485 bp, Artificial Sequence
  derived and/or modified sequence
atgcccctgtacagcgtgaccgtgaagtggggcaaggagaagttcgaaggcgtcgaattgaatactgacgaaccacctatggtgttcaaagctcagctgtttgcactgactggtgtgcaaccagcgcggcagaaagtgatggttaaagggggcactctgaaggatgacgactggggcaatatcaaaataaagaatggtatgacgctgttgatgatgggatctgccgatgctctcccagaagaaccttcagctaagacggtcttcgtcgaggatatgaccgaagagcagctggcatccgcaatggagctgccttgcggtctgaccaacctcggaaatacctgctatatgaatgctaccgtccaatgtattcgatctgtgccggaactcaaggacgcacttaaaagatacgccggcgcactgagagccagtggggagatggccagcgctcagtacataaccgctgccctgcgtgacctgtttgacagcatggacaaaactagttccagcatcccacctataattttgctccaattcctccatatggcctttccacaattcgcggagaagggcgaacaaggacagtacctgcaacaggatgctaacgaatgttggatacagatgatgagagtgctccaacaaaagctagaagctatcgaagacgatagcgtaaaggaaacggattcctcttctgcctcggctgccactccatccaagaaaaaaagtttaatcgaccagtttttcggagtggaattcgaaacgactatgaaatgcaccgagtccgaggaggaggaggtcaccaaaggcaaagagaaccagctacagctgtcctgcttcatcaatcaggaggtaaagtatctgtttaccggtctgaaactgcgcctccaggaggaaattactaaacaatcccctaccctgcagcgcaacgccctgtacatcaaatcttccaagatctccaggctaccagcgtacttgaccattcagatggttcgatttttctataaagagaaggagagtgtcaatgctaaagtcctgaaggacgtaaaattcccgctgatgctagatatgtatgagctgtgcacacccgaattgcaagagaagatggtgtcttttcgcagtaaattcaaggacttggaggataaaaaggtcaaccagcagcctaatacgtccgacaaaaaaagcagtccccagaaagaggtcaaatacgagcctttcagcttcgccgacgacatagggtcaaacaactgcggatattatgatctccaggcggtgcttactcatcaggggcggagtagctcatctgggcactatgtttcatgggtgaagaggaagcaggacgagtggatcaagttcgacgacgacaaggtcagcatagtgacccctgaggacatcctgcggctgtctgggggcggcgactggcacattgcctatgtcttattgtacggtccacgccgggtggagatcatggaagaggagagtgagcagtag

SEQ ID NO: 153375 - DNA, 1452 bp, Artificial Sequence
  derived and/or modified sequence
atgcccctgtacagcgtgaccgtgaagtggggcaaggagaagttcgaaggcgtggaattgaacacagatgaaccccctatggtgttcaaggcacagctctttgcccttactggggttcagccagcccgacagaaggtgatggttaagggtggaaccctgaaggggatgacccttctcatgatgggttccgccgatgctctgcctgaagaaccttcggctaagacagtgttcgtggaagatatgaccgaagaacagttagcgagcgccatggagttaccctgtggcctgacgaaccttgggaatacatgttacatgaacgctactgtccagtgcatacgctctgtccccgaattaaaggacgccctaaagcgatacgcgggcgctctgagagcatctggtgagatggcctccgcccagtacataacagctgctttgcgggacctgttcgactccatggataagactagttcttctatacctcccataatcctgttgcaattcctgcatatggccttcccccaattcgcagagaagggagagcagggacagtatttacagcaggatgctaatgaatgctggattcaaatgatgcgagttcttcaacaaaaactggaagccatcgaggatgactccgtcaaggagactgatagttccagtgctagtgcggccactccaagcaaaaagaagtctttgatcgatcagtttttcggtgtggagttcgaaacaacgatgaaatgtactgaatctgaggaggaagaggtcaccaaggggaaggaaaatcagctgcaactgtcttgcttcatcaaccaggaggtgaagtaccttttcacaggattgaagctgaggttgcaagaggagattacaaagcagagccccacactgcagagaaacgctttgtatattaaatcctcaaagatttcccggttgcccgcatatctcactatacagatggtcagatttttctataaggaaaaggaatctgtaaatgccaaagtgctcaaagacgtgaaatttccgctcatgctggacatgtatgaactgtgtacacccgaactgcaggaaaagatggtgagcttccgctcgaagttcaaggacttagaagataagaaagtgaatcagcagcctaacacttctgacaagaaatcttccccacagaaagaagtgaagtatgaaccatttagcttcgccgacgacattgggtcgaataattgcggctactatgaccttcaggcagtgctcacccaccaaggccgatccagcagctcaggccactatgtgagttgggtgaagagaaaacaggacgagtggattaaatttgacgacgataaggttagtatcgtgacaccagaggacattctgcgactgagcgggggaggagactggcatatcgcgtacgtgttactttatggcccacgccgcgtcgagattatggaagaggaatcagaacaatag

SEQ ID NO: 153376 - DNA, 1485 bp, Artificial Sequence
  derived and/or modified sequence
atgcctttatactccgttaccgtgaagtggggcaaagagaagttcgaaggagtggagctgaatacagatgagccacctatggtgttcaaggcccagttgttcgcactaaccggtgtgcagcccgctcgccaaaaggttatggtcaagggcggaacactgaaagatgacgactggggtaacataaagattaaaaatggcatgaccctccttatgatgggaagtgccgacgctctgcccgaagaacccagcgccaagaccgtcttcgtggaagatatgacagaggagcagctggctagcgcaatggagctcccctgcgggctgaccaaccttggcaacacttgctacatgaacgccaccgttcagtgcatccgatcggtgccagagctgaaggatgccctcaaacggtacgcgggagccctaagggcatccggagagatggcaagtgcccagtatattaccgcagcccttagggacctgtttgactccatggataagacaagcagcagcatcccaccaattatactcctgcagtttctccacatggcttttcctcagtttgctgaaaagggcgagcaaggacaatacctccaacaggacgctaacgagtgctggatacagatgatgagggtgttacaacagaagctggaggccatcgaggacgactctgtgaaagagacggacagctctagcgcctccgctgccaccccctctaagaagaagagcctgattgaccaattctttggggtggagtttgagacaacaatgaagtgcaccgagagcgaggaggaagaggtgacaaaagggaaggaaaaccagctccagctgtcctgcttcatcaatcaggaggttaaataccttttcaccggcctgaaactcaggctccaagaggaaattaccaagcagagtcctacactgcaaaggaacgccctttatataaagtcctcaaagatttctcggcttcccgcttacttgaccatccaaatggtcagattcttctataaggaaaaggagagtgtgaacgcaaaagtcctgaaggatgtcaaattccctctaatgctggatatgtatgaattgtgtactcctgaacttcaagagaaaatggtgagcttcagatccaaattcaaagaccttgaggacaagaaggtgaatcaacagcctaatacctctgacaaaaaatcaagcccccaaaaagaggtgaagtacgagcccttcagtttcgcagatgacatcggaagcaacaattgcgggtactacgatctccaggcagtgctgactcaccaaggccgatcttcctccagcggccattatgtgtcatgggttaaacggaaacaggatgagtggattaagttcgacgacgacaaggtgtccattgtcactcctgaggacatattaagactgtcaggagggggagattggcacatcgcctatgtgcttctatacgggccacgaagagtcgagatcatggaggaagaatcagagcaatag

SEQ ID NO: 153377 - DNA, 1452 bp, Artificial Sequence
  derived and/or modified sequence
atgcctctgtactctgtgaccgtcaaatgggggaaagagaaatttgaaggagtcgaactcaacactgatgagcctccgatggtgtttaaggcccagttgttcgccctgactggcgtgcagcctgccagacagaaagtgatggtgaaagggggaaccctcaagggaatgaccctccttatgatgggcagtgccgatgctctgccagaggagccatccgctaagacagtcttcgtggaggacatgaccgaggaacaactagccagtgcaatggaactgccctgtggcctgaccaatttgggtaacacatgctatatgaatgccactgtgcagtgcattagatcagtgcctgagctgaaggacgccttgaaaagatacgctggcgcactgcgggcttccggagaaatggcctcagcacagtatattacagccgctttaagagacttgttcgattcgatggataagacatcatctagcatccctcccatcatccttcttcagttcctccacatggcatttcctcaattcgctgagaagggcgagcagggacagtacctgcagcaagacgctaacgagtgttggattcagatgatgcgtgtgttgcagcagaagttagaggccatcgaagacgatagtgttaaagagaccgattcctcatcggctagcgccgcaaccccatcgaagaaaaagtctctgatcgaccaattctttggagtggaatttgagaccactatgaaatgcacagagagcgaagaggaggaagtaaccaaaggcaaggagaaccagctgcagctgagttgttttattaaccaggaagtaaaatatctgttcacggggctgaagcttcgtttgcaagaggagatcacaaaacagagccctactctgcaacgtaatgcgctctacatcaagtcttctaaaatctcacgactgcccgcatatctgacaatccagatggttagattcttctataaagagaaggaatccgtgaatgcgaaagtcctgaaagatgtgaagtttcccctgatgttggatatgtatgaactatgcactcccgagctgcaggaaaagatggtcagctttcgttctaaattcaaggatctggaagacaagaaggtgaatcagcaacccaacacttcggataagaagagcagccctcagaaagaggtgaaatatgaaccattttcgtttgccgacgatataggctctaacaactgcggatactacgatttgcaggccgtgctgacccatcaggggagatccagctccagcggtcactatgtgtcgtgggtaaagcggaagcaagacgaatggatcaaattcgatgatgataaagtgtcaatagtgaccccagaagacattctgcggctgtcaggtggcggagattggcacatcgcttatgttctcctctacggccctagacgggtggaaattatggaggaggaatcagaacagtag

SEQ ID NO: 153378 - DNA, 4156 bp, Artificial Sequence
  derived and/or modified sequence
gtctcctcgctgcagtcgctccggagctgcacgggtgttttgcgtgttgctgcgtcatcgccagtggccggtttgaatgagactcgtcgcaccgaagccgccgccaccaccgcgcctccgcctcggccgccgccgcagctgctcctggtccccgtccctttgccgccctcgtcaggcccagctctcctgcgccgccgcctcccgccgcgccccgccatgccgctctactccgttactgtaaaatggggaaaggagaaatttgaaggtgtagaattgaatacagatgaacctccaatggtattcaaggctcagctgtttgcgttgactggagtccagcctgccagacagaaagttatggtgaaaggaggaacgctaaaggatgatgattggggaaacatcaaaataaaaaatggaatgactctactaatgatggggtcagcagatgctcttccagaagaaccctcagccaaaactgtcttcgtagaagacatgacagaagaacagttagcatctgctatggagttaccatgtggattgacaaaccttggtaacacttgttacatgaatgccacagttcagtgtattcgttctgtgcctgaactcaaagatgcccttaaaaggtatgcaggtgccttgagagcttcaggggaaatggcttcagcgcagtatattactgcagcccttagagatttgtttgattccatggataaaacttcttccagtattccacctattattctactgcagtttttgcacatggctttcccacagtttgccgagaaaggtgaacaaggacagtatcttcaacaggatgctaatgaatgttggatacaaatgatgcgagtattgcaacagaaattggaagcaatagaggatgattctgttaaagagacagactcctcatctgcatcggcagcgacaccttctaaaaagaaaagtttaatcgatcagttcttcggtgttgagtttgaaactaccatgaaatgtacagaatctgaagaagaagaagtcaccaaaggaaaggaaaatcaacttcagcttagctgttttatcaatcaggaagtcaagtatctttttacaggacttaaattgcgacttcaggaagaaatcaccaaacagtctccaacgttgcaaagaaatgccttgtatatcaaatcttccaagatcagccggctgcctgcttacttgaccattcagatggttcgatttttttataaagagaaggaatctgtgaatgccaaagttcttaaggatgttaaatttcctcttatgttggatatgtatgaactgtgtacaccagaacttcaagagaaaatggtgtcttttcgatccaaattcaaggatctagaagataaaaaagtgaatcagcagccaaatacaagtgacaaaaagagtagtccccagaaagaagttaagtatgaacccttttcttttgctgatgatattggctccaataattgtggatactatgacttacaagcagtactaacacaccagggaaggtctagttcttcaggtcattatgtatcatgggtgaaaaggaaacaagatgaatggattaagtttgatgatgacaaagtcagcatcgtaacaccagaagatatcttacggctttctggtggtggagactggcatatcgcttacgttctactctatgggcctcgcagagttgaaataatggaagaggaaagtgaacagtaatcttcattttagtatttatgcttagatgtgaaaataaatgttatttgttgatcatttctataatccagagctttagaggaagacacataggtgggtttatgtttcacctcatttggaacaaaagaggacagaagcagaccactctgtgcaccaacctaaaaaattacagagaagagaaaattatctttggattgtgctgccctatataaaggtggcagaaagacatttttaaaaagcttattatttcttgcattattttaaaaagttcagagttgaaatgcctttcaaccatttccttctgtggtcatttttcttgctgcctttttcacccaagattcagcagtcagatgtttactgcacacctattacctattatttgctgttcttgcatggttcaaaccaccattctgtagccacccatcctttgccttatctaacaaacatttttccaggaaggtggaaaaggaagtgttgctctcattgtgtgactcagtgctgctgtccatcccatggaaacatgggcacaatcaagtatttgtccagcctattgcaggcttttcctgactttaaaataaattgtgatcaataatagtacctttgattatacatttattattgtgtctctctctgatgtactgtggattgtacatttaactttggaatggctttgtaataatcagtcttaagaaaatgttgacaagctctggttgcttatttttagaaaatgaggacatttaataataataaaaaaaaagggattaatagcttttgacctcaagtcttttgtcttctgagtgttggagcttggctgaagacatgtttaatactgtacaatttctgaagatggttattaacactgtgctgttaagcatccatttaaaaatatttgttatcttctttgcctgcctgtattttaaaaagaaatacaaagttgtaaaagtaatggatttctttggatgctgaatgcagtgatgttatcagtcagattctttccttggctcagttgtgtttgtatttcctttcttaattccccaaatcttggctgggcacggtggctcacgcctgtaatcccagcactttgggaggctgaggcaggtggttcactggaggttgagttcgagaccagcctggccacatggtgaaaccctgtctctactaaagatataaaaattagctggatgtggtggtgcacacctgtgatcccagctacttgggaggctgaggtgggagaattgcttgaacctggaaggcagaagttgcagtgagctgagatcacaccactgcactccagcctgggtgacagagagactctgtctcaaaaaaaaaaagaaaaaattcccaaatcttaatgtctgtttcagaattttagtgattttaaagtgatagtagaaaataccaagcatatgaggtatttcaatatgataggcttcttacattttaatagttactcatctttgttccaggacccttgactgatgctagggaaaggataaagcatagaataccagccagtttggctctgattttgagttatttataataaagtttggggattatcataacatctcatatctttgtgtatgttgttttaatgctcggcagagcacaacactgatgataactattaaaaatagaaaataacagccattttactttcaaatctgatgtgatgcaatctgtgaacactaggaggggataaaataagcattgcagggaaacttatttgtaaatagcttcctcacctaaactttgacttggcaatcaatactttctactttgtggaggggattaagaatagaatgggcaggatgagaccatgaaaattataatgattcatgtatatttgtatgatgcttgtaactttgcaaagtcttttttattcattgtctcatttggtcagaacaattttattgaggacatgaatttaacaattagaatttagattttctgactgtagctactaaatgttgtagctactagaccaggtgagctaggtttagagcaaagtatataagccttgtatggactatattagaattttaaaaattgtaattaattccttatcatcattataaaaagcttgatttttttatttgatctaaaaaagcattattccaaagaattttttcaagtagaaatgggagttagttataccagtgttgtttttaactaataaggctattttagaattcagccttgcctgtaaggtctttgagaagggagaggagtaggccaaaaaaaaaaaagtcttgattcctgaatgtgccttatatgctgtgccactcacaccgaggccatcatctcaacattagagttgtgctagattactgcttgactgactagctaggttaggcctaagagtgtttaccgaataatctgcactcactcagtagcccttcttcaggattaaaaacgatgatgacctcatcttagagccctaaagggaaatgcttat

SEQ ID NO: 153379 - DNA, 1681 bp, Artificial Sequence
  derived and/or modified sequence
gtcatcgccagtggccggtttgaatgagactcgtcgcaccgaagccgccgccaccaccgcgcctccgcctcggccgccgccgcagctgctcctggtccccgtccctttgccgccctcgtcaggcccagctctcctgcgccgccgcctcccgccgcgccccgccatgccgctctactccgttactgtaaaatggggaaaggagaaatttgaaggtgtagaattgaatacagatgaacctccaatggtattcaaggctcagctgtttgcgttgactggagtccagcctgccagacagaaagttatggtgaaaggaggaacgctaaagggaatgactctactaatgatggggtcagcagatgctcttccagaagaaccctcagccaaaactgtcttcgtagaagacatgacagaagaacagttagcatctgctatggagttaccatgtggattgacaaaccttggtaacacttgttacatgaatgccacagttcagtgtattcgttctgtgcctgaactcaaagatgcccttaaaaggtatgcaggtgccttgagagcttcaggggaaatggcttcagcgcagtatattactgcagcccttagagatttgtttgattccatggataaaacttcttccagtattccacctattattctactgcagtttttgcacatggctttcccacagtttgccgagaaaggtgaacaaggacagtatcttcaacaggatgctaatgaatgttggatacaaatgatgcgagtattgcaacagaaattggaagcaatagaggatgattctgttaaagagacagactcctcatctgcatcggcagcgacaccttctaaaaagaaaagtttaatcgatcagttcttcggtgttgagtttgaaactaccatgaaatgtacagaatctgaagaagaagaagtcaccaaaggaaaggaaaatcaacttcagcttagctgttttatcaatcaggaagtcaagtatctttttacaggacttaaattgcgacttcaggaagaaatcaccaaacagtctccaacgttgcaaagaaatgccttgtatatcaaatcttccaagatcagccggctgcctgcttacttgaccattcagatggttcgatttttttataaagagaaggaatctgtgaatgccaaagttcttaaggatgttaaatttcctcttatgttggatatgtatgaactgtgtacaccagaacttcaagagaaaatggtgtcttttcgatccaaattcaaggatctagaagataaaaaagtgaatcagcagccaaatacaagtgacaaaaagagtagtccccagaaagaagttaagtatgaacccttttcttttgctgatgatattggctccaataattgtggatactatgacttacaagcagtactaacacaccagggaaggtctagttcttcaggtcattatgtatcatgggtgaaaaggaaacaagatgaatggattaagtttgatgatgacaaagtcagcatcgtaacaccagaagatatcttacggctttctggtggtggagactggcatatcgcttacgttctactctatgggcctcgcagagttgaaataatggaagaggaaagtgaacagtaatcttcattttagtatttatgcttagatgtgaaaataaatgttatttgttgatcatttctataatcc

SEQ ID NO: 153380 - protein, 798 aa, Artificial Sequence
  derived and/or modified sequence
MALHSPQYIFGDFSPDEFNQFFVTPRSSVELPPYSGTVLCGTQAVDKLPDGQEYQRIEFGVDEVIEPSDTLPRTPSYSISSTLNPQAPEFILGCTASKITPDGITKEASYGSIDCQYPGSALALDGSSNVEAEVLENDGVSGGLGQRERKKKKKRPPGYYSYLKDGGDDSISTEALVNGHANSAVPNSVSAEDAEFMGDMPPSVTPRTCNSPQNSTDSVSDIVPDSPFPGALGSDTRTAGQPEGGPGADFGQSCFPAEAGRDTLSRTAGAQPCVGTDTTENLGVANGQILESSGEGTATNGVELHTTESIDLDPTKPESASPPADGTGSASGTLPVSQPKSWASLFHDSKPSSSSPVAYVETKYSPPAISPLVSEKQVEVKEGLVPVSEDPVAIKIAELLENVTLIHKPVSLQPRGLINKGNWCYINATLQALVACPPMYHLMKFIPLYSKVQRPCTSTPMIDSFVRLMNEFTNMPVPPKPRQALGDKIVRDIRPGAAFEPTYIYRLLTVNKSSLSEKGRQEDAEEYLGFILNGLHEEMLNLKKLLSPSNEKLTISNGPKNHSVNEEEQEEQGEGSEDEWEQVGPRNKTSVTRQADFVQTPITGIFGGHIRSVVYQQSSKESATLQPFFTLQLDIQSDKIRTVQDALESLVARESVQGYTTKTKQEVEISRRVTLEKLPPVLVLHLKRFVYEKTGGCQKLIKNIEYPVDLEISKELLSPGVKNKNFKCHRTYRLFAVVYHHGNSATGGHYTTDVFQIGLNGWLRIDDQTVKVINQYQVVKPTAERTAYLLYYRRVDLL

SEQ ID NO: 153381 - DNA, 2397 bp, Artificial Sequence
  derived and/or modified sequence
atggccctgcacagcccccagtacatcttcggcgacttcagccccgacgagttcaaccagttcttcgtgacccccagaagcagcgtggagctgcccccctacagcggcaccgtgctgtgcggcacccaggccgtggacaagctgcccgacggccaggagtaccagagaatcgagttcggcgtggacgaggtgatcgagcccagcgacaccctgcccagaacccccagctacagcatcagcagcaccctgaacccccaggcccccgagttcatcctgggctgcaccgccagcaagatcacccccgacggcatcaccaaggaggccagctacggcagcatcgactgccagtaccccggcagcgccctggccctggacggcagcagcaacgtggaggccgaggtgctggagaacgacggcgtgagcggcggcctgggccagagagagagaaagaagaagaagaagagaccccccggctactacagctacctgaaggacggcggcgacgacagcatcagcaccgaggccctggtgaacggccacgccaacagcgccgtgcccaacagcgtgagcgccgaggacgccgagttcatgggcgacatgccccccagcgtgacccccagaacctgcaacagcccccagaacagcaccgacagcgtgagcgacatcgtgcccgacagccccttccccggcgccctgggcagcgacaccagaaccgccggccagcccgagggcggccccggcgccgacttcggccagagctgcttccccgccgaggccggcagagacaccctgagcagaaccgccggcgcccagccctgcgtgggcaccgacaccaccgagaacctgggcgtggccaacggccagatcctggagagcagcggcgagggcaccgccaccaacggcgtggagctgcacaccaccgagagcatcgacctggaccccaccaagcccgagagcgccagcccccccgccgacggcaccggcagcgccagcggcaccctgcccgtgagccagcccaagagctgggccagcctgttccacgacagcaagcccagcagcagcagccccgtggcctacgtggagaccaagtacagcccccccgccatcagccccctggtgagcgagaagcaggtggaggtgaaggagggcctggtgcccgtgagcgaggaccccgtggccatcaagatcgccgagctgctggagaacgtgaccctgatccacaagcccgtgagcctgcagcccagaggcctgatcaacaagggcaactggtgctacatcaacgccaccctgcaggccctggtggcctgcccccccatgtaccacctgatgaagttcatccccctgtacagcaaggtgcagagaccctgcaccagcacccccatgatcgacagcttcgtgagactgatgaacgagttcaccaacatgcccgtgccccccaagcccagacaggccctgggcgacaagatcgtgagagacatcagacccggcgccgccttcgagcccacctacatctacagactgctgaccgtgaacaagagcagcctgagcgagaagggcagacaggaggacgccgaggagtacctgggcttcatcctgaacggcctgcacgaggagatgctgaacctgaagaagctgctgagccccagcaacgagaagctgaccatcagcaacggccccaagaaccacagcgtgaacgaggaggagcaggaggagcagggcgagggcagcgaggacgagtgggagcaggtgggccccagaaacaagaccagcgtgaccagacaggccgacttcgtgcagacccccatcaccggcatcttcggcggccacatcagaagcgtggtgtaccagcagagcagcaaggagagcgccaccctgcagcccttcttcaccctgcagctggacatccagagcgacaagatcagaaccgtgcaggacgccctggagagcctggtggccagagagagcgtgcagggctacaccaccaagaccaagcaggaggtggagatcagcagaagagtgaccctggagaagctgccccccgtgctggtgctgcacctgaagagattcgtgtacgagaagaccggcggctgccagaagctgatcaagaacatcgagtaccccgtggacctggagatcagcaaggagctgctgagccccggcgtgaagaacaagaacttcaagtgccacagaacctacagactgttcgccgtggtgtaccaccacggcaacagcgccaccggcggccactacaccaccgacgtgttccagatcggcctgaacggctggctgagaatcgacgaccagaccgtgaaggtgatcaaccagtaccaggtggtgaagcccaccgccgagagaaccgcctacctgctgtactacagaagagtggacctgctgtag

SEQ ID NO: 153382 - DNA, 2397 bp, Artificial Sequence
  derived and/or modified sequence
atggcactgcacagtccgcagtatatttttggagacttttcacctgacgaatttaatcagttctttgtcaccccgcggtcatccgtggagctgccaccttactctggcaccgttttgtgcggaacccaggccgtcgacaagttgcctgatggccaggagtatcagcggattgaatttggggtcgatgaagtgatcgaaccctctgacacgcttcccagaacgccgagctactcgattagtagcacactcaaccctcaagctcctgagttcattctggggtgcactgccagcaaaataactcctgacggcatcacaaaagaagcctcgtacggaagtatcgactgccaatatcctggtagcgctctggccctggacggttcatctaatgtcgaggccgaggtgctcgagaacgatggggtttctggggggttaggacagagggagcggaaaaaaaagaagaagaggccccctggatactattcatatctgaaagacgggggagacgattctatctcaactgaggctctggtgaatggacatgctaactccgctgtccctaatagtgtgagcgcagaagacgccgagttcatgggggacatgcccccgtccgttaccccaaggacgtgtaattccccgcagaatagcactgattcggtctcggatattgtccccgacagtcctttccctggcgccttgggttcagacaccagaaccgctgggcaaccggaaggcgggccaggggccgattttggtcaaagttgttttccggctgaagccgggagggacactctttctagaaccgcaggggctcagccctgcgtcggaaccgacaccacagaaaatcttggtgtagcgaatggccagatccttgagtccagcggcgagggaacagctaccaacggtgttgagttgcacaccaccgagagcatcgacttggaccctactaagccagagtcagcctcccctccagccgacgggacaggcagcgccagtggaacgctacctgtctcacagcctaaaagctgggcatctttgttccacgactctaagccatcgagcagtagccccgtggcatatgtggaaactaagtacagcccccccgccatctccccccttgtgtctgaaaaacaagtggaggtgaaggagggtctggtgccagtgagcgaggacccagtggcaatcaagattgccgagttgctagaaaatgttactctgattcacaaaccggtgagcctgcagcctcgaggattgatcaataagggcaattggtgctacatcaacgctacactgcaggccctggtggcctgccctcccatgtatcatcttatgaaatttatacctctctactcgaaggtacagaggccctgtacaagtaccccaatgatcgactcttttgtacggctcatgaacgagttcaccaacatgcctgtacctcctaagcctcgccaagcccttggcgataaaatcgtccgcgacatccggcccggggccgcttttgaacccacatacatctatagactgctgacggttaataaaagctccctctctgaaaaaggccgtcaagaagacgcagaggagtatctgggcttcattctgaacggcctgcatgaggagatgctcaatcttaagaaattactgtcaccttcaaacgagaaactgacgatcagtaatgggcctaagaatcattccgtgaatgaagaagagcaggaggaacagggtgaggggagcgaagatgagtgggagcaggtgggaccgagaaacaaaacatctgtgacccggcaggccgacttcgtccagactcccattaccgggatattcggaggccacatccgctccgtcgtctatcagcagtcgagcaaagagtctgctacacttcaacctttctttacactacagctcgacatacagagtgataagatccgtaccgttcaggatgccttagaaagcctggtggcccgggaatcagtgcagggctacactaccaaaaccaaacaggaggtcgaaatttcacggcgagtcacactcgagaaactgccgcccgtcctggtattacacctcaagcggtttgtctacgagaaaactgggggatgtcagaagctgattaaaaacattgagtaccctgtcgatctggagatatccaaagagcttctgtctcctggcgtgaaaaacaagaactttaagtgccacagaacatacaggctgttcgccgtggtttatcaccacgggaactccgccactggtggtcactacactaccgacgtcttccagattggtctcaatgggtggctgcggatcgacgaccagactgttaaggttatcaaccaatatcaggtggtcaagccaacagcagagaggaccgcatacttactgtactaccggcgggtggacctgctctag

SEQ ID NO: 153383 - DNA, 2397 bp, Artificial Sequence
  derived and/or modified sequence
atggccctgcacagcccccagtacatctttggagacttctccccagatgagttcaaccagttctttgtgacccccaggagctctgtggagctgcccccctacagcggcaccgtgctgtgtggcacccaggccgtggacaagctgcctgatggccaggagtaccagagaattgaatttggagtggatgaggtgattgagcccagcgacaccctgcccaggacccccagctacagcatcagcagcaccctgaacccccaggcccctgagttcatcctgggctgcacagccagcaagatcaccccagatggcatcaccaaggaggccagctatggcagcattgactgccagtacccaggcagcgccctggccctggatggcagcagcaatgtggaggccgaggtgctggagaatgatggagtgtctgggggcctgggccagcgggagaggaagaagaagaagaagaggcctcctggctactacagctacctgaaggatggaggagatgacagcatcagcacagaggccctggtgaatggccacgccaacagcgctgtgcccaacagcgtgtctgcagaagatgctgagttcatgggagacatgcctccttctgtgacccccaggacctgcaacagcccccagaacagcacagacagcgtgtctgacatcgtgcctgacagccccttccctggggccctgggcagtgacaccaggacagctggccagcctgagggcggccctggagctgactttggccagagctgcttccctgctgaggccggccgggacaccctgagcaggacagctggggcccagccctgtgtgggcacagacaccacagagaacctgggcgtggccaacggccagatcctggagagcagtggagagggcacagccaccaacggggtggagctgcacaccacagagagcattgacctggaccccaccaagccagagagcgccagccccccagcagatggcactggaagtgccagcggcaccctgcctgtgtcccagcccaagtcctgggccagcctcttccatgacagcaagcccagcagcagcagccctgtggcctacgtggagaccaagtacagccccccagccatcagccccctggtgtctgagaagcaggtggaggtgaaggagggcctggtgcctgtgtctgaagatcctgtggccatcaagattgctgagctgctggagaatgtgaccctcatccacaagcctgtgtccctgcagccccggggcctcatcaacaagggcaactggtgctacatcaatgccaccctgcaggccctggtggcctgcccccccatgtaccacctgatgaagttcatccccctgtacagcaaggtgcagaggccctgcaccagcacccccatgattgacagctttgtgcggctgatgaatgagttcaccaacatgcctgtgccccccaagccccggcaggccctgggggacaagatcgtgcgggacatccggcctggagctgcctttgagcccacctacatctaccgcctgctgactgtgaacaagagcagcctgtctgagaagggccggcaggaggatgctgaggagtacctgggcttcatcctgaatggcctgcacgaggagatgctgaacctgaagaagctgctgagccccagcaatgagaagctgaccatcagcaatggccccaagaaccacagcgtgaatgaggaggagcaggaggagcagggcgagggctctgaagatgagtgggagcaggtgggccccaggaacaagacctctgtgacccggcaggccgactttgtgcagacccccatcaccggcatctttggaggccacatccgctctgtggtgtaccagcagagcagcaaggagagcgccaccctgcagcccttcttcaccctgcagctggacatccagagcgacaagatcagaacagtgcaggatgccctggagagcctggtggcccgggagagcgtgcagggctacaccaccaagaccaagcaggaggtggagatcagcagaagagtgaccctggagaagctgccccctgtgctggtgctgcacctgaagagatttgtgtatgagaagacaggaggctgccagaagctgatcaagaacatcgagtaccctgtggacctggagatcagcaaggagctgctgagccctggggtgaagaacaagaacttcaagtgccacaggacctaccgcctgtttgctgtggtgtaccaccacggcaacagcgccaccggcggccactacaccacagatgtgttccagatcggcctgaatggctggctgagaattgatgaccagacagtgaaggtgatcaaccagtaccaggtggtgaagcccacagctgagaggacagcctacctgctgtactacagaagagtggacctgctgtag

SEQ ID NO: 153384 - DNA, 2397 bp, Artificial Sequence
  derived and/or modified sequence
atggccctgcacagcccccagtacatcttcggcgacttcagccccgatgaattcaatcagttcttcgtgacccctcgttcctcggttgagctacctccctactccgggacagtcctctgtgggacccaggccgtagacaaactccctgacggacaggaatatcagcgcattgagttcggcgtcgacgaggtgattgagccaagcgacacactgccaaggacaccctcctatagcatttctagcaccttaaacccgcaggcccctgaatttattctcggctgtacagcttccaagattacccctgatgggattaccaaagaggcatcttatgggtctatcgattgccagtacccaggaagcgccctagccctggatggttcgtcaaatgtggaggcagaggtgcttgagaatgacggcgttagcggagggctcggccagcgtgaacgcaagaaaaaaaaaaaaagacctcctggctattattcgtatctcaaggacggcggcgacgactcaattagcacagaggccctcgtgaacggccatgctaactctgccgtaccaaacagcgtttctgccgaagacgccgaattcatgggcgacatgccccctagcgtaaccccccggacatgcaattctccccagaactctaccgattccgtttccgacatcgtccccgatagcccattcccgggagcactgggctcggacacaagaacagcaggccagccagaggggggccccggtgccgactttggccagtcttgtttccctgctgaggctggacgcgacacactgagcaggaccgcgggtgcacagccttgcgtgggcaccgacaccacggagaacctgggcgtggccaatgggcaaatcctggagtcttcaggcgaaggaacggctactaatggtgtggagctccacacaactgagagcatcgacctggaccccaccaagcctgaatctgccagcccccctgccgacgggacaggaagcgcctctggtacccttccagttagccaacccaagtcctgggctagcctgtttcacgattcgaagccttcatcctctagtcccgtggcctacgtggaaacaaaatactcaccaccagccatcagcccactggtgagcgagaagcaggtcgaggtcaaagagggtctggtgccagtgagtgaagaccccgtcgcaataaaaatcgctgagcttctggagaacgttactttgatccacaaacccgtgagcttgcagccaaggggcctgattaataaaggcaactggtgttatatcaacgccacgctgcaggccttggtggcgtgccctcctatgtaccacctgatgaaattcattcctttgtatagcaaggtgcagcgaccttgtacttctacacctatgattgatagtttcgtgaggctgatgaacgagttcaccaacatgcctgtccctcccaaaccacgacaggcattaggggacaagattgtgagagatatcaggcccggcgctgccttcgagcccacctacatatatcggctgctgaccgtcaataaatctagcctgtccgaaaaaggcagacaggaggatgctgaggagtacctgggcttcatcctaaacgggctgcatgaggagatgctaaatctcaagaaactactatcaccaagcaatgaaaaactaacgatatcgaatggtccaaaaaatcactccgtgaacgaggaggagcaagaggagcagggcgagggatccgaggatgagtgggagcaggtcggccccagaaataagacatcagtgactcgacaagctgacttcgtccaaacaccaattaccggtatattcggtggccacatccgctctgtcgtatatcagcagtcgtctaaggagagtgcgactctgcagcctttcttcacattgcagttggatatccagtctgataaaatccgaacggtgcaggacgccctagaaagtttggtcgcgagggagtctgtccaaggttacacaaccaaaacgaagcaggaagttgaaatatctcgccgggtgacactggaaaaactgcccccagtgcttgtactgcaccttaagcgcttcgtctatgaaaagactggcggatgtcagaaactgattaaaaacattgagtaccccgtggatcttgaaatcagcaaagagttactgtctcctggggtcaaaaacaagaattttaaatgtcaccgcacataccggctgttcgccgtcgtgtaccaccatggtaacagcgcaactgggggacattatacgaccgatgtgtttcagattggtctcaacggctggctgcggatcgacgaccagacagttaaggttattaatcaataccaagttgttaagccgacggccgagcggaccgcctacttgctctattaccgccgcgtggacctcctctag

SEQ ID NO: 153385 - DNA, 2397 bp, Artificial Sequence
  derived and/or modified sequence
atggctctgcattctcctcagtatatctttggagatttctcccccgatgagttcaaccaattttttgtcactccccgaagctcggtggagcttccaccctattccggtacagtcctgtgcgggactcaggcagtcgacaagctgcccgacggacaagagtatcagagaatagagtttggagtggacgaggtgatcgaaccttcagacaccctgcccaggactccttcctattccatcagctccacacttaatccacaggctccggagtttattctgggctgcacagcttctaagatcacaccagacggtatcacaaaggaagcatcatacggcagcatcgattgccagtatcctgggagcgccctggccctcgacggctcctcaaacgtggaggccgaggttttggagaatgacggcgttagtggcggtctcggccagcgagaaagaaagaagaagaagaagcgaccgcctggttattactcatacttgaaagacggcggtgatgattccatatccacggaagccttggtaaacggtcatgctaactctgctgtgccgaactctgtctccgcagaagacgcggagttcatgggcgacatgcctccatctgtgactcctaggacttgcaatagccctcaaaacagcaccgatagcgtcagtgacatcgtaccggacagccctttcccaggtgcattggggtctgatacccgtactgcaggccaacccgaaggcggtcccggagccgatttcggacagtcctgtttccctgccgaggcgggacgcgacacattgagccgtaccgctggggcacagccttgtgtagggacagatacgaccgaaaaccttggtgtcgcgaacggacaaattctggagtcttccggcgaagggactgctactaatggtgtggaactgcacaccaccgagtcaatcgaccttgatccaacaaaaccggaatcggctagccctccagccgacggcaccgggtcagcttctgggacactgccagtgtcgcagcccaagagttgggctagtctgttccatgatagtaagccaagctccagttctcctgttgcctacgtggaaactaagtatagccctccggcaataagcccactggtcagcgaaaagcaggtggaagtcaaggaaggactggtgccagtgagcgaagatcctgtggcaatcaagatcgccgagctgctggagaatgtcaccttgatccataagccggtgagcttgcagcctcggggactgattaacaagggaaattggtgttatatcaacgcgacattgcaagcgttggttgcttgtccacccatgtatcacttaatgaaatttatcccactgtactccaaggtgcagcgcccatgcacgtcgacaccgatgatcgactcctttgttcgtttaatgaatgagttcacaaatatgcccgtccctcctaagccccgacaggccctcggggataagatagtgcgggatattcgtccaggggcagccttcgaacctacgtatatttacaggctactgacggtgaacaaatcaagtctcagtgagaaaggaaggcaagaggatgcggaagaatacttgggattcatccttaacgggctgcacgaggaaatgctcaacctcaagaaactgctgagtccatccaacgaaaaactgaccatctccaacggtcctaagaatcactccgtgaatgaagaggaacaggaggaacaaggagaaggaagcgaagacgagtgggagcaggttggtccaaggaacaagacctcggtcaccaggcaggctgactttgtgcagacccctatcacgggtatttttgggggtcacattcggagtgtggtctaccagcagtcttcaaaggagagcgcgacgctgcaaccattcttcactctgcagcttgacattcaaagtgataaaattcggacagtgcaggatgctctggaatctctggtggctcgcgaaagcgttcaaggctacaccacgaagacgaaacaagaagtggaaatttccagacgagtgaccctggagaagcttcccccagtcttagtgcttcacctgaagagatttgtgtacgaaaagacaggtggttgccagaaactaattaagaacatcgaataccccgtggacctggagatcagcaaggagctgctaagccctggagtgaaaaataagaatttcaagtgtcacagaacatacagactgtttgctgtcgtgtaccatcatggcaactccgcaaccgggggtcactacactactgatgtcttccagattggattgaatggttggttgaggattgacgaccaaaccgtgaaggtcattaatcagtatcaggtcgtcaagcctaccgccgaaagaaccgcctaccttctctattaccggcgagttgatctgctgtag

SEQ ID NO: 153386 - DNA, 189 bp, Artificial Sequence
  derived and/or modified sequence
atggccctgcacagcccccagtacatcttcggcgacttcagccccgacgagttcaaccagttcttcgtgacccccagaagcagcgtggaggacaagaacatcagagagctgagcctggtgagcatgaagagcctgaaccccgtgaccctgtgcagagagccccccgccaccgtgttccaggcccactag

SEQ ID NO: 153387 - DNA, 3376 bp, Artificial Sequence
  derived and/or modified sequence
ctccccgcgccccgcggcgcgcggccagtgcgcaggcgcggcggccgatgcgagtgtgtatgtgcgggcgagaagatggcggcggcgggggaagcagcgtgagcagccggaggatcgcggagtcccaatgaaacgggcagccatggccctccacagcccgcagtatatttttggagattttagccctgatgaattcaatcaattctttgtgactcctcgatcttcagttgagcttcctccatacagtggaacagttctgtgtggcacacaggctgtggataaactacctgatggacaagaatatcagagaattgagtttggtgtcgatgaagtcattgaacccagtgacactttgccgagaacccccagctacagtatttcaagcacactgaaccctcaggcccctgaatttattctcggttgtacagcttccaaaataacccctgatggtatcactaaagaagcaagctatggctccatcgactgccagtacccaggctctgccctcgctttggatggaagttctaatgtggaggcggaagttttggaaaatgatggtgtctcaggtggtcttggacaaagggagcgtaaaaagaagaaaaagcggccacctggatattacagctatttgaaagatggtggcgatgatagtatctccacagaagccctggtcaatggccatgccaattcagcagtcccgaacagtgtcagtgcagaggatgcagaatttatgggtgacatgcccccgtcagttacgcccaggacttgtaacagcccccagaactccacagactctgtcagtgacattgtgcctgacagtcctttccccggagcactcggcagtgacaccaggactgcagggcagccagaggggggccccggggctgattttggtcagtcctgcttccctgcagaggctggcagagacaccctgtcaaggacagctggggctcagccctgcgttggtaccgatactactgaaaaccttggagttgctaatggacaaatacttgaatcctcgggtgagggcacagctaccaacggggtggagttgcacaccacggaaagcatagacttggacccaaccaaacccgagagtgcatcacctcctgctgacggcacgggctctgcatcaggcacccttcctgtcagccagcccaagtcctgggccagcctctttcatgattctaagccctcttcctcctcgccggtggcctatgtggaaactaagtattcccctcccgccatatctcccctggtttctgaaaagcaggttgaagtcaaagaagggcttgttccggtttcagaggatcctgtagccataaagattgcagagttgctggagaatgtaaccctaatccataaaccagtgtcgttgcaaccccgtgggctgatcaataaagggaactggtgctacattaatgctacactgcaggcattggttgcttgcccgccgatgtaccacctgatgaagttcattcctctgtattccaaagtgcaaaggccttgtacgtcaacacccatgatagacagctttgttcggctaatgaatgagttcactaatatgccagtacctccaaaaccccgacaagctcttggagataaaatcgtgagggatattcgccctggagctgcctttgagcccacatatatttacagactcctgacagttaacaagtcaagcctgtctgaaaagggtcgacaagaagatgctgaggaatacttaggcttcattctaaatggacttcatgaggaaatgttgaacctaaagaagcttctctcaccaagtaatgaaaaacttacgatttccaacggccccaaaaaccactcggtcaatgaagaagagcaggaagaacaaggtgaaggaagcgaggatgaatgggaacaagtgggcccccggaacaagacttccgtcacccgccaggcggattttgttcagactccaatcaccggcatttttggtggacacatcaggtctgtggtttaccagcagagttcaaaagaatctgccactttgcagccatttttcacgttgcagttggatatccagtcagacaagatacgcacagtccaggatgcactggagagcttggtggcaagagaatctgtccaaggttataccacaaaaaccaaacaagaggttgagataagtcgaagagtgactctggaaaaactccctcctgtcctcgtgctgcacctgaaacgattcgtttatgagaagactggtgggtgccagaagcttatcaaaaatattgaatatcctgtggacttggaaattagtaaagaactgctttctccaggggttaaaaataagaattttaaatgccaccgaacctatcggctctttgcagtggtctaccatcacggcaacagtgcgacgggcggccattacactacagacgtcttccagatcggtctgaatggctggctgcgcatcgatgaccagacagtcaaggtgatcaaccagtaccaggtggtgaaaccaactgctgaacgcacagcctacctcctgtattaccgccgagtggacctgctgtaaaccctgtgtgcgctgtgtgtgcgcccagtgcccgcttcgtaggacaccacctcacactcacttcccgcctctctttagtggctctttagagagaaactctttctccctttgcaaaaatgggctagaatgaaaaggagatgccttggggttcgtgcacaacacagcttctgttgactctaacttccaaatcaaaatcatttggttgaaacagactgttgcttgattttagaaaatacacaaaaacccatatttctgaaataatgctgattcctgagataagaaagtggatttgatccccagtctcattgcttagtagaataaatcctgcaccagcaacaacacttgtaaatttgtgaaaatgaattttatctttccttaaaaaagaaattttttaatccatcacacttttcttccctaccctttagtttttgataaatgataaaaatgagccagttatcaaagaagaactagttcttacttcaaaagaaaaataaacataaaaaataagttgctggttcctaacaggaaaaattttaataattgtactgagagaaactgcttacgtacacattgcagatcaaatatttggagttaaaatgttagtctacatagatgggtgattgtaactttattgccattaaaagatttcaaattgcattcatgcttctgtgtacacataatgaaaaatgggcaaataatgaagatctctccttcagtctgctctgtttaattctgctgtctgctcttctctaatgctgcgtccctaattgtacacagtttagtgatatctaggagtataaagttgtcgcccatcaataaaaatcacaaagttggttt

SEQ ID NO: 153388 - protein, 1130 aa, Artificial Sequence
  derived and/or modified sequence
MLEICLKLVGCKSKKGLSSSSSCYLEEALQRPVASDFEPQGLSEAARWNSKENLLAGPSENDPNLFVALYDFVASGDNTLSITKGEKLRVLGYNHNGEWCEAQTKNGQGWVPSNYITPVNSLEKHSWYHGPVSRNAAEYLLSSGINGSFLVRESESSPGQRSISLRYEGRVYHYRINTASDGKLYVSSESRFNTLAELVHHHSTVADGLITTLHYPAPKRNKPTVYGVSPNYDKWEMERTDITMKHKLGGGQYGEVYEGVWKKYSLTVAVKTLKEDTMEVEEFLKEAAVMKEIKHPNLVQLLGVCTREPPFYIITEFMTYGNLLDYLRECNRQEVNAVVLLYMATQISSAMEYLEKKNFIHRDLAARNCLVGENHLVKVADFGLSRLMTGDTYTAHAGAKFPIKWTAPESLAYNKFSIKSDVWAFGVLLWEIATYGMSPYPGIDLSQVYELLEKDYRMERPEGCPEKVYELMRACWQWNPSDRPSFAEIHQAFETMFQESSISDEVEKELGKQGVRGAVSTLLQAPELPTKTRTSRRAAEHRDTTDVPEMPHSKGQGESDPLDHEPAVSPLLPRKERGPPEGGLNEDERLLPKDKKTNLFSALIKKKKKTAPTPPKRSSSFREMDGQPERRGAGEEEGRDISNGALAFTPLDTADPAKSPKPSNGAGVPNGALRESGGSGFRSPHLWKKSSTLTSSRLATGEEEGGGSSSKRFLRSCSASCVPHGAKDTEWRSVTLPRDLQSTGRQFDSSTFGGHKSEKPALPRKRAGENRSDQVTRGTVTPPPRLVKKNEEAADEVFKDIMESSPGSSPPNLTPKPLRRQVTVAPASGLPHKEEAGKGSALGTPAAAEPVTPTSKAGSGAPGGTSKGPAEESRVRRHKHSSESPGRDKGKLSRLKPAPPPPPAASAGKAGGKPSQSPSQEAAGEAVLGAKTKATSLVDAVNSDAAKPSQPGEGLKKPVLPATPKPQSAKPSGTPISPAPVPSTLPSASSALAGDQPSSTAFIPLISTRVSLRKTRQPPERIASGAITKGVVLDSTEALCLAISRNSEQMASHSAVLEAGKNLYTFCVSYVDSIQQMRNKFAFREAINKLENNLRELQICPATAGSGPAATQDFSKLLSSVKEISDIVQR

SEQ ID NO: 153389 - protein, 161 aa, Artificial Sequence
  derived and/or modified sequence
GRPGRSRARGGGEGGWRGGGRAGRAGPEPGPRAGRGVPAPDCWRGKMLEICLKLVGCKSKKGLSSSSSCYLEEALQRPVASDFEPQGLSEAARWNSKENLLAGPSENDPNLFVALYDFVASGDNTLSITKGEKLRVLGYNHNGEWCEAQTKNGQGWVPSNY

SEQ ID NO: 153390 - protein, 945 aa, Artificial Sequence
  derived and/or modified sequence
LRLLREPLQHPGRVGSSSFNGGRRAHHHAPLSSPKAQQAHCLWCVPQLRQVGDGTHGHHHEAQGGGQYGEVYEGVWKKYSLTVAVKTLKEDTMEVEEFLKEAAVMKEIKHPNLVQLLGVCTREPPFYIITEFMTYGNLLDYLRECNRQEVNAVVLLYMATQISSAMEYLEKKNFIHRDLAARNCLVGENHLVKVADFGLSRLMTGDTYTAHAGAKFPIKWTAPESLAYNKFSIKSDVWAFGVLLWEIATYGMSPYPGIDLSQVYELLEKDYRMERPEGCPEKVYELMRACWQWNPSDRPSFAEIHQAFETMFQESSISDEVEKELGKQGVRGAVSTLLQAPELPTKTRTSRRAAEHRDTTDVPEMPHSKGQGESDPLDHEPAVSPLLPRKERGPPEGGLNEDERLLPKDKKTNLFSALIKKKKKTAPTPPKRSSSFREMDGQPERRGAGEEEGRDISNGALAFTPLDTADPAKSPKPSNGAGVPNGALRESGGSGFRSPHLWKKSSTLTSSRLATGEEEGGGSSSKRFLRSCSASCVPHGAKDTEWRSVTLPRDLQSTGRQFDSSTFGGHKSEKPALPRKRAGENRSDQVTRGTVTPPPRLVKKNEEAADEVFKDIMESSPGSSPPNLTPKPLRRQVTVAPASGLPHKEEAGKGSALGTPAAAEPVTPTSKAGSGAPGGTSKGPAEESRVRRHKHSSESPGRDKGKLSRLKPAPPPPPAASAGKAGGKPSQSPSQEAAGEAVLGAKTKATSLVDAVNSDAAKPSQPGEGLKKPVLPATPKPQSAKPSGTPISPAPVPSTLPSASSALAGDQPSSTAFIPLISTRVSLRKTRQPPERIASGAITKGVVLDSTEALCLAISRNSEQMASHSAVLEAGKNLYTFCVSYVDSIQQMRNKFAFREAINKLENNLRELQICPATAGSGPAATQDFSKLLSSVKEISDIVQR

SEQ ID NO: 153391 - DNA, 3393 bp, Artificial Sequence
  derived and/or modified sequence
atgctcgagatctgcctgaagcttgtgggctgcaaaagtaagaaaggtctgagcagttcttcaagttgttaccttgaagaagccctccaaagaccagtggcaagtgacttcgagcctcaagggctgtccgaagcggcaagatggaacagtaaagaaaatctgctggccgggccctcagaaaacgacccgaatctgttcgttgctctctatgacttcgtggccagtggcgacaataccctgtcgattactaagggagaaaagctgagggttctgggatacaatcacaacggggaatggtgtgaggctcagaccaagaatggacaggggtgggtgccctccaattatatcaccccagtcaactcgttggaaaaacactcctggtaccatggacccgttagcaggaacgctgccgagtacctcttatcatccgggatcaacggctcattccttgtgcgcgaatccgaatcttcccctggccaacgctccatcagtcttagatatgaggggcgggtatatcattataggatcaacaccgcctccgatggcaagttatacgtcagttcagaaagcaggtttaacaccctggccgaactggttcatcatcacagtaccgtagcagacggcttgataactactctacactatcctgcccctaagcgtaataagccgaccgtgtatggtgtaagcccaaactacgacaagtgggagatggaacgaaccgatatcacgatgaagcacaagctaggggggggacagtacggtgaggtgtatgaaggtgtgtggaaaaaatactcactgaccgtggcggtcaaaaccttaaaagaagacactatggaagtcgaagagtttttgaaggaggccgccgtgatgaaagagatcaaacatccaaatctagtgcagttattgggcgtctgcacccgcgagccccctttttatataatcactgaatttatgacatatgggaatttattagactacctgagagagtgcaatcggcaagaggtcaacgcggtggttctcctgtacatggccacccagatttcatccgctatggagtatctagagaagaaaaatttcatacatagagacctggctgccaggaattgcctggtcggcgagaaccatcttgtgaaagtcgccgacttcggtctgtcacgtcttatgactggcgatacatataccgcgcacgccggagcaaagttcccaattaagtggaccgcccccgagtcactggcttacaacaaatttagcatcaagtcagatgtgtgggcctttggagtcctgttgtgggaaatcgcaacatacgggatgtcaccttaccccgggatcgacctgtctcaggtctatgagctgctcgagaaggattaccggatggagcgtcccgaaggatgtcctgagaaggtgtatgagctaatgagggcctgctggcaatggaacccctctgaccgaccttcctttgccgaaatccatcaggctttcgagactatgttccaggagtcttcaatcagcgatgaggtggagaaggagttgggcaagcagggggtgcggggcgccgtgtcaaccctgctgcaagcacccgagctccctacgaagactcgaacctctcgacgggctgccgagcaccgagatacgaccgatgtgcccgagatgccccatagcaaaggccaaggggagagcgaccccctggaccatgagccagctgtctccccgctacttcccaggaaagaaaggggcccaccagagggaggtcttaacgaagatgaacggctgcttcctaaagataaaaaaacaaacctgttttctgcactgatcaagaaaaaaaaaaagaccgctcccacgcctccgaaacgctccagtagctttcgagagatggacggccagccagaacggcgaggagcgggcgaagaggagggtcgcgacatctctaacggagcactggctttcacgcccctggatactgccgacccagccaagtcccccaagccgtcaaacggtgcgggggtgcctaatggtgccctaagggaatcggggggcagtggattccgtagccctcacctgtggaagaagtcctcaaccctgacatcttctcgccttgctacaggtgaagaggaaggcggcgggtccagttccaagcgcttcctcagaagttgctccgcatcttgcgttccgcacggcgccaaggacactgagtggcggtccgtgacgctccctcgggacctgcaatcaactggccggcaatttgattcgtctacttttgggggtcataaatccgagaaacctgcccttccgagaaagcgggccggcgagaatcgcagcgatcaggtgactcgcgggactgtgaccccccctccaagattggtgaagaaaaacgaggaagccgccgacgaggttttcaaagatataatggaaagctctcccggcagcagcccacccaacctgacgccaaagccgctgcggagacaggtcactgtcgccccagcctcaggtcttccccacaaggaagaggctgggaaaggttccgccctggggacacccgccgcggcagagccagttacccccactagcaaagctggctctggggctcccggaggcacctcaaagggcccagcagaggagagtagggtgcgtcgccacaagcacagcagtgagagtcctggaagggataaggggaaactatcacgcctcaaaccagctccacctccaccaccagccgccagcgcaggcaaagctggcgggaaaccctcccagagtcccagccaggaagccgctggtgaggcagtcttgggagcaaaaacaaaggccacttccctggttgatgctgtaaacagcgacgccgccaagccttcacagcctggagaaggcctgaagaaacccgttctgcccgcaacccccaaaccccagagcgcaaagccatcagggactccgatatcgcccgcccccgtgcccagcacactcccgagcgcatcatccgcgctcgccggagaccaaccatcctctaccgcgttcatacctctgatttctaccagagtctctttgagaaagacacgacagccacccgagcgtatagcatccggtgccattacgaagggcgttgtccttgatagcacagaagccttatgtttggctataagccggaactctgagcagatggcttctcatagtgcagttctggaggcgggcaagaatctgtacaccttttgtgtctcatatgtcgactccatccaacaaatgagaaataaatttgcctttcgggaggccatcaacaaactggagaacaacttgcgagagttacagatctgtcccgctacagcagggagcggtccggcggcaacacaggatttctcaaaactcctgagctccgtgaaagaaatcagcgacattgtgcagcgctag

SEQ ID NO: 153392 - DNA, 486 bp, Artificial Sequence
  derived and/or modified sequence
ggtcgccccgggcgcagtagagctcggggaggcggagaaggtggatggagaggtggcggtagagctggacgcgccgggccggagcccggccccagagctggtagaggagttcccgcccctgactgttggcgaggtaagatgctggagatttgtctgaaattagtcggctgcaagtcgaagaagggcttgtcctcttcgtcaagctgctatctggaggaagcacttcagcggcctgtggcaagtgattttgagcctcaggggctttccgaggccgctcgatggaacagcaaggagaacctgctggcgggaccctccgaaaacgaccctaacctttttgtcgctctctacgactttgtcgccagtggcgacaacacacttagcatcacgaagggagaaaagctgagggtcctgggctataatcacaacggagaatggtgtgaggcccagactaagaatggacagggttgggtacctagcaactactag

SEQ ID NO: 153393 - DNA, 2838 bp, Artificial Sequence
  derived and/or modified sequence
ttacgcctcctgcgggagcctttacagcatccaggacgcgtaggctcttcatctttcaacggcgggcggcgggcccatcatcatgcacccctgtcctctcccaaggctcaacaggcccattgtttatggtgcgtgccccaactgagacaggtgggtgacggaacccatggtcaccaccacgaggcccagggggggggccaatatggcgaggtgtacgaaggcgtctggaagaagtattcactcactgtcgcagttaaaaccttaaaggaggatacgatggaagtggaagaattcctgaaggaggcagccgtgatgaaagaaattaagcatcccaacttggtccagcttctcggcgtctgcacacgcgagcctcctttctacattatcaccgagtttatgacatatggtaatttgctcgattatctaagggaatgtaatagacaggaagttaatgccgtcgtgctcttgtacatggctacacaaattagcagcgctatggaatacctcgagaaaaagaattttattcacagggatttagcggcccgcaactgcctcgttggcgagaaccatttggtcaaagtagccgacttcggcttgtcaaggctgatgaccggtgatacttataccgcccacgcaggcgcaaaattcccaataaagtggactgctccagagagcctggcttacaacaaattcagtataaaatcagatgtgtgggccttcggcgtcttactgtgggagattgcaacatacggcatgagcccctacccaggcattgacctttcccaggtctacgagctccttgagaaagactacagaatggagaggcccgaaggttgccccgagaaggtgtatgaactgatgcgggcctgttggcaatggaacccttccgacagacctagtttcgccgaaattcaccaggcctttgagaccatgtttcaagaatcatccattagcgacgaggttgagaaggagctcggaaagcagggggtgcggggcgccgtgagcacactgctgcaggcccctgaactacccacgaagacaaggacatcaagacgggccgcagaacacagggacactaccgatgtgccagagatgcctcatagcaaaggacagggggagtccgatcccctcgaccacgagcccgctgttagtcccttgctgcctagaaaggagagaggtccccctgaaggtggtcttaacgaagacgagagattacttcctaaggacaagaaaacgaaccttttcagtgcccttatcaagaaaaaaaagaaaaccgccccaacaccacctaaaaggagtagcagttttcgcgagatggacggccagcctgagcgacgcggtgccggcgaggaggaagggcgcgatatatcaaatggagctctggcatttacccctttggacactgctgaccccgcaaaatccccaaagccaagcaatggagccggtgtgcctaacggggcgttgcgcgaatccgggggctcgggcttcaggtcacctcatctatggaagaagagctccacattgaccagtagtcgactggcaaccggcgaggaggaagggggaggttcttccagcaagcggttcctccggtcttgtagcgcctcttgcgtcccacacggagctaaggacacagagtggcgctctgtcaccctgcccagagatctgcagagcaccggacgccagtttgactcttctacctttggtggacacaaatcggagaaacccgctctgcccagaaaacgggccggggagaatcgtagtgatcaggtgactagaggcacagtgacgccacctcccagacttgtcaagaaaaacgaagaggccgcagacgaggtgttcaaagatatcatggagtcctcacctggttctagcccccctaatttaacacccaagcctctccgccggcaggttaccgtcgctccggcctctggtcttccgcacaaagaagaggcgggaaagggcagcgcccttggcacaccagctgccgccgaacccgttacccccaccagtaaggcggggagtggcgcacctggtggcacttccaaaggcccagcagaggagtctcgggtccgacggcacaagcactcgagcgagtcacctggtcgcgacaaagggaagctcagccggctgaaaccagcaccaccccctccccccgcagcatcagccggaaaggcaggtgggaagcctagtcaaagtccctcccaggaagctgccggagaggccgtgttgggggctaagactaaggccacgtctttggtagacgcagtgaatagcgacgcagctaaaccatctcagccaggggagggccttaagaagcctgttctccctgcaacaccgaagccacagtcggcaaagccttccggcaccccaatcagtccagcacctgttccatctacgctaccctcggctagttcagcattggctggggatcaaccaagctctactgccttcattccgctcatatctaccagggtgtctctgagaaaaacgagacagccacctgagcgaattgcctccggcgcaatcactaaaggcgtggtcctggatagcactgaggctctgtgcctcgcaatatctagaaatagtgaacaaatggcatctcattcagccgtgctggaggctggaaagaatctttatacgttctgcgtgagctacgtggattctatccagcaaatgagaaataaatttgctttccgcgaagcaatcaacaaattggaaaataatttgcgggaattgcaaatctgtccagccaccgccggatctggccccgcggctacccaggatttctctaagctgttgagttctgtgaaggagattagcgatatcgttcaacgctag

SEQ ID NO: 153394 - DNA, 3393 bp, Artificial Sequence
  derived and/or modified sequence
atgctggagatctgcctgaagctggtgggctgcaagagcaagaagggcctgagcagcagcagcagctgctacctggaggaggccctgcagaggcctgtggccagtgactttgagccccagggcctgtctgaggccgcccgctggaacagcaaggagaacctgctggccggccccagtgaaaatgaccccaacctgtttgtggccctgtatgactttgtggccagcggggacaacaccctgagcatcaccaagggggagaagctgcgggtgctgggctacaaccacaacggggagtggtgtgaggcccagaccaagaatggccagggctgggtgcccagcaactacatcacccctgtgaacagcctggagaagcacagctggtaccacggccctgtgtccagaaatgctgctgagtacctgctgagcagcggcatcaatggcagcttcctggtgcgggagagcgagagcagccctggccagaggagcatcagcctgcgctatgagggccgggtgtaccactaccgcatcaacacagccagtgatggcaagctgtatgtgagcagcgagagccgcttcaacaccctggccgagctggtgcaccaccacagcacagtggctgatggcctcatcaccaccctgcactacccagcccccaagaggaacaagcccaccgtgtatggagtgagccccaactatgacaagtgggagatggagaggacagacatcaccatgaagcacaagctgggcggcggccagtatggagaggtgtatgaaggagtgtggaagaagtacagcctgactgtggccgtgaagaccctgaaggaggacaccatggaggtggaggagttcctgaaggaggccgctgtgatgaaggagatcaagcaccccaacctggtgcagctgctgggcgtgtgcacccgggagccccccttctacatcatcacagagttcatgacctacggcaacctgctggactacctgcgggagtgcaaccggcaggaggtgaatgctgtggtgctgctgtacatggccacccagatcagcagcgccatggagtacctggagaagaagaacttcatccaccgggacctggccgccaggaactgcctggtgggggagaaccacctggtgaaggtggccgactttggcctgagccggctgatgactggagacacctacacagcccatgctggggccaagttccccatcaagtggacagcccctgagagcctggcctacaacaagttcagcatcaagagtgatgtgtgggcctttggagtgctgctgtgggagatcgccacctacggcatgagcccctacccaggcatcgacctgagccaggtgtatgagctgctggagaaggactacaggatggagaggcctgagggctgcccagagaaggtgtatgagctgatgagggcctgctggcagtggaaccccagcgaccggcccagctttgctgagatccaccaggcctttgagaccatgttccaggagagcagcatcagtgatgaggtggagaaggagctgggcaagcagggcgtgagaggagctgtgtccaccctgctgcaggcccctgagctgcccaccaagaccaggaccagccggcgggctgctgagcaccgggacaccacagatgtgcctgagatgccccacagcaagggccagggcgagagtgaccccctggaccacgagcctgctgtgagccccctgctgcccaggaaggagcggggccccccagagggcggcctgaatgaagatgagcggctgctgcccaaggacaagaagaccaacctcttcagcgccctgatcaagaagaagaagaagacagcccccaccccacccaagaggagcagcagcttccgggagatggatggccagcctgagaggagaggagctggggaggaggagggccgggacatcagcaatggagccctggccttcacccccctggacacagctgaccctgccaagagccccaagcccagcaatggagctggggtgcccaacggggccctgcgggagagcggcggcagcggcttccgcagcccccacctgtggaagaagagcagcaccctgaccagcagccggctggccaccggggaggaggagggcggcggcagcagcagcaagcgcttcctgcggagctgcagcgccagctgtgtgccccacggggccaaggacacagagtggaggtctgtgaccctgccccgggacctgcagagcacaggccggcagtttgacagcagcaccttcggcggccacaagtctgagaagccagccctgcccaggaagagagctggagaaaatagaagtgaccaggtgacccggggcaccgtgaccccaccaccccggctggtgaagaagaatgaggaggccgcagatgaggtgttcaaggacatcatggagagcagccctggcagcagcccccccaacctgacccccaagcccctgcggcggcaggtgacagtggccccagccagcggcctgccccacaaggaggaggccggcaagggcagcgccctgggcaccccagctgctgctgagcctgtgacccccaccagcaaggccggcagcggggcccctgggggcaccagcaaaggacctgctgaggagagccgggtgcggcggcacaagcacagcagcgagagccctggccgggacaagggcaagctgagccggctgaagccagcccctcctcctcctcctgctgccagcgctgggaaggccggcggcaagcccagccagagccccagccaggaggccgccggggaggccgtgctgggcgccaagaccaaggccaccagcctggtggatgctgtgaacagtgatgctgccaagcccagccagcctggagagggcctgaagaagcctgtgctgcctgccacccccaagccccagagcgccaagcccagcggcacccccatcagccctgcccctgtgcccagcaccctgcccagcgccagcagcgccctggccggggaccagcccagcagcacagccttcatccccctcatcagcaccagggtgtccctgaggaagacccggcagcccccagagcgcatcgccagcggggccatcaccaagggcgtggtgctggacagcacagaggccctgtgcctggccatcagcagaaattctgagcagatggccagccacagcgctgtgctggaggccggcaagaacctgtacaccttctgtgtgtcctatgtggacagcatccagcagatgaggaacaagtttgccttccgggaggccatcaacaagctggagaacaacctgcgggagctgcagatctgcccagccacagctggcagcggccctgctgccacccaggacttcagcaagctgctgagctctgtgaaggagatcagtgacatcgtgcagaggtag

SEQ ID NO: 153395 - DNA, 486 bp, Artificial Sequence
  derived and/or modified sequence
ggccggcccggccgcagccgggcccggggcggcggggagggcggctggaggggcggcggccgggccggccgggccggccctgagcccggccccagggctggccggggcgtgcctgccccagactgctggaggggcaagatgctggagatctgcctgaagctggtgggctgcaagagcaagaagggcctgagcagcagcagcagctgctacctggaggaggccctgcagaggcctgtggccagtgactttgagccccagggcctgtctgaggccgcccgctggaacagcaaggagaacctgctggccggccccagtgaaaatgaccccaacctgtttgtggccctgtatgactttgtggccagcggggacaacaccctgagcatcaccaagggggagaagctgcgggtgctgggctacaaccacaacggggagtggtgtgaggcccagaccaagaatggccagggctgggtgcccagcaactactag

SEQ ID NO: 153396 - DNA, 2838 bp, Artificial Sequence
  derived and/or modified sequence
ctgcggctgctgcgggagcccctgcagcaccctggccgggtgggcagcagcagcttcaacggcggcagaagagcccaccaccacgcccccctgagcagccccaaggcccagcaggcccactgcctgtggtgtgtgccccagctgcggcaggtgggagatggcacccacggccaccaccacgaggcccagggcggcggccagtacggggaggtgtatgagggcgtgtggaagaagtacagcctgactgtggccgtgaagaccctgaaggaggacaccatggaggtggaggagttcctgaaggaggccgctgtgatgaaggagatcaagcaccccaacctggtgcagctgctgggcgtgtgcacccgggagccccccttctacatcatcacagagttcatgacctacggcaacctgctggactacctgcgggagtgcaaccggcaggaggtgaatgctgtggtgctgctgtacatggccacccagatcagcagcgccatggagtacctggagaagaagaacttcatccaccgggacctggccgccaggaactgcctggtgggggagaaccacctggtgaaggtggccgactttggcctgagccggctgatgaccggggacacctacacagcccacgccggggccaagttccccatcaagtggacagcccctgagagcctggcctacaacaagttcagcatcaagagtgatgtgtgggccttcggcgtgctgctgtgggagatcgccacctacggcatgagcccctacccaggcatcgacctgagccaggtgtatgagctgctggagaaggactacaggatggagaggcctgagggctgcccagagaaggtgtatgagctgatgagggcctgctggcagtggaaccccagcgaccggcccagctttgctgagatccaccaggcctttgagaccatgttccaggagagcagcatcagtgatgaggtggagaaggagctgggcaagcagggcgtgagaggagctgtgtccaccctgctgcaggcccctgagctgcccaccaagaccaggaccagcagaagagctgctgagcaccgggacaccacagatgtgcctgagatgccccacagcaagggccagggcgagagtgaccccctggaccacgagcctgctgtgagccccctgctgcccaggaaggagcggggccccccagagggcggcctgaatgaagatgagcggctgctgcccaaggacaagaagaccaacctcttcagcgccctgatcaagaagaagaagaagacagcccccaccccacccaagaggagcagcagcttccgggagatggatggccagcctgagaggagaggagctggggaggaggagggccgggacatcagcaatggagccctggccttcacccccctggacacagctgaccctgccaagagccccaagcccagcaatggagctggggtgcccaatggagccctgcgggagagcggcggcagcggcttccgcagcccccacctgtggaagaagagcagcaccctgaccagcagccggctggccactggagaggaggagggcggcggcagcagcagcaagcgcttcctgcggagctgcagcgccagctgtgtgccccatggagccaaggacacagagtggaggtctgtgaccctgccccgggacctgcagagcacaggccggcagtttgacagcagcacctttggaggccacaagtctgagaagccagccctgcccaggaagagagctggggagaacagaagtgaccaggtgacccggggcaccgtgaccccaccaccccggctggtgaagaagaatgaggaggccgcagatgaggtgttcaaggacatcatggagagcagccctggcagcagcccccccaacctgacccccaagcccctgcggcggcaggtgacagtggccccagccagcggcctgccccacaaggaggaggccgggaaaggaagtgccctgggcaccccagctgctgctgagcctgtgacccccaccagcaaggccggcagcggggcccctgggggcaccagcaagggccctgctgaggagagccgggtgagaagacacaagcacagcagcgagagccctggccgggacaagggcaagctgagccggctgaagccagcccctcctcctcctcctgctgccagcgctgggaaggccggcggcaagcccagccagagccccagccaggaggccgccggggaggccgtgctgggcgccaagaccaaggccaccagcctggtggatgctgtgaacagtgatgctgccaagcccagccagcccggggagggcctgaagaagcctgtgctgcctgccacccccaagccccagagcgccaagcccagcggcacccccatcagccctgcccctgtgcccagcaccctgcccagcgccagcagcgccctggccggggaccagcccagcagcacagccttcatccccctcatcagcaccagggtgtccctgaggaagacccggcagcccccagagagaattgccagcggggccatcaccaagggcgtggtgctggacagcacagaggccctgtgcctggccatcagcaggaacagcgagcagatggccagccacagcgctgtgctggaggccggcaagaacctgtacaccttctgtgtgtcctatgtggacagcatccagcagatgaggaacaagtttgccttccgggaggccatcaacaagctggagaacaacctgcgggagctgcagatctgcccagccacagctggcagcggccctgctgccacccaggacttcagcaagctgctgagctctgtgaaggagatcagtgacatcgtgcagaggtag

SEQ ID NO: 153397 - DNA, 3393 bp, Artificial Sequence
  derived and/or modified sequence
atgctggagatctgcctgaagctggtgggctgcaagagcaagaagggtctttcttcgtcaagctcctgctacctggaagaggctctacagcgccctgtggccagcgactttgagcctcaaggtttgagtgaggctgctcggtggaactcaaaagagaatttgctggccggaccgtcagagaacgaccctaacttgtttgtcgcactctacgatttcgtggcaagcggagataacacactttctattaccaaaggggagaagctgagggtcctgggatataaccacaatggggagtggtgtgaagctcagactaaaaacggacaggggtgggttccttctaattacatcacgccggtgaattcccttgaaaagcattcttggtaccatggccctgtttcacgcaatgcagccgagtatcttctgagtagcggcattaatggcagtttcctggtgagggagagcgagtcaagccccggacaaaggagtatctcccttcggtacgagggtagagtgtatcactaccgcattaatactgcaagcgatggcaagttgtatgtctccagtgagagccgcttcaatactttagccgagctggtccaccatcatagcaccgtggcggacgggttaattaccaccttgcactacccagcgccgaaaagaaataaaccaaccgtttacggagtttcaccaaattacgacaaatgggagatggagcggactgatattactatgaagcataagctgggtggcggtcagtatggagaagtgtatgaaggtgtttggaagaagtactcactgaccgtggctgtgaaaacattgaaggaggacaccatggaggtcgaagagttcctcaaagaagccgccgtcatgaaagaaattaagcatcctaacctcgtccagcttcttggcgtgtgtacgcgagaaccccctttctacatcataaccgagtttatgacctacggcaacttgttggactacttacgggaatgtaaccgccaggaagtgaacgcagtggtgcttctctatatggccacccagattagctcggctatggagtatctcgagaagaaaaacttcatccatcgagacctcgctgcccgcaattgcttagtgggcgagaatcaccttgtgaaggtcgccgactttggcctgtcacgtctgatgaccggagacacctatacggctcatgccggcgccaaatttccaataaaatggacagctccagaatccctagcatataacaagttcagcatcaagtcagacgtttgggccttcggcgtgctcctatgggagatagcaacatatggcatgtcaccctaccccggcattgacctcagtcaggtctacgagctcctggagaaagactataggatggaacggcctgaagggtgtcctgagaaagtgtatgagctgatgagggcttgctggcagtggaatccaagtgaccggccttctttcgctgaaattcaccaggcatttgaaacaatgtttcaggaatcttcgattagtgacgaggtggaaaaggaattgggcaaacaaggcgtgcgcggagcagttagcactcttctgcaggccccagaactccccacaaaaacaagaacaagcagacgggccgcagagcatcgggatactactgatgtccccgagatgccacacagtaaagggcagggggagagcgaccccctcgaccacgaacctgccgtttcccccctccttcccagaaaagaacgaggaccaccagagggaggcctgaatgaggatgagcgcctgctccctaaggataaaaaaaccaatctgtttagtgcgctgatcaaaaagaaaaagaaaactgctccaactccacctaaacggtcctcatcattcagggaaatggatggtcagcctgaaagacgaggagccggtgaagaggagggaagggacatcagcaacggggcactcgcattcaccccattggacactgctgatcccgccaaatctccaaaaccatccaatggcgcaggagtcccgaatggggccctgagggaaagtggcggaagtggcttcagatccccccacttatggaagaaaagttctaccctcacctcctcccgtctggctaccggggaggaagaggggggcgggtccagctctaaacgatttctcagatcttgctccgctagctgtgtacctcatggagcaaaggatactgagtggcgatccgtgaccctcccacgagacttgcagagcactggacggcagttcgacagttcgaccttcggcggtcataaatctgagaaaccagcactacctaggaaacgggcaggcgagaaccggtcagaccaggtgacacgggggactgtgacccctccaccaagactggtgaagaaaaatgaagaggccgctgacgaggtgtttaaggacatcatggaatcttcacctgggagcagcccgcctaacctaactccaaagccactgagaagacaggttactgttgcgcccgcttctgggctgcctcacaaagaagaagccgggaaggggtcagcgctcggtaccccggccgctgccgaacccgtaacccctacttcgaaggctggatctggagcccctggcggcacgtccaaaggtcccgcagaagaatcccgtgtgcgacggcataaacactcaagcgagtccccggggcgcgacaaaggcaagctcagccgtctgaagcctgcccctcctccacctccagctgcctcagctggtaaggccggcggtaaaccctcccagtctccatctcaagaagccgctggcgaagccgtgcttggcgcgaaaactaaagctactagcctagtggacgctgtgaattccgacgccgccaaaccaagccagccaggcgaaggattgaagaaacccgtgctgccagccacaccgaagcctcagtctgcgaaaccatccggtactcccatctctccagccccggtcccgtccacactaccctctgcaagctctgctctggccggggaccagccatctagtacggcatttatacctttgatttctacaagagtcagcctgcgcaaaaccaggcagcctccagaaaggattgctagtggggccatcaccaagggcgttgttctcgactctaccgaggccctttgcctggctatttcacgcaatagtgagcagatggcatcccatagtgcagtgctcgaagccggcaaaaatctctacactttctgtgtatcttatgttgactccatccagcaaatgaggaacaaattcgcctttcgggaagccattaacaagctcgagaacaacctgcgggaactgcagatttgtcccgccaccgcaggctccggacccgccgccacacaagacttctctaaacttttgagcagcgttaaggaaatttctgatatcgtgcaaagatag

SEQ ID NO: 153398 - DNA, 486 bp, Artificial Sequence
  derived and/or modified sequence
ggccggcccggccggagccgggcccggggcggcggcgagggcggctggagagggggcggaagggccggtcgcgctggccccgaacctggccctcgcgcggggcggggcgtacctgctcccgactgctggagaggtaaaatgctagagatctgcttgaaactggtaggctgcaaatctaagaagggattgagttccagtagttcttgctaccttgaagaggcacttcaaagacctgtggccagtgactttgaacctcagggtttgagcgaggccgcccgttggaattccaaggagaatctattggcaggtcctagcgagaatgatccaaatctcttcgtggccctgtatgatttcgtggcttccggcgacaatactctttcaatcacaaaaggcgagaaactccgcgttttgggttataatcataacggcgaatggtgtgaagcacagacgaagaacgggcaaggctgggtccctagtaactattag

SEQ ID NO: 153399 - DNA, 2838 bp, Artificial Sequence
  derived and/or modified sequence
ctgcggctgctgcgggagcccctgcagcaccccggccgggtgggctcgagttccttcaatgggggacgtcgcgcccaccaccatgctcccctaagctcaccaaaggcccagcaggctcattgcctgtggtgtgtgccacaactgcgccaggtcggggatgggactcatggccatcatcatgaagcccaagggggcggacagtacggggaagtgtatgaaggagtgtggaagaaatacagcctgaccgtggctgtgaaaacactcaaagaggataccatggaagtggaagagttcttgaaagaggctgccgtcatgaaagagataaagcaccccaacctggtccaactgctcggagtgtgcactagggagccgcccttttacataattacagaatttatgacctacggcaaccttctcgactacctgcgcgagtgtaacagacaggaggtaaacgccgtcgtgctgctgtacatggccacccaaatttccagcgcaatggagtatttggaaaagaaaaacttcatccatagagacctagccgctcggaactgtctcgtgggcgaaaatcatctggtgaaagtagccgatttcggcctgagccgcctgatgaccggggacacctacactgctcacgcaggcgccaagttcccaattaagtggaccgcacctgaaagcctggcctacaataagttttctattaagagtgacgtatgggcatttggagtccttctctgggagatagcaacatacggcatgtctccctatcccggtatcgacctgtctcaggtctatgaacttttagagaaagactacagaatggaacggcccgaggggtgccccgagaaggtgtacgagctgatgcgggcatgttggcagtggaacccaagcgaccggccttctttcgctgagatccatcaggcctttgagactatgtttcaggaatcctccattagcgacgaagtggagaaggagctgggaaagcagggggtgcgcggggccgtctccactctcctgcaggcaccggaactgcctacaaagacaagaacttcgagaagagctgccgaacatcgtgacacaaccgacgtgcccgagatgccccactcgaaaggacagggagagtccgaccccctcgaccacgagcccgctgtgtcaccgctgctgccccggaaagagagggggccacctgagggggggctgaacgaggacgagaggctcctaccgaaagataaaaagacaaacctcttctccgctttgatcaagaagaaaaagaagaccgcgcccacacctcctaagcgctcttccagttttagagagatggatgggcagcccgaaaggcggggggcaggagaggaagagggcagggacataagcaacggggcccttgcattcacgccactggatacggctgatccagccaagagcccgaagccatccaacggtgccggtgtccccaatggtgcactgagagaaagcggaggctccggatttcgttctccccacctttggaaaaaatcctctactctgacgtccagtcgcctggctaccggcgaggaggaaggagggggttcctcttctaaacgctttctgaggagctgcagtgcatcctgtgtgccccatggcgccaaggatactgaatggcggagcgtgactctcccccgcgatctccagagtaccggccggcaatttgatagtagtaccttcggggggcataagagcgaaaagcctgccctgccacgtaagagagccggcgagaaccggtcagaccaggtcacacgggggacagtcaccccccccccacgactggttaaaaaaaacgaggaggcggcggatgaggtgtttaaagatatcatggaaagctctccgggatcgtcccctccaaatctgacccctaaacctcttaggcggcaggtgacggtcgcccccgcatctggactgcctcacaaggaagaggcgggaaaggggtctgccctggggaccccagcagccgctgagcccgtgactcccacaagtaaggccggttccggtgcccctgggggcacatctaaaggacccgcagaagagagcagggtccgccggcataagcacagtagcgagagtccaggaagagataagggaaagctcagccggctgaaacccgcccccccccccccgccagctgctagcgcggggaaggcgggtggcaagcccagtcagtctccgagtcaggaagccgcaggtgaggccgtgctgggtgccaagacaaaggccacttcccttgtcgatgcagtgaatagtgacgcagcgaaaccttctcagcccggcgagggtctgaaaaagcctgttctgccggcaactcctaaaccacaaagtgcaaagccgtcaggcacccccatctccccggctccagtgccaagcaccttgccctcagcttcctccgccctcgccggagaccagccaagctccacggccttcattccacttatcagcacgcgggtgtcgctgcgcaagacgcgacagccaccagagcgcatagcctccggtgccatcaccaagggcgtcgttctggactccacggaggccctttgtttagccatttccaggaattccgagcagatggcctcccacagcgccgtgcttgaggcagggaagaatctatacactttttgtgtgtcctacgtcgacagcatccagcagatgcgcaataagttcgcctttcgggaggctatcaacaaattggaaaacaatttgcgagagcttcagatctgccctgcaacagctggaagtggacctgccgcgacgcaagactttagtaaactcctgtctagcgttaaggaaatcagtgacatcgtccagcggtag

SEQ ID NO: 153400 - DNA, 3393 bp, Artificial Sequence
  derived and/or modified sequence
atgctggaaatttgtctgaaactggttggatgcaagtcgaaaaaaggtctgagctcttcgagtagctgctacctggaggaagccctacaaagaccagtggcgagcgactttgagccacagggccttagtgaagctgcgaggtggaacagtaaagagaatctgctggccggtccgagcgagaacgatcctaacctttttgtggctctgtacgactttgtagcatctggagacaacacactgtccattacaaaaggcgaaaagttgagggtccttggatacaatcacaatggagagtggtgcgaggcacagaccaagaatggtcaagggtgggtcccctcaaattacattacgccagtgaacagcttggagaagcactcatggtatcatggacctgtctcgagaaatgctgctgaataccttctgtccagtggtattaacggtagttttctggtacgggagtcagaaagtagcccagggcagaggtccatctctctgaggtatgaaggacgtgtttatcattaccggatcaacacagcttccgacggcaagctgtacgtctcttctgagtcccgctttaacaccctggctgagctggtgcaccatcactctactgtggcggatggcctcatcactactttacattatcccgctcccaagcggaataagcccactgtgtacggagtgtccccgaactacgacaaatgggagatggagaggacagatattacgatgaaacacaaactcggagggggacaatacggggaggtatatgagggggtgtggaagaaatatagtcttactgtcgccgtcaagaccctgaaggaggacacaatggaggtcgaggagttcttgaaagaggcagcggttatgaaagaaattaagcatcccaacttggttcagctactgggcgtgtgtacacgagagcccccattttacatcatcaccgaatttatgacatacggaaacctcctggactatttgcgagaatgtaatcggcaagaggttaacgctgtcgtgcttctgtacatggctacacaaatctcaagcgctatggagtatctcgagaaaaagaacttcatacacagggacctggccgctcgtaattgcctcgttggcgaaaaccatttagtgaaagttgctgactttggactgagtagactgatgacaggcgatacgtacactgcacacgccggtgctaagttccctataaaatggaccgccccagaatctctggcatacaacaaattttccataaaatccgacgtgtgggcttttggagtgcttctatgggagatcgccacctatggcatgagcccatatccaggcatagatctgagtcaggtatatgagttgctagagaaggactaccgcatggaacgtcctgagggatgccccgaaaaagtctacgagcttatgcgcgcatgctggcaatggaacccttctgataggccctctttcgctgaaattcaccaggcattcgagactatgtttcaggagtccagcatcagtgatgaagtcgagaaagagttaggaaaacagggggtcagaggagctgtgtccactctgctgcaggctcccgagctccctacgaaaacccggactagccggcgagctgctgagcaccgcgatacgactgatgttccagaaatgccgcattctaaggggcagggtgaaagcgatccacttgaccatgaaccggctgttagccctctgctccctagaaaggagaggggccctccggagggcggactgaatgaggatgagcgactactgcccaaggacaagaaaacaaacttgtttagcgcactcattaagaaaaagaagaaaacagcacccactcctcccaagcgtagctcaagctttcgggagatggatggccaaccagagaggagaggcgctggagaagaggaagggagggacataagtaacggcgctctcgctttcacccctcttgatacggctgaccctgccaagagtcccaaaccctctaacggtgccggagtgcccaacggtgcgttaagggagtcaggaggttctggctttcggtctccccacctctggaagaaatcgagcactttgacgtccagccgcctcgctaccggcgaagaggaaggaggcggttcctcttccaagcggttcttgcgcagctgttcagctagctgcgtgccccatggcgctaaagataccgagtggcgtagtgtcaccctgcctcgggaccttcagtcaacaggcagacagttcgactccagcacatttggaggacataagtcggagaagccagctctccccaggaagagggcaggtgaaaatcggtccgaccaagtgactaggggaacagtcacacccccacccagattggtcaaaaagaacgaggaagctgctgacgaagttttcaaggacataatggaatcctcccccggatcctcaccccctaatctgacaccaaagccattgcgaagacaggtcacagtggcccctgcatccggccttcctcataaggaggaggcagggaagggctctgctcttggcactccggcagcagcagagcctgtgactcccacctctaaggccggaagtggcgctccaggcggtacctctaaaggtcctgcagaggaatctagggtccgcaggcataaacattcttctgaatctccaggcagggacaagggtaaactcagccgactgaagcccgcacccccaccccctcccgctgcttctgctgggaaagccggtggcaaaccctcacagagtccatcccaggaggcggcaggggaggccgtgctcggtgccaaaacaaaggccacatccctcgttgatgcagtcaactcggacgccgcaaagccatcccaacctggcgaaggactgaaaaagcctgtgctacctgctacacctaagccacagagcgctaaaccctcagggacccctatcagcccagcacctgtgcctagtacactgccttccgcttcgtccgccctggcaggagaccaacccagcagcactgcctttattccgcttatcagtactagagtcagtcttagaaaaaccaggcaaccgcctgaaagaattgcctccggggcaatcacaaagggcgttgtcctagactctactgaggccttgtgtttagcaataagccgtaacagcgagcagatggcctcccatagcgcagtactcgaggccggaaaaaatctgtacaccttctgcgtctcctacgtggattctatccagcagatgcgcaacaaatttgctttcagagaggcgatcaataagttagaaaataatcttcgtgaactgcagatctgtcctgccaccgcgggatcaggccctgccgctacgcaggacttcagcaaattgttaagctccgtcaaggaaatcagcgatatagtgcagcgctag

SEQ ID NO: 153401 - DNA, 486 bp, Artificial Sequence
  derived and/or modified sequence
ggcaggcccggtaggtcccgggcaagaggcggtggtgaggggggttggcgaggagggggaagagcaggtagggcagggcctgagcctggacccagggcagggaggggggtgcctgcgccagactgttggagaggaaaaatgttggagatttgtctgaaactcgtgggctgcaagagtaagaaagggcttagttccagctcaagttgttatctggaggaagccctgcaaagacctgtggccagcgatttcgagccccaggggctgagtgaagctgctcgctggaactccaaagagaacctgctcgctggaccctctgagaacgatccaaacctcttcgtggccttgtatgactttgtcgcttccggcgacaacacactgtctatcacaaagggagaaaagcttcgggtccttgggtataaccacaacggagaatggtgcgaagcacagaccaagaacggacaaggttgggtgccctcaaattactag

SEQ ID NO: 153402 - DNA, 2838 bp, Artificial Sequence
  derived and/or modified sequence
ctgaggctgttgcgcgagcccctgcagcatccagggagagtcgggagcagttcattcaacggaggcagacgcgcacaccaccacgccccactgagcagcccaaaggctcagcaggcacactgcctatggtgtgtgcctcagctgcggcaagtgggagacggcacgcacgggcatcatcatgaggcacagggaggaggccagtatggagaggtgtacgagggcgtgtggaaaaaatacagcctgacagtggcagtgaaaaccctgaaagaggataccatggaagtagaggagtttctcaaggaggcagccgtcatgaaagaaataaagcacccaaacctggtgcagttgctgggggtgtgtacacgggagcctcccttttacataataactgagttcatgacatacgggaatctgttggactatctgcgcgagtgcaacagacaggaggtcaacgcagtcgttcttctgtacatggccactcagattagtagcgctatggaatacctggaaaagaaaaattttatccacagggatctcgcagccagaaactgccttgtcggagaaaaccacctagtgaaggtggccgactttgggctgagtagactgatgacgggtgatacttacacggcccacgccggtgctaaatttcctatcaaatggaccgccccagagagccttgcttacaataagtttagcataaaaagcgatgtttgggcattcggagtgctgctctgggagattgcaacatatggcatgtcaccctacccaggcattgatctgtcccaagtttatgagctgctggaaaaagactataggatggagcggccagaaggttgcccggaaaaagtgtatgaactcatgcgggcatgctggcagtggaatcctagtgatcgcccatctttcgctgagattcatcaggcgttcgaaaccatgttccaggagtccagcatttccgacgaagtggaaaaagaacttggcaagcagggggtacgcggagcagttagcacactgttgcaggccccagagctgcccactaaaaccagaacatcaagacgagcagcggaacaccgcgacacgaccgatgtgcctgagatgccccatagtaaaggtcagggggaatcagacccgcttgatcatgaaccggctgtgtcccccttgctgccaaggaaggagcgaggccctcccgagggcggactcaatgaagatgagcgtctgctgccaaaagataaaaagactaacctgttctcagccctgatcaagaagaaaaagaagactgctccaactccacccaagcgctctagttccttccgggaaatggacgggcagcctgaaagacgcggtgccggagaggaagaaggtcgcgatatcagcaatggggcactggcattcacccccttggacacggctgatccggctaagtccccgaagccatcaaacggcgcaggggtacctaatggagcacttcgcgagtctggcggtagcggcttccgctccccccacttatggaagaaaagctcaaccctcacatctagtcgccttgctaccggagaagaagaaggcggtggttcatcttctaagcggtttctgaggtcatgttcagcctcttgcgtgccacacggagctaaggacacggagtggcgaagtgtaactcttccacgagacctgcagtcaactggcaggcaattcgactcttccaccttcgggggacataagtcggagaaacctgctctgccgaggaaacgagcaggtgagaaccggtccgaccaagtgactcgcggaactgtaacgcccccacctcgcctggtgaagaagaatgaggaggcagcggacgaagtctttaaggacatcatggagagctcacctggtagttctccccctaacctgactccgaagcccctgcgcagacaagtcactgtggctccagcctctggtctcccacacaaagaagaggccggaaaaggttctgccctgggcacacccgctgcagcagaacccgtgacaccaacctctaaggccggtagtggggcacccggaggtacgtctaaaggcccagccgaagaatcgagggtgaggcggcacaagcactcttcagagtcacccggaagagacaaaggcaagcttagcagactgaagccagcacctccacctcctccagccgcaagcgccggaaaggccggtggcaaaccttcccagtctccctcacaggaggcagcgggtgaggccgtgttaggggctaaaacaaaagccacatctttggttgacgcggtaaatagcgatgctgctaagccgtctcagccgggagagggactgaaaaaaccagtccttccggctacccccaaacctcagtccgcaaagccaagtggtacccctattagcccagctccagtgccctctacgctgccttcagcctcgtccgccctggctggagatcagccgtcatcgacagcattcatccctcttatttcaaccagggtgtctcttaggaaaacaagacaaccgcctgaaaggattgctagcggcgcaattacgaagggagtggtccttgactccaccgaggcgttatgcctggcaatcagcaggaactccgagcagatggccagccacagcgctgtgctggaagccggaaaaaatctctatacgttttgcgtaagctatgtggatagcatccagcagatgcggaacaaatttgccttccgcgaggcgatcaataagctggaaaataacttacgagaactgcagatctgccctgcaacggccggaagcggtcccgctgcaacccaggatttcagcaagctcctgtccagtgtaaaggaaatcagcgatatcgtgcagagatag

SEQ ID NO: 153403 - DNA, 5766 bp, Artificial Sequence
  derived and/or modified sequence
ggccttccccctgcgaggatcgccattggcccgggttggctttggaaagcggcggtggctttgggccgggctcggcctcgggaacgccaggggcccctgggtgcggacgggcgcggccaggagggggttaaggcgcaggcggcggcggggcgggggcgggcctggcgggcgccctctccgggccctttgttaacaggcgcgtcccggccaggcggagacgcggccgcggccatgggcgggcgcgggcgcgcggggcggcggtgagggcggctggcggggccgggggcgccgggggggcgcgcgggccgagccgggcctgagccgggcccgcggaccgagctgggagaggggttccggcccccgacgtgctggcgcgggaaaatgttggagatctgcctgaagctggtgggctgcaaatccaagaaggggctgtcctcgtcctccagctgttatctggaagaagcccttcagcggccagtagcatctgactttgagcctcagggtctgagtgaagccgctcgttggaactccaaggaaaaccttctcgctggacccagtgaaaatgaccccaaccttttcgttgcactgtatgattttgtggccagtggagataacactctaagcataactaaaggtgaaaagctccgggtcttaggctataatcacaatggggaatggtgtgaagcccaaaccaaaaatggccaaggctgggtcccaagcaactacatcacgccagtcaacagtctggagaaacactcctggtaccatgggcctgtgtcccgcaatgccgctgagtatctgctgagcagcgggatcaatggcagcttcttggtgcgtgagagtgagagcagtcctggccagaggtccatctcgctgagatacgaagggagggtgtaccattacaggatcaacactgcttctgatggcaagctctacgtctcctccgagagccgcttcaacaccctggccgagttggttcatcatcattcaacggtggccgacgggctcatcaccacgctccattatccagccccaaagcgcaacaagcccactgtctatggtgtgtcccccaactacgacaagtgggagatggaacgcacggacatcaccatgaagcacaagctgggcgggggccagtacggggaggtgtacgagggcgtgtggaagaaatacagcctgacggtggccgtgaagaccttgaaggaggacaccatggaggtggaagagttcttgaaagaagctgcagtcatgaaagagatcaaacaccctaacctggtgcagctccttggggtctgcacccgggagcccccgttctatatcatcactgagttcatgacctacgggaacctcctggactacctgagggagtgcaaccggcaggaggtgaacgccgtggtgctgctgtacatggccactcagatctcgtcagccatggagtacctggagaagaaaaacttcatccacagagatcttgctgcccgaaactgcctggtaggggagaaccacttggtgaaggtagctgattttggcctgagcaggttgatgacaggggacacctacacagcccatgctggagccaagttccccatcaaatggactgcacccgagagcctggcctacaacaagttctccatcaagtccgacgtctgggcatttggagtattgctttgggaaattgctacctatggcatgtccccttacccgggaattgacctgtcccaggtgtatgagctgctagagaaggactaccgcatggagcgcccagaaggctgcccagagaaggtctatgaactcatgcgagcatgttggcagtggaatccctctgaccggccctcctttgctgaaatccaccaagcctttgaaacaatgttccaggaatccagtatctcagacgaagtggaaaaggagctggggaaacaaggcgtccgtggggctgtgagtaccttgctgcaggccccagagctgcccaccaagacgaggacctccaggagagctgcagagcacagagacaccactgacgtgcctgagatgcctcactccaagggccagggagagagcgatcctctggaccatgagcctgccgtgtctccattgctccctcgaaaagagcgaggtcccccggagggcggcctgaatgaagatgagcgccttctccccaaagacaaaaagaccaacttgttcagcgccttgatcaagaagaagaagaagacagccccaacccctcccaaacgcagcagctccttccgggagatggacggccagccggagcgcagaggggccggcgaggaagagggccgagacatcagcaacggggcactggctttcacccccttggacacagctgacccagccaagtccccaaagcccagcaatggggctggggtccccaatggagccctccgggagtccgggggctcaggcttccggtctccccacctgtggaagaagtccagcacgctgaccagcagccgcctagccaccggcgaggaggagggcggtggcagctccagcaagcgcttcctgcgctcttgctccgcctcctgcgttccccatggggccaaggacacggagtggaggtcagtcacgctgcctcgggacttgcagtccacgggaagacagtttgactcgtccacatttggagggcacaaaagtgagaagccggctctgcctcggaagagggcaggggagaacaggtctgaccaggtgacccgaggcacagtaacgcctccccccaggctggtgaaaaagaatgaggaagctgctgatgaggtcttcaaagacatcatggagtccagcccgggctccagcccgcccaacctgactccaaaacccctccggcggcaggtcaccgtggcccctgcctcgggcctcccccacaaggaagaagctggaaagggcagtgccttagggacccctgctgcagctgagccagtgacccccaccagcaaagcaggctcaggtgcaccagggggcaccagcaagggccccgccgaggagtccagagtgaggaggcacaagcactcctctgagtcgccagggagggacaaggggaaattgtccaggctcaaacctgccccgccgcccccaccagcagcctctgcagggaaggctggaggaaagccctcgcagagcccgagccaggaggcggccggggaggcagtcctgggcgcaaagacaaaagccacgagtctggttgatgctgtgaacagtgacgctgccaagcccagccagccgggagagggcctcaaaaagcccgtgctcccggccactccaaagccacagtccgccaagccgtcggggacccccatcagcccagcccccgttccctccacgttgccatcagcatcctcggccctggcaggggaccagccgtcttccaccgccttcatccctctcatatcaacccgagtgtctcttcggaaaacccgccagcctccagagcggatcgccagcggcgccatcaccaagggcgtggtcctggacagcaccgaggcgctgtgcctcgccatctctaggaactccgagcagatggccagccacagcgcagtgctggaggccggcaaaaacctctacacgttctgcgtgagctatgtggattccatccagcaaatgaggaacaagtttgccttccgagaggccatcaacaaactggagaataatctccgggagcttcagatctgcccggcgacagcaggcagtggtccagcggccactcaggacttcagcaagctcctcagttcggtgaaggaaatcagtgacatagtgcagaggtagcagcagtcaggggtcaggtgtcaggcccgtcggagctgcctgcagcacatgcgggctcgcccatacccgtgacagtggctgacaagggactagtgagtcagcaccttggcccaggagctctgcgccaggcagagctgagggccctgtggagtccagctctactacctacgtttgcaccgcctgccctcccgcaccttcctcctccccgctccgtctctgtcctcgaattttatctgtggagttcctgctccgtggactgcagtcggcatgccaggacccgccagccccgctcccacctagtgccccagactgagctctccaggccaggtgggaacggctgatgtggactgtctttttcatttttttctctctggagcccctcctcccccggctgggcctccttcttccacttctccaagaatggaagcctgaactgaggccttgtgtgtcaggccctctgcctgcactccctggccttgcccgtcgtgtgctgaagacatgtttcaagaaccgcatttcgggaagggcatgcacgggcatgcacacggctggtcactctgccctctgctgctgcccggggtggggtgcactcgccatttcctcacgtgcaggacagctcttgatttgggtggaaaacagggtgctaaagccaaccagcctttgggtcctgggcaggtgggagctgaaaaggatcgaggcatggggcatgtcctttccatctgtccacatccccagagcccagctcttgctctcttgtgacgtgcactgtgaatcctggcaagaaagcttgagtctcaagggtggcaggtcactgtcactgccgacatccctcccccagcagaatggaggcaggggacaagggaggcagtggctagtggggtgaacagctggtgccaaatagccccagactgggcccaggcaggtctgcaagggcccagagtgaaccgtcctttcacacatctgggtgccctgaaagggcccttcccctcccccactcctctaagacaaagtagattcttacaaggccctttcctttggaacaagacagccttcacttttctgagttcttgaagcatttcaaagccctgcctctgtgtagccgccctgagagagaatagagctgccactgggcacctgcgcacaggtgggaggaaagggcctggccagtcctggtcctggctgcactcttgaactgggcgaatgtcttatttaattaccgtgagtgacatagcctcatgttctgtgggggtcatcagggagggttaggaaaaccacaaacggagcccctgaaagcctcacgtatttcacagagcacgcctgccatcttctccccgaggctgccccaggccggagcccagatacgggggctgtgactctgggcagggacccggggtctcctggaccttgacagagcagctaactccgagagcagtgggcaggtggccgcccctgaggcttcacgccgggagaagccaccttcccaccccttcataccgcctcgtgccagcagcctcgcacaggccctagctttacgctcatcacctaaacttgtactttatttttctgatagaaatggtttcctctggatcgttttatgcggttcttacagcacatcacctctttgcccccgacggctgtgacgcagccggagggaggcactagtcaccgacagcggccttgaagacagagcaaagcgcccacccaggtcccccgactgcctgtctccatgaggtactggtcccttccttttgttaacgtgatgtgccactatattttacacgtatctcttggtatgcatcttttatagacgctcttttctaagtggcgtgtgcatagcgtcctgccctgccccctcgggggcctgtggtggctccccctctgcttctcggggtccagtgcattttgtttctgtatatgattctctgtggttttttttgaatccaaatctgtcctctgtagtattttttaaataaatcagtgtttacattagaa

SEQ ID NO: 153404 - DNA, 3559 bp, Artificial Sequence
  derived and/or modified sequence
ggcagacctgggcgttctcgggcgcggggcggcggtgagggcggctggcggggcggggggcgcgcgggccgagccgggcctgagccgggcccgcgagctgggagaggggttccggcccccgactgctggcgcgggaaaatgttggagatctgcctgaagctggtgggctgcaaatccaagaaggggctgtcctcgtcctccagctgttatctggaagaagcccttcagcggccagtagcatctgactttgagcctcagggtctgagtgaagccgctcgttggaactccaaggaaaaccttctcgctggacccagtgaaaatgaccccaaccttttcgttgcactgtatgattttgtggccagtggagataacactctaagcataactaaaggtgaaaagctccgggtcttaggctataatcacaatggggaatggtgtgaagcccaaaccaaaaatggccaaggctgggtcccaagcaactacatcacgccagtcaacagtctggagaaacactcctggtaccatgggcctgtgtcccgcaatgccgctgagtatctgctgagcagcgggatcaatggcagcttcttggtgcgtgagagtgagagcagtcctggccagaggtccatctcgctgagatacgaagggagggtgtaccattacaggatcaacactgcttctgatggcaagctctacgtctcctccgagagccgcttcaacaccctggccgagttggttcatcatcattcaacggtggccgacgggctcatcaccacgctccattatccagccccaaagcgcaacaagcccactgtctatggtgtgtcccccaactacgacaagtgggagatggaacgcacggacatcaccatgaagcacaagctgggcgggggccagtacggggaggtgtacgagggcgtgtggaagaaatacagcctgacggtggccgtgaagaccttgaaggaggacaccatggaggtggaagagttcttgaaagaagctgcagtcatgaaagagatcaaacaccctaacctggtgcagctccttggggtctgcacccgggagcccccgttctatatcatcactgagttcatgacctacgggaacctcctggactacctgagggagtgcaaccggcaggaggtgaacgccgtggtgctgctgtacatggccactcagatctcgtcagccatggagtacctggagaagaaaaacttcatccacagagatcttgctgcccgaaactgcctggtaggggagaaccacttggtgaaggtagctgattttggcctgagcaggttgatgacaggggacacctacacagcccatgctggagccaagttccccatcaaatggactgcacccgagagcctggcctacaacaagttctccatcaagtccgacgtctgggcatttggagtattgctttgggaaattgctacctatggcatgtccccttacccgggaattgacctgtcccaggtgtatgagctgctagagaaggactaccgcatggagcgcccagaaggctgcccagagaaggtctatgaactcatgcgagcatgttggcagtggaatccctctgaccggccctcctttgctgaaatccaccaagcctttgaaacaatgttccaggaatccagtatctcagacgaagtggaaaaggagctggggaaacaaggcgtccgtggggctgtgagtaccttgctgcaggccccagagctgcccaccaagacgaggacctccaggagagctgcagagcacagagacaccactgacgtgcctgagatgcctcactccaagggccagggagagagcgatcctctggaccatgagcctgccgtgtctccattgctccctcgaaaagagcgaggtcccccggagggcggcctgaatgaagatgagcgccttctccccaaagacaaaaagaccaacttgttcagcgccttgatcaagaagaagaagaagacagccccaacccctcccaaacgcagcagctccttccgggagatggacggccagccggagcgcagaggggccggcgaggaagagggccgagacatcagcaacggggcactggctttcacccccttggacacagctgacccagccaagtccccaaagcccagcaatggggctggggtccccaatggagccctccgggagtccgggggctcaggcttccggtctccccacctgtggaagaagtccagcacgctgaccagcagccgcctagccaccggcgaggaggagggcggtggcagctccagcaagcgcttcctgcgctcttgctccgcctcctgcgttccccatggggccaaggacacggagtggaggtcagtcacgctgcctcgggacttgcagtccacgggaagacagtttgactcgtccacatttggagggcacaaaagtgagaagccggctctgcctcggaagagggcaggggagaacaggtctgaccaggtgacccgaggcacagtaacgcctccccccaggctggtgaaaaagaatgaggaagctgctgatgaggtcttcaaagacatcatggagtccagcccgggctccagcccgcccaacctgactccaaaacccctccggcggcaggtcaccgtggcccctgcctcgggcctcccccacaaggaagaagctggaaagggcagtgccttagggacccctgctgcagctgagccagtgacccccaccagcaaagcaggctcaggtgcaccagggggcaccagcaagggccccgccgaggagtccagagtgaggaggcacaagcactcctctgagtcgccagggagggacaaggggaaattgtccaggctcaaacctgccccgccgcccccaccagcagcctctgcagggaaggctggaggaaagccctcgcagagcccgagccaggaggcggccggggaggcagtcctgggcgcaaagacaaaagccacgagtctggttgatgctgtgaacagtgacgctgccaagcccagccagccgggagagggcctcaaaaagcccgtgctcccggccactccaaagccacagtccgccaagccgtcggggacccccatcagcccagcccccgttccctccacgttgccatcagcatcctcggccctggcaggggaccagccgtcttccaccgccttcatccctctcatatcaacccgagtgtctcttcggaaaacccgccagcctccagagcggatcgccagcggcgccatcaccaagggcgtggtcctggacagcaccgaggcgctgtgcctcgccatctctaggaactccgagcagatggccagccacagcgcagtgctggaggccggcaaaaacctctacacgttctgcgtgagctatgtggattccatccagcaaatgaggaacaagtttgccttccgagaggccatcaacaaactggagaataatctccgggagcttcagatctgcccggcgacagcaggcagtggtccagcggccactcaggacttcagcaagctcctcagttcggtgaaggaaatcagtgacatagtgcagaggtagcagcagtcaggggtcaggtgtcaggccc

SEQ ID NO: 153405 - DNA, 5877 bp, Artificial Sequence
  derived and/or modified sequence
ggttggtgacttccacaggaaaagttctggaggagtagccaaagaccatcagcgtttcctttatgtgtgagaattgaaatgactagcattattgacccttttcagcatcccctgtgaatatttctgtttaggtttttcttcttgaaaagaaattgttattcagcccgtttaaaacaaatcaagaaacttttgggtaacattgcaattacatgaaattgataaccgcgaaaataattggaactcctgcttgcaagtgtcaacctaaaaaaagtgcttccttttgttatggaagatgtctttctgtgattgacttcaattgctgacttgtggagatgcagcgaatgtgaaatcccacgtatatgccatttccctctacgctcgctgaccgttctggaagatcttgaaccctcttctggaaaggggtacctattattactttatggggcagcagcctggaaaagtacttggggaccaaagaaggccaagcttgcctgccctgcattttatcaaaggagcagggaagaaggaatcatcgaggcatgggggtccacactgcaatgtttttgtggaacatgaagcccttcagcggccagtagcatctgactttgagcctcagggtctgagtgaagccgctcgttggaactccaaggaaaaccttctcgctggacccagtgaaaatgaccccaaccttttcgttgcactgtatgattttgtggccagtggagataacactctaagcataactaaaggtgaaaagctccgggtcttaggctataatcacaatggggaatggtgtgaagcccaaaccaaaaatggccaaggctgggtcccaagcaactacatcacgccagtcaacagtctggagaaacactcctggtaccatgggcctgtgtcccgcaatgccgctgagtatctgctgagcagcgggatcaatggcagcttcttggtgcgtgagagtgagagcagtcctggccagaggtccatctcgctgagatacgaagggagggtgtaccattacaggatcaacactgcttctgatggcaagctctacgtctcctccgagagccgcttcaacaccctggccgagttggttcatcatcattcaacggtggccgacgggctcatcaccacgctccattatccagccccaaagcgcaacaagcccactgtctatggtgtgtcccccaactacgacaagtgggagatggaacgcacggacatcaccatgaagcacaaggcgggggccagtacggggaggtgtacgagggcgtgtggaagaaatacagcctgacggtggccgtgaagaccttgaaggaggacaccatggaggtggaagagttcttgaaagaagctgcagtcatgaaagagatcaaacaccctaacctggtgcagctccttggggtctgcacccgggagcccccgttctatatcatcactgagttcatgacctacgggaacctcctggactacctgagggagtgcaaccggcaggaggtgaacgccgtggtgctgctgtacatggccactcagatctcgtcagccatggagtacctggagaagaaaaacttcatccacagagatcttgctgcccgaaactgcctggtaggggagaaccacttggtgaaggtagctgattttggcctgagcaggttgatgacaggggacacctacacagcccatgctggagccaagttccccatcaaatggactgcacccgagagcctggcctacaacaagttctccatcaagtccgacgtctgggcatttggagtattgctttgggaaattgctacctatggcatgtccccttacccgggaattgacctgtcccaggtgtatgagctgctagagaaggactaccgcatggagcgcccagaaggctgcccagagaaggtctatgaactcatgcgagcatgttggcagtggaatccctctgaccggccctcctttgctgaaatccaccaagcctttgaaacaatgttccaggaatccagtatctcagacgaagtggaaaaggagctggggaaacaaggcgtccgtggggctgtgagtaccttgctgcaggccccagagctgcccaccaagacgaggacctccaggagagctgcagagcacagagacaccactgacgtgcctgagatgcctcactccaagggccagggagagagcgatcctctggaccatgagcctgccgtgtctccattgctccctcgaaaagagcgaggtcccccggagggcggcctgaatgaagatgagcgccttctccccaaagacaaaaagaccaacttgttcagcgccttgatcaagaagaagaagaagacagccccaacccctcccaaacgcagcagctccttccgggagatggacggccagccggagcgcagaggggccggcgaggaagagggccgagacatcagcaacggggcactggctttcacccccttggacacagctgacccagccaagtccccaaagcccagcaatggggctggggtccccaatggagccctccgggagtccgggggctcaggcttccggtctccccacctgtggaagaagtccagcacgctgaccagcagccgcctagccaccggcgaggaggagggcggtggcagctccagcaagcgcttcctgcgctcttgctccgcctcctgcgttccccatggggccaaggacacggagtggaggtcagtcacgctgcctcgggacttgcagtccacgggaagacagtttgactcgtccacatttggagggcacaaaagtgagaagccggctctgcctcggaagagggcaggggagaacaggtctgaccaggtgacccgaggcacagtaacgcctccccccaggctggtgaaaaagaatgaggaagctgctgatgaggtcttcaaagacatcatggagtccagcccgggctccagcccgcccaacctgactccaaaacccctccggcggcaggtcaccgtggcccctgcctcgggcctcccccacaaggaagaagctggaaagggcagtgccttagggacccctgctgcagctgagccagtgacccccaccagcaaagcaggctcaggtgcaccagggggcaccagcaagggccccgccgaggagtccagagtgaggaggcacaagcactcctctgagtcgccagggagggacaaggggaaattgtccaggctcaaacctgccccgccgcccccaccagcagcctctgcagggaaggctggaggaaagccctcgcagagcccgagccaggaggcggccggggaggcagtcctgggcgcaaagacaaaagccacgagtctggttgatgctgtgaacagtgacgctgccaagcccagccagccgggagagggcctcaaaaagcccgtgctcccggccactccaaagccacagtccgccaagccgtcggggacccccatcagcccagcccccgttccctccacgttgccatcagcatcctcggccctggcaggggaccagccgtcttccaccgccttcatccctctcatatcaacccgagtgtctcttcggaaaacccgccagcctccagagcggatcgccagcggcgccatcaccaagggcgtggtcctggacagcaccgaggcgctgtgcctcgccatctctaggaactccgagcagatggccagccacagcgcagtgctggaggccggcaaaaacctctacacgttctgcgtgagctatgtggattccatccagcaaatgaggaacaagtttgccttccgagaggccatcaacaaactggagaataatctccgggagcttcagatctgcccggcgacagcaggcagtggtccagcggccactcaggacttcagcaagctcctcagttcggtgaaggaaatcagtgacatagtgcagaggtagcagcagtcaggggtcaggtgtcaggcccgtcggagctgcctgcagcacatgcgggctcgcccatacccgtgacagtggctgacaagggactagtgagtcagcaccttggcccaggagctctgcgccaggcagagctgagggccctgtggagtccagctctactacctacgtttgcaccgcctgccctcccgcaccttcctcctccccgctccgtctctgtcctcgaattttatctgtggagttcctgctccgtggactgcagtcggcatgccaggacccgccagccccgctcccacctagtgccccagactgagctctccaggccaggtgggaacggctgatgtggactgtctttttcatttttttctctctggagcccctcctcccccggctgggcctccttcttccacttctccaagaatggaagcctgaactgaggccttgtgtgtcaggccctctgcctgcactccctggccttgcccgtcgtgtgctgaagacatgtttcaagaaccgcatttcgggaagggcatgcacgggcatgcacacggctggtcactctgccctctgctgctgcccggggtggggtgcactcgccatttcctcacgtgcaggacagctcttgatttgggtggaaaacagggtgctaaagccaaccagcctttgggtcctgggcaggtgggagctgaaaaggatcgaggcatggggcatgtcctttccatctgtccacatccccagagcccagctcttgctctcttgtgacgtgcactgtgaatcctggcaagaaagcttgagtctcaagggtggcaggtcactgtcactgccgacatccctcccccagcagaatggaggcaggggacaagggaggcagtggctagtggggtgaacagctggtgccaaatagccccagactgggcccaggcaggtctgcaagggcccagagtgaaccgtcctttcacacatctgggtgccctgaaagggcccttcccctcccccactcctctaagacaaagtagattcttacaaggccctttcctttggaacaagacagccttcacttttctgagttcttgaagcatttcaaagccctgcctctgtgtagccgccctgagagagaatagagctgccactgggcacctgcgcacaggtgggaggaaagggcctggccagtcctggtcctggctgcactcttgaactgggcgaatgtcttatttaattaccgtgagtgacatagcctcatgttctgtgggggtcatcagggagggttaggaaaaccacaaacggagcccctgaaagcctcacgtatttcacagagcacgcctgccatcttctccccgaggctgccccaggccggagcccagatacgggggctgtgactctgggcagggacccggggtctcctggaccttgacagagcagctaactccgagagcagtgggcaggtggccgcccctgaggcttcacgccgggagaagccaccttcccaccccttcataccgcctcgtgccagcagcctcgcacaggccctagctttacgctcatcacctaaacttgtactttatttttctgatagaaatggtttcctctggatcgttttatgcggttcttacagcacatcacctctttgcccccgacggctgtgacgcagccggagggaggcactagtcaccgacagcggccttgaagacagagcaaagcgcccacccaggtcccccgactgcctgtctccatgaggtactggtcccttccttttgttaacgtgatgtgccactatattttacacgtatctcttggtatgcatcttttatagacgctcttttctaagtggcgtgtgcatagcgtcctgccctgccccctcgggggcctgtggtggctccccctctgcttctcggggtccagtgcattttgtttctgtatatgattctctgtggttttttttgaatccaaatctgtcctctgtagtattttttaaataaatcagtgtttacattagaa

SEQ ID NO: 153406 - DNA, 3393 bp, Artificial Sequence
  derived and/or modified sequence
atgctggagatctgcctgaagctggtgggctgcaagagcaagaagggcctgagcagcagcagcagctgctacctggaggaggccctgcagagacccgtggccagcgacttcgagccccagggcctgagcgaggccgccagatggaacagcaaggagaacctgctggccggccccagcgagaacgaccccaacctgttcgtggccctgtacgacttcgtggccagcggcgacaacaccctgagcatcaccaagggcgagaagctgagagtgctgggctacaaccacaacggcgagtggtgcgaggcccagaccaagaacggccagggctgggtgcccagcaactacatcacccccgtgaacagcctggagaagcacagctggtaccacggccccgtgagcagaaacgccgccgagtacctgctgagcagcggcatcaacggcagcttcctggtgagagagagcgagagcagccccggccagagaagcatcagcctgagatacgagggcagagtgtaccactacagaatcaacaccgccagcgacggcaagctgtacgtgagcagcgagagcagattcaacaccctggccgagctggtgcaccaccacagcaccgtggccgacggcctgatcaccaccctgcactaccccgcccccaagagaaacaagcccaccgtgtacggcgtgagccccaactacgacaagtgggagatggagagaaccgacatcaccatgaagcacaagctgggcggcggccagtacggcgaggtgtacgagggcgtgtggaagaagtacagcctgaccgtggccgtgaagaccctgaaggaggacaccatggaggtggaggagttcctgaaggaggccgccgtgatgaaggagatcaagcaccccaacctggtgcagctgctgggcgtgtgcaccagagagccccccttctacatcatcaccgagttcatgacctacggcaacctgctggactacctgagagagtgcaacagacaggaggtgaacgccgtggtgctgctgtacatggccacccagatcagcagcgccatggagtacctggagaagaagaacttcatccacagagacctggccgccagaaactgcctggtgggcgagaaccacctggtgaaggtggccgacttcggcctgagcagactgatgaccggcgacacctacaccgcccacgccggcgccaagttccccatcaagtggaccgcccccgagagcctggcctacaacaagttcagcatcaagagcgacgtgtgggccttcggcgtgctgctgtgggagatcgccacctacggcatgagcccctaccccggcatcgacctgagccaggtgtacgagctgctggagaaggactacagaatggagagacccgagggctgccccgagaaggtgtacgagctgatgagagcctgctggcagtggaaccccagcgacagacccagcttcgccgagatccaccaggccttcgagaccatgttccaggagagcagcatcagcgacgaggtggagaaggagctgggcaagcagggcgtgagaggcgccgtgagcaccctgctgcaggcccccgagctgcccaccaagaccagaaccagcagaagagccgccgagcacagagacaccaccgacgtgcccgagatgccccacagcaagggccagggcgagagcgaccccctggaccacgagcccgccgtgagccccctgctgcccagaaaggagagaggcccccccgagggcggcctgaacgaggacgagagactgctgcccaaggacaagaagaccaacctgttcagcgccctgatcaagaagaagaagaagaccgcccccaccccccccaagagaagcagcagcttcagagagatggacggccagcccgagagaagaggcgccggcgaggaggagggcagagacatcagcaacggcgccctggccttcacccccctggacaccgccgaccccgccaagagccccaagcccagcaacggcgccggcgtgcccaacggcgccctgagagagagcggcggcagcggcttcagaagcccccacctgtggaagaagagcagcaccctgaccagcagcagactggccaccggcgaggaggagggcggcggcagcagcagcaagagattcctgagaagctgcagcgccagctgcgtgccccacggcgccaaggacaccgagtggagaagcgtgaccctgcccagagacctgcagagcaccggcagacagttcgacagcagcaccttcggcggccacaagagcgagaagcccgccctgcccagaaagagagccggcgagaacagaagcgaccaggtgaccagaggcaccgtgacccccccccccagactggtgaagaagaacgaggaggccgccgacgaggtgttcaaggacatcatggagagcagccccggcagcagcccccccaacctgacccccaagcccctgagaagacaggtgaccgtggcccccgccagcggcctgccccacaaggaggaggccggcaagggcagcgccctgggcacccccgccgccgccgagcccgtgacccccaccagcaaggccggcagcggcgcccccggcggcaccagcaagggccccgccgaggagagcagagtgagaagacacaagcacagcagcgagagccccggcagagacaagggcaagctgagcagactgaagcccgcccccccccccccccccgccgccagcgccggcaaggccggcggcaagcccagccagagccccagccaggaggccgccggcgaggccgtgctgggcgccaagaccaaggccaccagcctggtggacgccgtgaacagcgacgccgccaagcccagccagcccggcgagggcctgaagaagcccgtgctgcccgccacccccaagccccagagcgccaagcccagcggcacccccatcagccccgcccccgtgcccagcaccctgcccagcgccagcagcgccctggccggcgaccagcccagcagcaccgccttcatccccctgatcagcaccagagtgagcctgagaaagaccagacagccccccgagagaatcgccagcggcgccatcaccaagggcgtggtgctggacagcaccgaggccctgtgcctggccatcagcagaaacagcgagcagatggccagccacagcgccgtgctggaggccggcaagaacctgtacaccttctgcgtgagctacgtggacagcatccagcagatgagaaacaagttcgccttcagagaggccatcaacaagctggagaacaacctgagagagctgcagatctgccccgccaccgccggcagcggccccgccgccacccaggacttcagcaagctgctgagcagcgtgaaggagatcagcgacatcgtgcagagatag

SEQ ID NO: 153407 - DNA, 486 bp, Artificial Sequence
  derived and/or modified sequence
ggcagacccggcagaagcagagccagaggcggcggcgagggcggctggagaggcggcggcagagccggcagagccggccccgagcccggccccagagccggcagaggcgtgcccgcccccgactgctggagaggcaagatgctggagatctgcctgaagctggtgggctgcaagagcaagaagggcctgagcagcagcagcagctgctacctggaggaggccctgcagagacccgtggccagcgacttcgagccccagggcctgagcgaggccgccagatggaacagcaaggagaacctgctggccggccccagcgagaacgaccccaacctgttcgtggccctgtacgacttcgtggccagcggcgacaacaccctgagcatcaccaagggcgagaagctgagagtgctgggctacaaccacaacggcgagtggtgcgaggcccagaccaagaacggccagggctgggtgcccagcaactactag

SEQ ID NO: 153408 - DNA, 2838 bp, Artificial Sequence
  derived and/or modified sequence
ctgagactgctgagagagcccctgcagcaccccggcagagtgggcagcagcagcttcaacggcggcagaagagcccaccaccacgcccccctgagcagccccaaggcccagcaggcccactgcctgtggtgcgtgccccagctgagacaggtgggcgacggcacccacggccaccaccacgaggcccagggcggcggccagtacggcgaggtgtacgagggcgtgtggaagaagtacagcctgaccgtggccgtgaagaccctgaaggaggacaccatggaggtggaggagttcctgaaggaggccgccgtgatgaaggagatcaagcaccccaacctggtgcagctgctgggcgtgtgcaccagagagccccccttctacatcatcaccgagttcatgacctacggcaacctgctggactacctgagagagtgcaacagacaggaggtgaacgccgtggtgctgctgtacatggccacccagatcagcagcgccatggagtacctggagaagaagaacttcatccacagagacctggccgccagaaactgcctggtgggcgagaaccacctggtgaaggtggccgacttcggcctgagcagactgatgaccggcgacacctacaccgcccacgccggcgccaagttccccatcaagtggaccgcccccgagagcctggcctacaacaagttcagcatcaagagcgacgtgtgggccttcggcgtgctgctgtgggagatcgccacctacggcatgagcccctaccccggcatcgacctgagccaggtgtacgagctgctggagaaggactacagaatggagagacccgagggctgccccgagaaggtgtacgagctgatgagagcctgctggcagtggaaccccagcgacagacccagcttcgccgagatccaccaggccttcgagaccatgttccaggagagcagcatcagcgacgaggtggagaaggagctgggcaagcagggcgtgagaggcgccgtgagcaccctgctgcaggcccccgagctgcccaccaagaccagaaccagcagaagagccgccgagcacagagacaccaccgacgtgcccgagatgccccacagcaagggccagggcgagagcgaccccctggaccacgagcccgccgtgagccccctgctgcccagaaaggagagaggcccccccgagggcggcctgaacgaggacgagagactgctgcccaaggacaagaagaccaacctgttcagcgccctgatcaagaagaagaagaagaccgcccccaccccccccaagagaagcagcagcttcagagagatggacggccagcccgagagaagaggcgccggcgaggaggagggcagagacatcagcaacggcgccctggccttcacccccctggacaccgccgaccccgccaagagccccaagcccagcaacggcgccggcgtgcccaacggcgccctgagagagagcggcggcagcggcttcagaagcccccacctgtggaagaagagcagcaccctgaccagcagcagactggccaccggcgaggaggagggcggcggcagcagcagcaagagattcctgagaagctgcagcgccagctgcgtgccccacggcgccaaggacaccgagtggagaagcgtgaccctgcccagagacctgcagagcaccggcagacagttcgacagcagcaccttcggcggccacaagagcgagaagcccgccctgcccagaaagagagccggcgagaacagaagcgaccaggtgaccagaggcaccgtgacccccccccccagactggtgaagaagaacgaggaggccgccgacgaggtgttcaaggacatcatggagagcagccccggcagcagcccccccaacctgacccccaagcccctgagaagacaggtgaccgtggcccccgccagcggcctgccccacaaggaggaggccggcaagggcagcgccctgggcacccccgccgccgccgagcccgtgacccccaccagcaaggccggcagcggcgcccccggcggcaccagcaagggccccgccgaggagagcagagtgagaagacacaagcacagcagcgagagccccggcagagacaagggcaagctgagcagactgaagcccgcccccccccccccccccgccgccagcgccggcaaggccggcggcaagcccagccagagccccagccaggaggccgccggcgaggccgtgctgggcgccaagaccaaggccaccagcctggtggacgccgtgaacagcgacgccgccaagcccagccagcccggcgagggcctgaagaagcccgtgctgcccgccacccccaagccccagagcgccaagcccagcggcacccccatcagccccgcccccgtgcccagcaccctgcccagcgccagcagcgccctggccggcgaccagcccagcagcaccgccttcatccccctgatcagcaccagagtgagcctgagaaagaccagacagccccccgagagaatcgccagcggcgccatcaccaagggcgtggtgctggacagcaccgaggccctgtgcctggccatcagcagaaacagcgagcagatggccagccacagcgccgtgctggaggccggcaagaacctgtacaccttctgcgtgagctacgtggacagcatccagcagatgagaaacaagttcgccttcagagaggccatcaacaagctggagaacaacctgagagagctgcagatctgccccgccaccgccggcagcggccccgccgccacccaggacttcagcaagctgctgagcagcgtgaaggagatcagcgacatcgtgcagagatag

SEQ ID NO: 153409 - protein, 1167 aa, Artificial Sequence
  derived and/or modified sequence
MVLGTVLLPPNSYGRDQDTSLCCLCTEASESALPDLTDHFASCVEDGFEGDKTGGSSPEALHRPYGCDVEPQALNEAIRWSSKENLLGATESDPNLFVALYDFVASGDNTLSITKGEKLRVLGYNQNGEWSEVRSKNGQGWVPSNYITPVNSLEKHSWYHGPVSRSAAEYLLSSLINGSFLVRESESSPGQLSISLRYEGRVYHYRINTTADGKVYVTAESRFSTLAELVHHHSTVADGLVTTLHYPAPKCNKPTVYGVSPIHDKWEMERTDITMKHKLGGGQYGEVYVGVWKKYSLTVAVKTLKEDTMEVEEFLKEAAVMKEIKHPNLVQLLGVCTLEPPFYIVTEYMPYGNLLDYLRECNREEVTAVVLLYMATQISSAMEYLEKKNFIHRDLAARNCLVGENHVVKVADFGLSRLMTGDTYTAHAGAKFPIKWTAPESLAYNTFSIKSDVWAFGVLLWEIATYGMSPYPGIDLSQVYDLLEKGYRMEQPEGCPPKVYELMRACWKWSPADRPSFAETHQAFETMFHDSSISEEVAEELGRAASSSSVVPYLPRLPILPSKTRTLKKQVENKENIEGAQDATENSASSLAPGFIRGAQASSGSPALPRKQRDKSPSSLLEDAKETCFTRDRKGGFFSSFMKKRNAPTPPKRSSSFREMENQPHKKYELTGNFSSVASLQHADGFSFTPAQQEANLVPPKCYGGSFAQRNLCNDDGGGGGGSGTAGGGWSGITGFFTPRLIKKTLGLRAGKPTASDDTSKPFPRSNSTSSMSSGLPEQDRMAMTLPRNCQRSKLQLERTVSTSSQPEENVDRANDMLPKKSEESAAPSRERPKAKLLPRGATALPLRTPSGDLAITEKDPPGVGVAGVAAAPKGKEKNGGARLGMAGVPEDGEQPGWPSPAKAAPVLPTTHNHKVPVLISPTLKHTPADVQLIGTDSQGNKFKLLSEHQVTSSGDKDRPRRVKPKCAPPPPPVMRLLQHPSICSDPTEEPTALTAGQSTSETQEGGKKAALGAVPISGKAGRPVMPPPQVPLPTSSISPAKMANGTAGTKVALRKTKQAAEKISADKISKEALLECADLLSSALTEPVPNSQLVDTGHQLLDYCSGYVDCIPQTRNKFAFREAVSKLELSLQELQVSSAAAGVPGTNPVLNNLLSCVQEISDVVQR

SEQ ID NO: 153410 - DNA, 3504 bp, Artificial Sequence
  derived and/or modified sequence
atggtgctgggcaccgtgctgctgccccccaacagctacggcagagaccaggacaccagcctgtgctgcctgtgcaccgaggccagcgagagcgccctgcccgacctgaccgaccacttcgccagctgcgtggaggacggcttcgagggcgacaagaccggcggcagcagccccgaggccctgcacagaccctacggctgcgacgtggagccccaggccctgaacgaggccatcagatggagcagcaaggagaacctgctgggcgccaccgagagcgaccccaacctgttcgtggccctgtacgacttcgtggccagcggcgacaacaccctgagcatcaccaagggcgagaagctgagagtgctgggctacaaccagaacggcgagtggagcgaggtgagaagcaagaacggccagggctgggtgcccagcaactacatcacccccgtgaacagcctggagaagcacagctggtaccacggccccgtgagcagaagcgccgccgagtacctgctgagcagcctgatcaacggcagcttcctggtgagagagagcgagagcagccccggccagctgagcatcagcctgagatacgagggcagagtgtaccactacagaatcaacaccaccgccgacggcaaggtgtacgtgaccgccgagagcagattcagcaccctggccgagctggtgcaccaccacagcaccgtggccgacggcctggtgaccaccctgcactaccccgcccccaagtgcaacaagcccaccgtgtacggcgtgagccccatccacgacaagtgggagatggagagaaccgacatcaccatgaagcacaagctgggcggcggccagtacggcgaggtgtacgtgggcgtgtggaagaagtacagcctgaccgtggccgtgaagaccctgaaggaggacaccatggaggtggaggagttcctgaaggaggccgccgtgatgaaggagatcaagcaccccaacctggtgcagctgctgggcgtgtgcaccctggagccccccttctacatcgtgaccgagtacatgccctacggcaacctgctggactacctgagagagtgcaacagagaggaggtgaccgccgtggtgctgctgtacatggccacccagatcagcagcgccatggagtacctggagaagaagaacttcatccacagagacctggccgccagaaactgcctggtgggcgagaaccacgtggtgaaggtggccgacttcggcctgagcagactgatgaccggcgacacctacaccgcccacgccggcgccaagttccccatcaagtggaccgcccccgagagcctggcctacaacaccttcagcatcaagagcgacgtgtgggccttcggcgtgctgctgtgggagatcgccacctacggcatgagcccctaccccggcatcgacctgagccaggtgtacgacctgctggagaagggctacagaatggagcagcccgagggctgcccccccaaggtgtacgagctgatgagagcctgctggaagtggagccccgccgacagacccagcttcgccgagacccaccaggccttcgagaccatgttccacgacagcagcatcagcgaggaggtggccgaggagctgggcagagccgccagcagcagcagcgtggtgccctacctgcccagactgcccatcctgcccagcaagaccagaaccctgaagaagcaggtggagaacaaggagaacatcgagggcgcccaggacgccaccgagaacagcgccagcagcctggcccccggcttcatcagaggcgcccaggccagcagcggcagccccgccctgcccagaaagcagagagacaagagccccagcagcctgctggaggacgccaaggagacctgcttcaccagagacagaaagggcggcttcttcagcagcttcatgaagaagagaaacgcccccaccccccccaagagaagcagcagcttcagagagatggagaaccagccccacaagaagtacgagctgaccggcaacttcagcagcgtggccagcctgcagcacgccgacggcttcagcttcacccccgcccagcaggaggccaacctggtgccccccaagtgctacggcggcagcttcgcccagagaaacctgtgcaacgacgacggcggcggcggcggcggcagcggcaccgccggcggcggctggagcggcatcaccggcttcttcacccccagactgatcaagaagaccctgggcctgagagccggcaagcccaccgccagcgacgacaccagcaagcccttccccagaagcaacagcaccagcagcatgagcagcggcctgcccgagcaggacagaatggccatgaccctgcccagaaactgccagagaagcaagctgcagctggagagaaccgtgagcaccagcagccagcccgaggagaacgtggacagagccaacgacatgctgcccaagaagagcgaggagagcgccgcccccagcagagagagacccaaggccaagctgctgcccagaggcgccaccgccctgcccctgagaacccccagcggcgacctggccatcaccgagaaggacccccccggcgtgggcgtggccggcgtggccgccgcccccaagggcaaggagaagaacggcggcgccagactgggcatggccggcgtgcccgaggacggcgagcagcccggctggcccagccccgccaaggccgcccccgtgctgcccaccacccacaaccacaaggtgcccgtgctgatcagccccaccctgaagcacacccccgccgacgtgcagctgatcggcaccgacagccagggcaacaagttcaagctgctgagcgagcaccaggtgaccagcagcggcgacaaggacagacccagaagagtgaagcccaagtgcgcccccccccccccccccgtgatgagactgctgcagcaccccagcatctgcagcgaccccaccgaggagcccaccgccctgaccgccggccagagcaccagcgagacccaggagggcggcaagaaggccgccctgggcgccgtgcccatcagcggcaaggccggcagacccgtgatgccccccccccaggtgcccctgcccaccagcagcatcagccccgccaagatggccaacggcaccgccggcaccaaggtggccctgagaaagaccaagcaggccgccgagaagatcagcgccgacaagatcagcaaggaggccctgctggagtgcgccgacctgctgagcagcgccctgaccgagcccgtgcccaacagccagctggtggacaccggccaccagctgctggactactgcagcggctacgtggactgcatcccccagaccagaaacaagttcgccttcagagaggccgtgagcaagctggagctgagcctgcaggagctgcaggtgagcagcgccgccgccggcgtgcccggcaccaaccccgtgctgaacaacctgctgagctgcgtgcaggagatcagcgacgtggtgcagagatag

SEQ ID NO: 153411 - DNA, 3504 bp, Artificial Sequence
  derived and/or modified sequence
atggtcctcggcacagtgttgctaccgcccaactcgtatggcagagaccaggacacctccctgtgttgtctgtgtaccgaggcctctgaaagtgccctccccgatctgaccgaccattttgcctcctgcgtggaagacggttttgaaggcgataagacaggggggagcagccccgaagctttacacaggccatacgggtgcgacgtggagccccaagctctgaacgaggccatccgctggtcaagtaaggaaaatctgctgggggcaaccgaatccgaccccaatctgttcgtggccctctatgacttcgtggcatcaggagacaacaccctcagcataaccaagggggaaaagctccgggtgctgggatataaccaaaacggggagtggagcgaggtgcggtctaaaaacgggcagggatgggtgccttccaattatataaccccagtaaattcactagagaagcattcatggtatcacggaccagtctcaagaagcgcggctgagtatctactctcttccctgatcaatgggtcttttcttgtgcgagagtccgagtccagccccgggcagttgagtatttcactcagatacgaaggccgcgtttaccattatcgcattaacaccactgctgatggaaaggtttatgtaacagcggaatctagatttagcacgctggcagagctcgtgcaccaccattccaccgtggcagatggcctggtaactaccctccactaccccgccccgaaatgcaacaaaccaaccgtttatggcgtgtcccctatccacgacaagtgggagatggaaagaacagatatcactatgaagcacaagctcggtggcggccaatacggtgaggtctatgtcggtgtatggaagaaatactccctgacagttgctgtgaaaacccttaaggaggacacaatggaggtcgaagaattcctcaaggaggccgctgtgatgaaggaaatcaagcatcctaaccttgttcagctccttggagtctgcaccctcgagccacctttttatatagtgaccgagtatatgccctacggcaatctgctggactatttacgagaatgtaatcgcgaggaagtcaccgctgttgtgctgctctatatggccacgcagatctcttccgcaatggagtatctcgaaaagaagaactttatccaccgggaccttgcagcccgaaattgccttgtaggagaaaatcacgtcgtgaaggtagccgactttggactatcgcgcttaatgacaggggacacatatactgctcatgctggcgcaaagttccccattaagtggacagctccggagtccctggcgtacaataccttctccataaaaagcgatgtttgggcatttggtgtgctcctctgggagatcgcgacttatgggatgagtccttaccctgggattgacctctcccaggtatacgacctgctcgagaaggggtacagaatggagcagcctgaaggatgccctcctaaggtgtacgaactgatgcgggcctgctggaagtggtcaccagctgaccgtccaagcttcgcagaaacccatcaggcatttgagaccatgttccatgacagcagcatctctgaggaggtggctgaggaactgggacgtgcagccagtagtagttcagtggtcccatacctgccacggttgcccattttgccctcgaagactagaaccttgaagaaacaagtggagaacaaggagaacatagaaggcgctcaggatgctactgaaaattccgcctcctcattggcacctgggtttatccggggtgcacaggcttcatccgggtcccctgccctgccacggaagcagcgcgacaaatccccctcaagtcttctagaggacgctaaggagacttgcttcacacgggaccggaagggaggctttttttcttcttttatgaaaaagcgcaacgctcctacaccgccaaaacgctccagcagctttcgagaaatggaaaatcaaccccataagaagtatgaactcactggaaattttagctccgtggcctctctgcagcacgccgacgggtttagcttcactcccgcacaacaggaagccaatctcgtgccccccaaatgttacggagggagttttgcccagaggaatctctgtaacgatgacgggggtggaggcggcgggagcggcacagctgggggcggctggtccggaataaccggattttttaccccaaggctcatcaaaaagaccctggggcttagggcaggtaaacccacagcgagcgatgacacgtctaagccattcccccgctctaattctacatctagcatgtcctccggactcccagagcaggacagaatggcaatgacactacctaggaattgccagcggtcaaaactgcagctcgagcgtacagtgtccacttcatctcaacccgaggagaacgttgatagagctaatgacatgctcccgaaaaaatctgaggaatctgcggcccctagcagggagcgtccgaaggctaagttgctgccaagaggcgcgaccgcgctgccgctacgcacaccgtctggagatttagcgatcactgagaaggacccccccggtgtcggggtggccggggttgctgctgctcctaagggcaaagagaagaacggaggggcccggcttggaatggcaggagtgcctgaagacggagaacagccgggttggccctcccccgccaaagccgcgccggtgctgcccacaacgcataaccacaaggtccccgtcttaattagccctaccctcaaacacactccggcagatgtgcaattaattggtactgacagccagggtaataagtttaaactcttgagtgaacatcaggtgaccagtagcggcgataaagaccggcctcgcagagttaagcctaaatgcgccccaccccctcctccagtgatgaggctgctacagcatccgtctatctgttcagatcccactgaagaacccactgccttaactgcagggcagtccacctcagagacacaggaaggtggtaagaaagccgcccttggtgcggttcccatttcaggaaaggcaggcagacccgtcatgccaccaccgcaggttcctctgcccacctcctcaatttctccggctaagatggccaacgggaccgctggcactaaggtggccctgagaaaaacaaaacaagccgctgagaagatttctgccgataaaatcagcaaggaggcgttgctggagtgtgctgatctgctgtcctcagccctgaccgagccagtccctaacagtcagctcgttgataccgggcatcagctgctcgattactgctccgggtacgtcgattgcattccccagacgcgaaataagtttgcattccgggaggctgtttccaagctggaactctcgttgcaggagctccaggtgagttcggctgccgcaggggtaccaggtaccaatccggttctgaataacctgctgagctgtgttcaggagattagtgatgttgttcagcgatag

SEQ ID NO: 153412 - DNA, 3504 bp, Artificial Sequence
  derived and/or modified sequence
atggtgctgggcaccgtgctgctgccccccaacagctatggccgggaccaggacaccagcctgtgctgcctgtgcacagaggccagcgagagcgccctgcctgacctgacagaccactttgccagctgtgtggaggatggctttgaaggagacaagacaggaggcagcagccctgaggccctgcaccggccctacggctgtgatgtggagccccaggccctgaatgaggccatccgctggagcagcaaggagaacctgctgggcgccacagaaagtgaccccaacctgtttgtggccctgtatgactttgtggccagcggggacaacaccctgagcatcaccaagggggagaagctgcgggtgctgggctacaaccagaatggagagtggagcgaggtgcgcagcaagaatggccagggctgggtgcccagcaactacatcacccctgtgaacagcctggagaagcacagctggtaccacggccctgtgagccgctctgctgctgagtacctgctgagcagcctcatcaatggcagcttcctggtgcgggagagcgagagcagccctggccagctgagcatcagcctgcgctatgagggccgggtgtaccactaccgcatcaacaccacagcagatggcaaggtgtatgtgacagctgagagccgcttcagcaccctggccgagctggtgcaccaccacagcacagtggctgatggcctggtgaccaccctgcactacccagcccccaagtgcaacaagcccaccgtgtatggagtgagccccatccatgacaagtgggagatggagaggacagacatcaccatgaagcacaagctgggcggcggccagtacggggaggtgtatgtgggcgtgtggaagaagtacagcctgactgtggccgtgaagaccctgaaggaggacaccatggaggtggaggagttcctgaaggaggccgctgtgatgaaggagatcaagcaccccaacctggtgcagctgctgggcgtgtgcaccctggagccccccttctacatcgtgacagagtacatgccctacggcaacctgctggactacctgcgggagtgcaaccgggaggaggtgacagctgtggtgctgctgtacatggccacccagatcagcagcgccatggagtacctggagaagaagaacttcatccaccgggacctggccgccaggaactgcctggtgggggagaaccacgtggtgaaggtggccgactttggcctgagccggctgatgaccggggacacctacacagcccacgccggggccaagttccccatcaagtggacagcccctgagagcctggcctacaacaccttcagcatcaagagtgatgtgtgggccttcggcgtgctgctgtgggagatcgccacctacggcatgagcccctacccaggcatcgacctgagccaggtgtatgacctgctggagaagggctacaggatggagcagcctgagggctgcccccccaaggtgtatgagctgatgagggcctgctggaagtggagccctgctgaccggcccagctttgctgagacccaccaggcctttgagaccatgtttcatgacagcagcatcagcgaggaggtggccgaggagctgggccgggccgccagcagcagctctgtggtgccctacctgccccggctgcccatcctgcccagcaagaccaggaccctgaagaagcaggtggagaacaaggaaaatattgaaggagcccaggatgccacagaaaattctgccagcagcctggcccctggcttcatccggggggcccaggccagcagcggcagccctgccctgcccaggaagcagagggacaagagccccagcagcctgctggaggatgccaaggagacctgcttcacccgggacaggaagggcggcttcttcagcagcttcatgaagaagagaaatgcccccaccccacccaagaggagcagcagcttccgggagatggagaaccagccccacaagaagtatgagctgactggaaacttcagctctgtggccagcctgcagcacgcagatggcttctccttcaccccagcccagcaggaggccaacctggtgccccccaagtgctatggaggcagctttgcccagaggaacctgtgcaatgatgatggcggcggcggcggcggcagcggcacagctgggggcggctggagcggcatcaccggcttcttcacccccaggctcatcaagaagaccctgggcctgcgggccggcaagcccacagccagtgatgacaccagcaagcccttccccaggagcaacagcaccagctccatgagcagcggcctgcctgagcaggacaggatggccatgaccctgcccaggaactgccagaggagcaagctgcagctggagaggacagtgtccaccagcagccagccagaagaaaatgtggaccgggccaatgacatgctgcccaagaagtctgaggagagcgctgcccccagccgggagcggcccaaggccaagctgctgcccaggggggccacagccctgcccctgcggaccccatctggggacctggccatcacagagaaggaccccccaggagtgggcgtggccggcgtggccgccgcccccaagggcaaggagaagaatggaggagcccggctgggcatggccggcgtgcctgaagatggagagcagcccggctggcccagccctgccaaggccgcccctgtgctgcccaccacccacaaccacaaggtgcctgtgctgatcagccccaccctgaagcacaccccagcagatgtgcagctgattggaacagacagccagggcaacaagttcaagctgctgtctgagcaccaggtgaccagcagcggggacaaggaccggcccaggagagtgaagcccaagtgtgcccctcctcctcctcctgtgatgaggctgctgcagcaccccagcatctgcagcgaccccacagaggagcccacagccctgacagctggccagagcaccagcgagacccaggagggcggcaagaaggccgccctgggcgctgtgcccatcagcggcaaggccggccggcctgtgatgcccccaccccaggtgcccctgcccaccagcagcatcagccctgccaagatggccaatggaacagctggcaccaaggtggccctgaggaagaccaagcaggccgctgagaagatctctgctgacaagatcagcaaggaggccctgctggagtgtgccgacctgctgagcagcgccctgacagagcctgtgcccaacagccagctggtggacaccggccaccagctgctggactactgcagcggctacgtggactgcatcccccagaccaggaacaagtttgccttccgggaggccgtgtccaagctggagctgagcctgcaggagctgcaggtgtcctctgctgctgctggggtgcccggcaccaaccctgtgctgaacaacctgctgagctgtgtgcaggagatcagtgatgtggtgcagaggtag

SEQ ID NO: 153413 - DNA, 3504 bp, Artificial Sequence
  derived and/or modified sequence
atggtgctgggcaccgtgctgctgccccccaacagctacggccgggaccaggacactagcctgtgttgcctgtgcaccgaagcctccgagagcgctctccctgacctaacagaccattttgccagttgcgttgaagatgggttcgaaggggataaaacgggaggttctagcccagaggccctccaccggccctacggctgtgacgtggagcctcaggccctcaatgaagcaattcggtggtcttccaaggagaacctccttggggcaaccgagagcgaccctaacctcttcgtggccctctacgattttgtcgcatcaggggacaacaccttatccataaccaaaggggaaaagctacgcgtcctcggctacaatcagaatggagaatggagtgaggtgaggtcgaaaaatgggcaaggatgggtaccaagcaactacatcactcccgtgaacagcttagaaaaacattcctggtatcacggtcccgtgtcgaggtctgccgcagaatacctcctctccagcctaatcaatggaagcttcttggtgcgcgagtcggaaagctcacccggccagctgtccattagcttgaggtatgagggccgagtctaccactaccgcatcaacaccaccgcagatggaaaggtctacgtgaccgccgaatcccggttttctaccttggccgaactggtccaccaccactccactgtggctgatggcctggtgactacattgcattatccagcccccaagtgcaacaaacctacggtatacggcgtctcccccattcatgacaagtgggaaatggaacgcaccgatataacaatgaagcacaaattgggcggcggtcagtacggagaggtatatgtgggcgtctggaagaaatacagcttaaccgttgctgtaaagacactcaaagaggatacaatggaggtggaagaatttctaaaagaggccgcggtcatgaaagagattaagcatccaaacctggtccaactattaggggtctgtacattagaacccccattctatatagtcaccgaatatatgccttacggaaatttattagactacctgagagaatgtaaccgagaagaggtcaccgcagtggtgctcctctacatggcgactcagattagtagcgccatggaatacctggaaaagaaaaattttatacatcgagacctggccgccagaaactgtctggtaggggagaatcacgttgtcaaagttgccgactttggactgtcaagactgatgacaggcgatacatacacggcccatgcgggtgccaagttccctatcaaatggactgcaccagaaagcctggcgtacaacacgttttcaataaaaagcgacgtatgggcttttggcgtcctcctatgggagatcgctacatatggaatgtccccataccctggtatcgatctgtcccaggtttatgatctcttggaaaagggatataggatggagcagcccgaaggttgtccaccgaaagtctatgagttaatgcgcgcttgttggaaatggtcgccagcagataggcccagctttgccgagacccaccaagcttttgagaccatgtttcacgacagttctatatctgaggaagtggccgaggagctggggcgggcagcttcctcttcaagtgttgtcccatacctaccccgcctcccaatcctcccctctaaaacccgcacactgaaaaagcaggtcgaaaacaaggagaatatagagggcgctcaggacgccaccgaaaactccgcttccagcctggctcctggctttatcaggggggcccaagcctcatccggatcccccgccctccctcgcaagcagcgggataagtccccttccagcctgctggaggatgccaaggaaacgtgcttcactagggaccggaaaggtgggttcttctcctcttttatgaagaagagaaatgccccaacaccccccaagaggtcaagctcatttcgtgagatggagaatcagcctcacaagaagtacgaactcacggggaacttctccagtgtggcatcacttcagcacgccgatggtttttcttttactcctgcgcagcaagaagctaatcttgtgccccccaaatgttatggggggtcgtttgcccaacgcaacctgtgcaacgatgatggcggcggcggcggcggcagcggaaccgccggcggtgggtggtcaggtatcaccggcttctttactccgcgtctaatcaagaaaacactaggcttgcgagccggaaaaccgactgcgtccgacgacacttcaaagccctttcccagatctaacagtacatctagtatgtcgagcggtttaccagagcaagacaggatggccatgactttaccgcgcaactgccaaagaagtaagctgcagctggagaggacagttagtacttcctcccagcccgaagagaacgtcgaccgcgcaaacgacatgcttcccaagaaaagtgaagaatctgctgcgccctcccgtgaacggcccaaagcaaagcttttgccacggggcgctaccgctctacccctgcgcactccttcaggggatctcgccatcaccgagaaagatcctcccggggttggggtagctggggttgccgcagccccaaagggtaaggagaagaacggcggagcaagactcgggatggcaggggtccccgaggatggcgagcagccaggttggccttcccccgccaaagccgcccccgttctccctaccacccacaaccacaaggtgcctgttctcatcagccccacccttaaacatactccggcggacgtacagttaatcggaacagactctcagggtaacaaatttaaactcctgtctgagcaccaggttacctcatccggtgacaaagacagaccccgacgggtaaaacccaaatgtgccccacctcctcctcctgtcatgcgcctgctccaacatccaagcatctgttccgatcctaccgaagaaccaactgctctgacggcaggtcagtctacatcagaaacacaggagggcgggaagaaggccgcccttggcgccgtgcccatcagcgggaaagccggcaggccagtgatgcctcccccacaggtgccccttccgacctcctcaatctcgcctgcgaaaatggctaatgggacagctggcaccaaggtggcactgcgcaagacgaaacaggccgcagagaaaatcagcgccgataagattagtaaggaggccctcttagagtgtgcggacctcctgtcgtcagcattgactgaacctgtccctaattctcaactggtcgacacaggtcaccagctgcttgactactgttccggatatgtcgactgtataccacaaactcggaacaaattcgccttccgagaggcggtgagtaagctggaactcagtttgcaagagctgcaggttagcagcgctgccgcgggcgtcccaggtacaaaccctgttttgaataacttactctcatgcgtacaggaaatcagtgacgttgttcaacggtag

SEQ ID NO: 153414 - DNA, 3504 bp, Artificial Sequence
  derived and/or modified sequence
atggttctgggcactgtcctgttgccccctaactcttatggcagagaccaggataccagtctgtgttgtctttgtacagaggcaagtgagtccgctctgcccgatctcacagaccacttcgccagctgcgtggaagatggcttcgaaggcgacaaaacaggaggttcgagcccagaagccctgcaccgcccatacggatgtgacgtagagccgcaggccctgaacgaggccatacgctggtcgtctaaagagaatctcctaggagccaccgaatcagatccaaacctgttcgtggctctgtatgacttcgttgcttccggagacaacactctgagcataaccaaaggagaaaaacttcgcgtgttaggttacaaccaaaatggagagtggtccgaggtacgatcaaaaaacggccaaggttgggttcctagcaactacattacccccgtcaattccttggaaaagcatagttggtaccacggcccagtgagcagaagcgccgctgagtacctcttgagttccttaatcaatggaagtttccttgtcagggagtcagagtcttctcccggacaactttcaatttcactgcgttatgaggggagagtataccattatcgcataaatactaccgccgacggcaaggtctatgtaactgcagagtccagattctctaccctggctgaactggttcaccaccattcgactgtggccgatggactggttactacgctgcactacccagctccaaaatgtaacaagccaaccgtctatggcgtcagcccgattcacgacaagtgggagatggagaggactgatatcacaatgaagcataagctaggaggagggcaatacggagaagtttacgtgggtgtgtggaaaaagtactctctaacagtggctgttaaaactttgaaagaggatactatggaggtggaggaatttctgaaggaggccgctgtgatgaaggagattaagcatcccaaccttgtgcagcttttgggggtgtgtaccctggaacccccattttacatagtcactgaatatatgccctacgggaacctgctcgattatttaagggagtgtaaccgcgaggaagttaccgccgtggtgcttctgtacatggctacacagatctcttccgctatggagtatttggaaaaaaagaactttatccatagagatttggcggctcgcaattgtcttgtcggcgaaaaccatgttgtcaaggtggctgacttcgggctctcgcgcctgatgactggcgatacgtacacagcgcatgcgggagccaagttcccgattaaatggactgcccctgagagtctggcctataacacattttccatcaagagtgatgtgtgggcatttggcgtcctgctctgggaaatagccacatacggaatgtccccctatcccggtatcgacctttctcaagtgtacgacctgttggagaagggataccgaatggagcaacctgagggatgtccgcctaaagtgtatgaactcatgcgagcttgttggaaatggtctcccgctgatcggcctagtttcgcagagactcatcaggcttttgaaacaatgtttcatgatagtagtatcagcgaagaagttgctgaggaactaggaagagccgcttcaagctcaagtgtggtgccatatctgcccagactgccaatcctcccatccaagaccaggacgctgaaaaaacaggttgagaacaaggagaatatcgagggggcacaagatgccacagaaaacagtgcctcctcattggcaccagggttcatacggggagcccaagcaagctccgggtcgccagctctgccacgaaagcaacgagacaaatctccgagtagcttgttggaagatgctaaggagacatgctttacccgcgatcgcaaagggggatttttctcgagcttcatgaaaaaaagaaacgccccaacaccgcctaaacggagcagcagcttccgtgaaatggaaaatcagcctcataagaagtacgaactaactggcaacttcagctctgttgcaagcctgcagcatgccgatggtttcagtttcacaccagctcagcaggaggctaatctggtgcctcccaagtgctatgggggatcatttgctcagcgcaatctgtgtaacgacgatgggggtggtggaggagggtccggcaccgcaggtggcggatggagtggtatcacagggttctttactccccgtctgatcaagaagaccctgggattaagggctggtaaaccaacagcctcagacgataccagcaagccctttccccgaagcaactccacaagcagcatgagcagcggcctgccagagcaggacagaatggcgatgacgctgccaaggaactgccagcggtcaaaattacaattggagcgtaccgtctccacgtcttcgcagcccgaagaaaatgtggaccgcgcaaatgatatgctgccaaaaaaatctgaggagtccgcggcacctagtagggagagaccaaaagccaaactgttacccaggggagctaccgctctgcctctgcgcaccccgtccggtgacttagcaatcacggaaaaggatccccctggggtcggagtggcaggggtcgccgctgctcctaaagggaaagagaagaacggaggagccagacttggaatggccggagtccccgaagatggggaacagcccggatggcccagcccagctaaggccgcacccgtcctgcctaccacccataatcataaggtccccgtattgattagtcctaccctgaaacacacacctgcagatgtccaactgattgggacagattctcagggtaataaatttaagctgctgtcggaacaccaagttaccagctccggcgacaaggatcgtcctaggcgtgtcaagcccaaatgcgcccctcctcctcccccagtgatgagattgttacagcacccctctatttgcagcgacccgactgaggaacctacagctctcacagcagggcaaagtacaagcgagacacaggagggtggcaaaaaggccgctctaggagcagtacctatctcagggaaggccggaaggccagtcatgccccctcctcaagtgcccctgcctacaagcagcatctcccccgctaaaatggctaacggaactgctggcactaaagtagctctgcgcaaaactaagcaggcagctgagaagataagcgctgataagatctccaaagaagctctcttggaatgcgcagatctgctgtcttctgcgttgacagagccagttcctaattctcagctggtggatactggtcaccagctcctggactattgttctggctacgtggattgcatcccgcaaacccggaataagttcgcctttcgcgaagccgtgagtaagctggaactaagtttacaggaattacaggtcagttccgccgctgctggcgtccctggaacaaatcccgttctgaataatcttctgtcttgcgtgcaggagatcagcgacgtggtgcagcgctag

SEQ ID NO: 153415 - DNA, 3635 bp, Artificial Sequence
  derived and/or modified sequence
ctgggcagaggtatggtccttgggacagttctccttccacctaatagttatggcagagatcaggacacttcactttgctgcctgtgcactgaggcctcagaatctgctctacccgacttaacagatcactttgccagctgtgtggaggatggatttgagggagacaagactggaggcagtagtccagaagctttgcatcgtccctatggttgtgatgttgaaccccaggcactaaatgaggctatcaggtggagctccaaggagaacttgctcggagccactgagagtgaccctaatctcttcgttgcactttatgattttgtagcaagtggtgataacacactcagcatcactaaaggtgaaaagctacgagtccttggttacaaccagaatggtgagtggagtgaagttcgctctaagaatgggcagggctgggtgccaagcaactacatcaccccagtgaacagcctggaaaaacactcctggtaccatggacctgtgtcacgcagtgcagctgagtatctgctcagcagtctaatcaatggcagcttcctggtgcgagaaagtgagagtagccctgggcagctgtccatctcgctcaggtacgagggacgtgtgtatcactacaggatcaataccactgcagatggcaaggtgtatgtgactgctgagagccgcttcagcaccttggcagagcttgtacaccatcactccacagtggctgatgggctggtgacaacattacactacccagcacccaagtgtaataagcctacagtctatggtgtgtcccccatccacgacaaatgggaaatggagcgaacagatattaccatgaagcacaaacttgggggcggtcagtatggagaggtttacgttggcgtctggaagaaatacagccttacagttgctgtgaaaacattgaaggaagataccatggaggtagaagaattcctgaaagaagctgcagtaatgaaggaaatcaagcatcctaatctggtacaacttttaggtgtgtgtactttggagccaccattttacattgtgactgaatacatgccatacgggaatttgctggattacctccgagaatgcaaccgagaagaggtgactgcagttgtgctgctctacatggccactcagatttcttctgcaatggagtacttagagaagaagaatttcatccatagagatcttgcagctcgtaactgcctagtgggagaaaaccatgtggtaaaagtggctgactttggcttaagtagattgatgactggagacacttatactgctcatgctggagccaaatttcctattaagtggacagcaccagagagtcttgcctacaataccttctcaattaaatctgacgtctgggcttttggggtattgttgtgggaaattgctacctatggaatgtcaccatatccaggtattgacctgtctcaggtctatgacctactagaaaaaggatatcgaatggaacagcctgagggatgcccccctaaggtttatgaacttatgagagcatgctggaagtggagccctgccgataggccctcttttgctgaaacacaccaagcttttgaaaccatgttccatgactccagcatttctgaagaggtagctgaggagcttgggagagccgcctcctcgtcatctgttgttccatacctgccccggctacctatacttccttccaagactcggacactgaagaaacaggtggagaacaaggagaacattgaaggggcacaagatgccacagaaaattctgcttccagtttagcaccagggttcatcagaggtgcacaggcctctagtggatccccagcactgcctcgaaagcaaagagacaagtcacccagcagcctcttggaagatgccaaagagacatgcttcaccagggataggaaggggggcttcttcagctccttcatgaagaagagaaatgctcctacaccccccaaacgcagcagctccttccgagaaatggagaatcagccccataagaaatacgaactcacgggtaacttctcatctgttgcttctctacagcatgctgatgggttctctttcactcctgcccagcaagaggcgaatctggtgccacccaagtgctatggggggagctttgcacagaggaacctctgtaatgacgacggtggtgggggtgggggcagtggcactgctgggggtgggtggtctggcatcacaggcttctttacaccacgcttaatcaaaaagacactgggcttacgagcaggtaaacccacagccagtgatgacacttccaagccttttccaaggtcaaactctacatcttccatgtcctcagggcttccagagcaggataggatggcaatgacccttcccaggaactgccagaggtccaaactccagctggaaaggacagtgtccacctcttctcagccagaagagaatgtggacagggccaatgacatgcttccaaaaaaatcagaggaaagtgctgctccaagcagggagagaccaaaagccaagttattgcccagaggagccacagctcttcctctcagaacaccctctggggatctagccattacagagaaggaccctccaggggtgggagtggctggagtggcagctgcccccaagggtaaagagaagaatggtggggcacgacttgggatggctggagttccagaggatggagagcagccgggctggccttctccagccaaggctgcccccgtcctcccaaccactcacaaccacaaagtgccagtccttatctcacccactctgaaacacactccagctgacgtgcagctcattggcacagactctcaggggaataaattcaagctcttatctgagcatcaggtcacatcctctggagacaaggaccgaccccgacgggtaaaaccaaagtgtgccccacccccaccaccagtgatgagactactgcagcatccgtccatctgctcagaccctacagaagagccaactgccctaactgcaggacagtccacatcagaaacacaggaaggaggaaagaaggcagctctgggcgcagtgcccatcagtgggaaagctgggaggccagtgatgcctccacctcaagtgcctctgcccacatcttccatctcgccagccaaaatggccaatggcacagcaggtactaaagtggctctgagaaaaaccaaacaggccgctgagaaaatctcagcagacaaaatcagcaaagaggccctgctggaatgtgctgacctactgtccagtgcactcacggaacctgtgcccaacagccagctggtagacactggacaccagctgcttgactactgctcaggctatgtggactgcatccctcaaactcgcaacaaatttgccttccgagaggctgtgagcaaactggaactcagcctgcaggagctacaggtttcttcagcagctgctggtgtgcccgggacaaaccctgtccttaataacttattgtcatgtgtacaggaaatcagtgatgtggtgcagaggtagccactgttagcctggtgggaaaatgcacacatttctgaggggagagggaaaaggacttgttttcctgtgttcttgttttcagaaaatgaaagactcatacttgagtgtgtttatgtgaa

SEQ ID NO: 153416 - protein, 377 aa, Artificial Sequence
  derived and/or modified sequence
MCDDEETTALVCDNGSGLVKAGFAGDDAPRAVFPSIVGRPRHQGVMVGMGQKDSYVGDEAQSKRGILTLKYPIEHGIITNWDDMEKIWHHTFYNELRVAPEEHPTLLTEAPLNPKANREKMTQIMFETFNVPAMYVAIQAVLSLYASGRTTGIVLDSGDGVTHNVPIYEGYALPHAIMRLDLAGRDLTDYLMKILTERGYSFVTTAEREIVRDIKEKLCYVALDFENEMATAASSSSLEKSYELPDGQVITIGNERFRCPETLFQPSFIGMESAGIHETTYNSIMKCDIDIRKDLYANNVLSGGTTMYPGIADRMQKEITALAPSTMKIKIIAPPERKYSVWIGGSILASLSTFQQMWISKQEYDEAGPSIVHRKCF

SEQ ID NO: 153417 - protein, 342 aa, Artificial Sequence
  derived and/or modified sequence
MCDDEETTALVCDNGSGLVKAGFAGDDAPRAVFPSIVGRPRHQGVMVGMGQKDSYVGDEAQSKRGILTLKYPIEHGIITKANREKMTQIMFETFNVPAMYVAIQAVLSLYASGRTTGIVLDSGDGVTHNVPIYEGYALPHAIMRLDLAGRDLTDYLMKILTERGYSFVTTAEREIVRDIKEKLCYVALDFENEMATAASSSSLEKSYELPDGQVITIGNERFRCPETLFQPSFIGMESAGIHETTYNSIMKCDIDIRKDLYANNVLSGGTTMYPGIADRMQKEITALAPSTMKIKIIAPPERKYSVWIGGSILASLSTFQQMWISKQEYDEAGPSIVHRKCF

SEQ ID NO: 153418 - DNA, 1134 bp, Artificial Sequence
  derived and/or modified sequence
atgtgcgacgacgaggagaccaccgccctggtgtgcgacaacggcagcggcctggtgaaggccggcttcgccggcgacgacgcccccagagccgtgttccccagcatcgtgggcagacccagacaccagggcgtgatggtgggcatgggccagaaggacagctacgtgggcgacgaggcccagagcaagagaggcatcctgaccctgaagtaccccatcgagcacggcatcatcaccaactgggacgacatggagaagatctggcaccacaccttctacaacgagctgagagtggcccccgaggagcaccccaccctgctgaccgaggcccccctgaaccccaaggccaacagagagaagatgacccagatcatgttcgagaccttcaacgtgcccgccatgtacgtggccatccaggccgtgctgagcctgtacgccagcggcagaaccaccggcatcgtgctggacagcggcgacggcgtgacccacaacgtgcccatctacgagggctacgccctgccccacgccatcatgagactggacctggccggcagagacctgaccgactacctgatgaagatcctgaccgagagaggctacagcttcgtgaccaccgccgagagagagatcgtgagagacatcaaggagaagctgtgctacgtggccctggacttcgagaacgagatggccaccgccgccagcagcagcagcctggagaagagctacgagctgcccgacggccaggtgatcaccatcggcaacgagagattcagatgccccgagaccctgttccagcccagcttcatcggcatggagagcgccggcatccacgagaccacctacaacagcatcatgaagtgcgacatcgacatcagaaaggacctgtacgccaacaacgtgctgagcggcggcaccaccatgtaccccggcatcgccgacagaatgcagaaggagatcaccgccctggcccccagcaccatgaagatcaagatcatcgccccccccgagagaaagtacagcgtgtggatcggcggcagcatcctggccagcctgagcaccttccagcagatgtggatcagcaagcaggagtacgacgaggccggccccagcatcgtgcacagaaagtgcttctag

SEQ ID NO: 153419 - DNA, 1029 bp, Artificial Sequence
  derived and/or modified sequence
atgtgcgacgacgaggagaccaccgccctggtgtgcgacaacggcagcggcctggtgaaggccggcttcgccggcgacgacgcccccagagccgtgttccccagcatcgtgggcagacccagacaccagggcgtgatggtgggcatgggccagaaggacagctacgtgggcgacgaggcccagagcaagagaggcatcctgaccctgaagtaccccatcgagcacggcatcatcaccaaggccaacagagagaagatgacccagatcatgttcgagaccttcaacgtgcccgccatgtacgtggccatccaggccgtgctgagcctgtacgccagcggcagaaccaccggcatcgtgctggacagcggcgacggcgtgacccacaacgtgcccatctacgagggctacgccctgccccacgccatcatgagactggacctggccggcagagacctgaccgactacctgatgaagatcctgaccgagagaggctacagcttcgtgaccaccgccgagagagagatcgtgagagacatcaaggagaagctgtgctacgtggccctggacttcgagaacgagatggccaccgccgccagcagcagcagcctggagaagagctacgagctgcccgacggccaggtgatcaccatcggcaacgagagattcagatgccccgagaccctgttccagcccagcttcatcggcatggagagcgccggcatccacgagaccacctacaacagcatcatgaagtgcgacatcgacatcagaaaggacctgtacgccaacaacgtgctgagcggcggcaccaccatgtaccccggcatcgccgacagaatgcagaaggagatcaccgccctggcccccagcaccatgaagatcaagatcatcgccccccccgagagaaagtacagcgtgtggatcggcggcagcatcctggccagcctgagcaccttccagcagatgtggatcagcaagcaggagtacgacgaggccggccccagcatcgtgcacagaaagtgcttctag

SEQ ID NO: 153420 - DNA, 4106 bp, Artificial Sequence
  derived and/or modified sequence
attcaggctggcggggactagaccagaagggtgccctgtcctgggtgccccttttgcagccactcagatgtgctgctgcggtgtcctttgtgctggtggcagccctggaagatgagaagccgctgttgctcccctgctgccctggcccagctgtcaggacccctcagcagagggcagggcgccaagccttcccactgcatgtggcttattgtccccaaggctggcagggctgcggaggaccgaatccacagaccatccagggagcacccacaccccagaaagggggaggggtgggctggcgtcacttagtcttcccctgccccctacccttcagcgcctgcccctccccagctccctatttggccatccccctgactgccccctccccttccttacatggtctgggggctccctggctgatcctctcccctgcccttggctccatgaatggcctcggcagtcctagcgggtgcgaaggggaccaaataaggcaaggtggcagaccgggccccccacccctgcccccggctgctccaactgaccctgtccatcagcgttctataaagcggccctcctggagccagccacccagagcccgctgccgccggagccgagccgacccgccccgccgacgaaccccctgaagctgtgccaagatgtgtgacgacgaggagaccaccgccctggtgtgcgacaacggctctgggctggtgaaggccggctttgcgggcgatgacgcgccccgcgctgtcttcccgtccatcgtgggccgcccgcggcaccagggagttatggtgggtatgggtcagaaggactcctacgtaggtgatgaagcccagagcaagagaggcatcctgaccctgaagtatcccatcgagcatggtatcatcaccaactgggacgacatggagaagatctggcaccacaccttctacaatgagctccgtgtggctcccgaggagcaccccaccctgctcacagaggccccgctgaaccccaaggccaaccgggagaagatgactcagatcatgtttgagaccttcaatgtccctgccatgtacgtggccatccaggcagtgctatccctgtatgcttctggccgtaccacaggcattgttctggactctggggatggtgtaactcacaatgtccccatctatgagggctacgctttgccccatgccatcatgcgtctggatctggctggtcgggacctcactgactacctcatgaagatcctcactgagcgtggctactcctttgtcaccactgctgaacgtgaaattgtccgtgacattaaagagaagctgtgctatgtcgccctggattttgagaatgagatggccacagctgcctcttcctcctccctggagaagagctatgaactgcctgatggccaagtcatcactattggcaatgagcgcttccgctgtcctgagacactcttccagccctccttcattggtatggaatctgctggcatccatgaaacaacttacaatagcatcatgaagtgtgacattgatatccgcaaggacctgtatgccaacaatgtcttatctggaggcaccactatgtaccctggtattgctgatcgtatgcagaaggaaatcactgctctggctcctagcaccatgaagattaagattattgctccccctgagcgtaaatactctgtctggattgggggctccatcctggcctctctgtccaccttccagcaaatgtggattagcaagcaagagtacgatgaggcaggcccatccattgtccaccgcaaatgcttctaagatgccttctctctccatctaccttccagtcaggatgacggtattatgcttcttggagtcttccaaaccaccttccctcatctttcatcaatcattgtacagtttgtttacacacgtgcaatttgtttgtgcttctaatatttattgctttataaataaaccagaccaggacttgcaacctataaaagcctctcgtttgtttttggggtaggcgtggggtggggcaggtgtttgctttgacaccctgagcattgtcaaagttcagtaccacaaggttcatccagatgaattaatatgacagttagctgggagttataatgctaacttttgatttcatattttgagacagaatcatgaatatatttcatacctgaaaagcagattaaggtttagttccatataagtaagaaatgaaattgaataagatagttctctagaattagttgctgcagatgacactgaagattattttaacatatgttccagttgtttttgtaaccttgcagaaaatacacatatattgataatgagaaagtcaaagattattttaaatgaattggcttaacttttcaattctttgaactcttcaattttcttcctgggggctatgaaagaaacatgaaggttagctgacagttgggccagccacatcccattgcaaataccctctaaacatatcaagaccattgtgtgtgtgcaaaacaaatgtgaggaagcaggagccaaacacttctgcctgatcagtgactaacttgcgagacagaagccttcaatctcttcgtttctttgaaatcttgagatcttgggttgagtgaactgaaggctgcgaggtcctgagggagcaaggggaggcgagagccacagtgtttgctttgctctgtgcagagctctctgcaaagtatggtgggaaggctgctaggggcagcgttgaaaagaattgaatgtgttccatcctcgaggagttcacacacctacacataatcccccagtgcgtgtggcctggaggctttaaggagatgtatgtgggtctgggtcttagagaatggtcaggaattagggaggtgagaagagcagagaggacatctcagcagaaggaagtgtggcagaagccaggatacaagacatggggcaggctggtaggtgctgatgaattttagaaaatccactgggaaaggtagatttcaactagattgcagaagccttacagatttttgttttcaaattaattgccagtgaactgttagcattcacagaagtgtttgaatagacttaattgaattttattgatgaggattcaagacacagagattaagcaactggtgcaatgttataaactttatttgtggaatgtgctagacaggaactcagattttctgacacctactctgatggtgtctctaaaataatctttctaactttatagtttatcaagggtaaccccattctatcacatgccttttgagaatttgggttcaatatttggagtactctggactcatcagacatctttaataaattgtaatacattgccactgtcattcaaggtcctatgtgtgtctttttgcctattcataccaaaaatatcttttgatccctgactctgggtcgggcatagtattaagggcaggggacacaaagatgtatgagagcacattttctgtgaataaaaagctcagagtttagagttctgtatgtagcatattcaaatggaaggccttctatgcaataaaggctaaataatacatcaacttggtggcattttatttagataaggtgcaaacattattgtacatatgccccccgcccccaccaccccattgtatcctatagcacagttgaactggtttaaaagccatgcatggggaggtatgatttcactagtttttgtgtctctttcttttcctctgtacaattgagtgcataaatattatgaattgtatcctctgaacacagtattaatgctttaactgtagatgattggctggggtatcacctctggttctttccatctgtgattagaaatggagaggacatttttatttctatgtaaaagtagaagctttaagaatcagcttctgatatttatatcagaagaggtaagcacccagattcttgttgaattctgaggtcttctcatctttgcttgattatagggtataaagtattagaacaattgaatcttaaaaattgtgcttaaggaaggtactaagacaaaaatgtttgcttaaggtaatcttcatatgtatacaataactgagacatggatagtgcctacgtctttggttaaagtgcaataaacaaagaactatataaatt

SEQ ID NO: 153421 - DNA, 3588 bp, Artificial Sequence
  derived and/or modified sequence
tggctgatcctctcccctgcccttggctccatgaatggcctcggcagtcctagcgggtgcgaaggggaccaaataaggcaaggtggcagaccgggccccccacccctgcccccggctgctccaactgaccctgtccatcagcgttctataaagcggccctcctggagccagccacccagagcccgctgccgccggagccgagccgacccgccccgccgacgaaccccctgaagctgtgccaagatgtgtgacgacgaggagaccaccgccctggtgtgcgacaacggctctgggctggtgaaggccggctttgcgggcgatgacgcgccccgcgctgtcttcccgtccatcgtgggccgcccgcggcaccagggagttatggtgggtatgggtcagaaggactcctacgtaggtgatgaagcccagagcaagagaggcatcctgaccctgaagtatcccatcgagcatggtatcatcaccaaggccaaccgggagaagatgactcagatcatgtttgagaccttcaatgtccctgccatgtacgtggccatccaggcagtgctatccctgtatgcttctggccgtaccacaggcattgttctggactctggggatggtgtaactcacaatgtccccatctatgagggctacgctttgccccatgccatcatgcgtctggatctggctggtcgggacctcactgactacctcatgaagatcctcactgagcgtggctactcctttgtcaccactgctgaacgtgaaattgtccgtgacattaaagagaagctgtgctatgtcgccctggattttgagaatgagatggccacagctgcctcttcctcctccctggagaagagctatgaactgcctgatggccaagtcatcactattggcaatgagcgcttccgctgtcctgagacactcttccagccctccttcattggtatggaatctgctggcatccatgaaacaacttacaatagcatcatgaagtgtgacattgatatccgcaaggacctgtatgccaacaatgtcttatctggaggcaccactatgtaccctggtattgctgatcgtatgcagaaggaaatcactgctctggctcctagcaccatgaagattaagattattgctccccctgagcgtaaatactctgtctggattgggggctccatcctggcctctctgtccaccttccagcaaatgtggattagcaagcaagagtacgatgaggcaggcccatccattgtccaccgcaaatgcttctaagatgccttctctctccatctaccttccagtcaggatgacggtattatgcttcttggagtcttccaaaccaccttccctcatctttcatcaatcattgtacagtttgtttacacacgtgcaatttgtttgtgcttctaatatttattgctttataaataaaccagaccaggacttgcaacctataaaagcctctcgtttgtttttggggtaggcgtggggtggggcaggtgtttgctttgacaccctgagcattgtcaaagttcagtaccacaaggttcatccagatgaattaatatgacagttagctgggagttataatgctaacttttgatttcatattttgagacagaatcatgaatatatttcatacctgaaaagcagattaaggtttagttccatataagtaagaaatgaaattgaataagatagttctctagaattagttgctgcagatgacactgaagattattttaacatatgttccagttgtttttgtaaccttgcagaaaatacacatatattgataatgagaaagtcaaagattattttaaatgaattggcttaacttttcaattctttgaactcttcaattttcttcctgggggctatgaaagaaacatgaaggttagctgacagttgggccagccacatcccattgcaaataccctctaaacatatcaagaccattgtgtgtgtgcaaaacaaatgtgaggaagcaggagccaaacacttctgcctgatcagtgactaacttgcgagacagaagccttcaatctcttcgtttctttgaaatcttgagatcttgggttgagtgaactgaaggctgcgaggtcctgagggagcaaggggaggcgagagccacagtgtttgctttgctctgtgcagagctctctgcaaagtatggtgggaaggctgctaggggcagcgttgaaaagaattgaatgtgttccatcctcgaggagttcacacacctacacataatcccccagtgcgtgtggcctggaggctttaaggagatgtatgtgggtctgggtcttagagaatggtcaggaattagggaggtgagaagagcagagaggacatctcagcagaaggaagtgtggcagaagccaggatacaagacatggggcaggctggtaggtgctgatgaattttagaaaatccactgggaaaggtagatttcaactagattgcagaagccttacagatttttgttttcaaattaattgccagtgaactgttagcattcacagaagtgtttgaatagacttaattgaattttattgatgaggattcaagacacagagattaagcaactggtgcaatgttataaactttatttgtggaatgtgctagacaggaactcagattttctgacacctactctgatggtgtctctaaaataatctttctaactttatagtttatcaagggtaaccccattctatcacatgccttttgagaatttgggttcaatatttggagtactctggactcatcagacatctttaataaattgtaatacattgccactgtcattcaaggtcctatgtgtgtctttttgcctattcataccaaaaatatcttttgatccctgactctgggtcgggcatagtattaagggcaggggacacaaagatgtatgagagcacattttctgtgaataaaaagctcagagtttagagttctgtatgtagcatattcaaatggaaggccttctatgcaataaaggctaaataatacatcaacttggtggcattttatttagataaggtgcaaacattattgtacatatgccccccgcccccaccaccccattgtatcctatagcacagttgaactggtttaaaagccatgcatggggaggtatgatttcactagtttttgtgtctctttcttttcctctgtacaattgagtgcataaatattatgaattgtatcctctgaacacagtattaatgctttaactgtagatgattggctggggtatcacctctggttctttccatctgtgattagaaatggagaggacatttttatttctatgtaaaagtagaagctttaagaatcagcttctgatatttatatcagaagaggtaagcacccagattcttgttgaattctgaggtcttctcatctttgcttgattatagggtataaagtattagaacaattgaatcttaaaaattgtgcttaaggaaggtactaagacaaaaatgtttgcttaaggtaatcttcatatgtatacaataactgagacatggatagtgcctacgtctttggttaaagtgcaataaacaaagaactatataaatt

SEQ ID NO: 153422 - DNA, 1134 bp, Artificial Sequence
  derived and/or modified sequence
atgtgtgacgacgaagaaactaccgcattggtgtgtgacaacgggagcggcttagtaaaagctggttttgctggagatgacgctccccgagccgttttccccagtatcgtcggccgtcctcggcatcagggcgtcatggtgggaatgggccagaaagactcatacgtcggcgacgaagctcagagcaaaagggggatactaacgctcaaatatccgatcgagcacggaattattacaaattgggatgacatggagaagatttggcatcatacattctataacgagctccgtgtggccccagaagaacatcccacgctcttgacagaggcccccctgaatccaaaggctaaccgggagaaaatgacacaaatcatgttcgaaacattcaatgtgcccgcaatgtatgttgctattcaggctgtcctcagtctgtacgcgtcgggtagaacaaccggcatcgtgctcgacagcggcgatggcgtcacacacaacgtgccaatatacgagggatacgctctgcctcatgccattatgaggcttgacctcgctggcagggatctgacagattaccttatgaagattctgactgagcgcggctattcgtttgttacaaccgctgaaagggagatagtgagagacataaaggaaaaactgtgttacgtagcactcgatttcgaaaacgagatggctaccgctgccagttctagctctctggagaagagctacgagctgcccgatggacaggtcatcacaatcgggaatgaaaggttcagatgtcctgaaaccctgtttcagccatcattcattgggatggaaagtgcgggaattcatgaaaccacatataactcaatcatgaagtgcgatattgacattagaaaagacctctacgccaataatgtcctgtcaggcggcacaactatgtaccccggcattgctgatcggatgcaaaaggagatcaccgcattggcgccctctacgatgaaaattaaaatcattgctccgcccgagaggaagtactccgtgtggatagggggcagcattcttgcatcactctccacctttcagcagatgtggattagcaagcaggaatacgacgaggccgggcctagcatagtccacagaaagtgcttctag

SEQ ID NO: 153423 - DNA, 1029 bp, Artificial Sequence
  derived and/or modified sequence
atgtgcgatgatgaggagacgaccgccctcgtatgcgacaatggcagtggcctcgtgaaggccggcttcgctggcgatgatgcccccagggcagtctttcccagcatagtcggtcgaccccgccaccagggggtaatggtgggcatggggcagaaggattcatacgtgggcgacgaagcccaatcaaagcgtgggatccttacactgaaataccccatagaacatggaataattacaaaggctaaccgagaaaagatgacacagattatgtttgagaccttcaacgtccccgcgatgtatgttgccatacaggccgtgttaagtctttacgcttccggacggaccaccggcattgttctggatagcggtgacggtgttacacataatgtgcccatctatgaagggtatgctctcccccacgccatcatgcgcctggacctcgccgggcgggatctcaccgattaccttatgaaaatccttactgagagagggtacagctttgtgactaccgcagagcgtgagatagtaagggatataaaggagaagctctgttatgtcgccctagactttgaaaacgaaatggctaccgccgcaagttcctctagcctggaaaagtcttacgaactgcctgatggccaggtgatcacaatcggcaatgagcgcttccgctgcccagagacattattccagccgtccttcatcggaatggaatctgctggaattcacgagacgacttacaattcaatcatgaagtgtgacatagacatccggaaggacctatatgcgaataatgtgctcagcgggggaaccacgatgtatccgggcatagccgaccggatgcagaaggagattacagctctggctccaagtactatgaaaattaaaatcattgcacctcccgagcgtaaatacagcgtctggatcggtggcagcattcttgcaagcctgtctacgttccagcagatgtggatatcgaaacaagagtatgacgaagcaggaccttccattgttcacaggaaatgtttctag

SEQ ID NO: 153424 - DNA, 1134 bp, Artificial Sequence
  derived and/or modified sequence
atgtgtgatgatgaggagaccacagccctggtgtgtgacaatggcagcggcctggtgaaggccggctttgctggagatgatgcccccagggctgtgttccccagcatcgtgggccggcccaggcaccagggcgtgatggtgggcatgggccagaaggacagctatgtgggagatgaggcccagagcaagaggggcatcctgaccctgaagtaccccattgaacatggcatcatcaccaactgggatgacatggagaagatctggcaccacaccttctacaatgagctgcgggtggcccctgaggagcaccccaccctgctgacagaggcccccctgaaccccaaggccaaccgggagaagatgacccagatcatgtttgagaccttcaacgtgcctgccatgtatgtggccatccaggccgtgctgagcctgtatgccagcggccgcaccactggaattgtgctggacagcggagatggagtgacccacaacgtgcccatctatgagggctacgccctgccccacgccatcatgaggctggacctggccggccgggacctgacagactacctgatgaagatcctgacagagcggggctacagctttgtgaccacagctgagcgggagatcgtgcgggacatcaaggagaagctgtgctacgtggccctggactttgaaaatgagatggccacagctgccagcagcagcagcctggagaagagctatgagctgcctgatggccaggtgatcaccatcggaaatgaacgcttccgctgcccagagaccctcttccagcccagcttcatcggcatggagagcgctggcatccacgagaccacctacaacagcatcatgaagtgtgacatcgacatcaggaaggacctgtatgccaacaacgtgctgagcggcggcaccaccatgtacccaggcattgctgacaggatgcagaaggagatcacagccctggcccccagcaccatgaagatcaagatcatcgcccctcctgagaggaagtacagcgtgtggattggaggcagcatcctggccagcctgagcaccttccagcagatgtggatcagcaagcaggagtatgatgaagctggccccagcatcgtgcacaggaagtgcttctag

SEQ ID NO: 153425 - DNA, 1029 bp, Artificial Sequence
  derived and/or modified sequence
atgtgtgatgatgaggagaccacagccctggtgtgtgacaatggcagcggcctggtgaaggccggctttgctggagatgatgcccccagggctgtgttccccagcatcgtgggccggcccaggcaccagggcgtgatggtgggcatgggccagaaggacagctatgtgggagatgaggcccagagcaagaggggcatcctgaccctgaagtaccccattgaacatggcatcatcaccaaggccaaccgggagaagatgacccagatcatgtttgagaccttcaacgtgcctgccatgtatgtggccatccaggccgtgctgagcctgtatgccagcggccgcaccaccggcatcgtgctggacagcggagatggagtgacccacaacgtgcccatctatgagggctacgccctgccccacgccatcatgaggctggacctggccggccgggacctgacagactacctgatgaagatcctgacagagcggggctacagctttgtgaccacagctgagcgggagatcgtgcgggacatcaaggagaagctgtgctacgtggccctggactttgaaaatgagatggccacagctgccagcagcagcagcctggagaagagctatgagctgcctgatggccaggtgatcaccatcggaaatgaacgcttccgctgcccagagaccctcttccagcccagcttcatcggcatggagagcgctggcatccacgagaccacctacaacagcatcatgaagtgtgacatcgacatcaggaaggacctgtatgccaacaacgtgctgagcggcggcaccaccatgtacccaggcattgctgacaggatgcagaaggagatcacagccctggcccccagcaccatgaagatcaagatcatcgcccctcctgagaggaagtacagcgtgtggattggaggcagcatcctggccagcctgagcaccttccagcagatgtggatcagcaagcaggagtatgatgaggccggccccagcatcgtgcacaggaagtgcttctag

SEQ ID NO: 153426 - DNA, 1134 bp, Artificial Sequence
  derived and/or modified sequence
atgtgcgacgacgaggagaccaccgccctggtgtgcgacaacggctccggtctcgtgaaggcagggtttgcaggagacgacgctcccagggcagtgttcccttcaattgtgggaaggcctcgacaccagggtgtaatggtgggcatgggccagaaggactcctacgtgggggatgaggcccagagtaaacgtggcatcctgactttgaaataccctatagagcatggtatcataacaaactgggatgacatggagaaaatttggcaccatactttctataatgagctcagagtggccccggaggagcacccgaccctcttgaccgaggcccctctcaatcctaaggcaaaccgcgaaaaaatgacccaaattatgtttgaaacatttaatgtgccagccatgtacgttgcaatccaggcagtgctttcactttatgcttcaggcaggaccaccggaattgtccttgacagtggcgatggcgtgacccacaatgtccccatatatgagggctatgcactgccacacgcaatcatgcgcctagatctggccgggagggatttaaccgactacctcatgaaaattctgaccgaacgtgggtactcttttgtaactacagcagagagggagatcgtgagggatataaaagaaaaactgtgttatgttgctttagacttcgagaacgagatggcgactgccgcatcttcaagcagcctggagaaatcttatgagttacctgacggacaggtgatcacgattggaaacgagcgatttaggtgtcctgagaccctgttccagcccagcttcattggcatggaatctgccgggatccacgaaaccacctacaacagcattatgaaatgcgatatcgatattaggaaggacttgtacgcaaacaacgttctgtccggaggcacgacaatgtatcccggcatcgcagatagaatgcagaaggagatcactgccctcgctcccagcaccatgaaaatcaagattatagcccctccggagcgcaagtacagcgtgtggattgggggcagcatcctggcctccctgtccacttttcaacaaatgtggatatctaaacaggagtatgacgaggccgggccttccatcgtacaccgaaagtgtttttag

SEQ ID NO: 153427 - DNA, 1029 bp, Artificial Sequence
  derived and/or modified sequence
atgtgcgacgacgaggagaccaccgccctggtgtgcgacaacggcagcgggctggtaaaggctggattcgctggcgatgacgcccctcgggccgtctttccctcgatcgtgggtaggccacgccaccaaggggtgatggtagggatgggtcagaaggacagctacgtgggggacgaggctcagtctaagaggggcatcctcaccttgaaataccccatagaacacggaatcattactaaagcaaatagggagaagatgacacagattatgtttgaaacgtttaacgtgcccgctatgtacgtcgccattcaggcagtgcttagcctgtacgccagcggtcggactacggggattgtgttggactcaggcgacggcgtaacccacaatgtccctatctatgagggctatgctctacctcatgccattatgcggctagatctcgctggaagggacctcacagactatctgatgaagattctaacagaacgcggctattcattcgttaccaccgcagagcgtgagattgtgagagacattaaagagaagctgtgttacgtggccttggacttcgaaaatgaaatggcaaccgccgcctcctcaagtagtctcgagaagtcttacgaactgcccgatggccaggtaataacaatcggaaatgaacgcttcaggtgtccagagacgctctttcagcctagttttataggcatggagagcgcaggaattcacgagactacctataactctatcatgaagtgcgacatagacataagaaaggatttgtacgccaacaatgttctgagcggaggcactaccatgtaccccggaatcgcggacaggatgcagaaggagataaccgcactggctccttccacaatgaagattaagattattgcaccaccagagcgaaagtactcggtttggattggagggagtatactcgcttctttaagtactttccagcaaatgtggataagcaagcaggagtacgacgaagccggaccatccatcgtacatcggaagtgtttttag

SEQ ID NO: 153428 - DNA, 1134 bp, Artificial Sequence
  derived and/or modified sequence
atgtgcgacgatgaagagacaactgcgctcgtatgcgataacgggagcggtctagtcaaggctggcttcgccggtgatgacgctcccagggctgtcttcccctcaatagtgggccgacccaggcaccaaggagtgatggtcgggatgggacagaaagattcttatgtgggtgatgaggcacagtcgaaacgtggaattctgacactgaagtatcctatcgagcacggaatcataacaaattgggatgatatggagaagatctggcaccacacgttttacaatgagctaagggtggcacctgaagagcaccctaccctgctcaccgaggcacccctgaaccctaaggccaaccgggagaagatgactcagattatgttcgagacattcaatgtccccgctatgtacgtcgccattcaggccgtgctctcactctatgcttcagggagaacaaccggcatcgtattagactctggtgacggagtgactcacaatgtgcccatttacgagggctacgccctgccccacgctatcatgaggcttgatctagcgggacgcgacttgaccgactacctcatgaagatactgactgagcgtggatattcatttgtgaccacggcagagagagaaattgtacgtgatattaaagaaaaattatgttacgtggccctggacttcgagaacgaaatggcaacggccgcttcctcgtctagtcttgagaagtcctatgagctaccagacgggcaggtgatcactattgggaacgaacggttccgatgtccggaaacactgtttcagccttctttcatagggatggaatcagcaggcattcacgagaccacctataattcgattatgaagtgcgacatcgacattcggaaagacctgtatgcgaacaacgtcctatcaggtggcactactatgtaccccggtatcgccgatagaatgcaaaaagagattaccgcacttgccccttccacaatgaagatcaagattattgcacctccagagcgaaagtacagtgtgtggatcggtggcagcatcctcgcctctttgagcaccttccagcagatgtggattagtaaacaggagtatgatgaagctggaccttctatcgtgcaccgaaaatgtttctag

SEQ ID NO: 153429 - DNA, 1029 bp, Artificial Sequence
  derived and/or modified sequence
atgtgcgatgacgaagagactaccgctttggtctgcgataacggctcaggcctagtgaaggccggattcgctggtgacgatgcccctcgcgcagtgtttccttcaatcgtgggtagacccaggcatcagggcgtgatggtgggaatgggacaaaaggatagctacgtgggagacgaggcgcagtccaagagaggaattttaacacttaagtaccctattgagcacggtataataaccaaagccaatagagagaagatgactcagatcatgtttgagacctttaatgtacctgctatgtacgtcgcgattcaagccgtgctttcactctacgcatcaggcagaaccacaggcattgtcctggactccggggacggagtaacccacaacgtgcctatttatgagggctacgccttgccccacgccatcatgcgcttagatctcgccggaagggacctaactgactatctgatgaagatcctgaccgagagggggtactccttcgtgacaacagccgagcgggaaatcgtgagggacatcaaggaaaaactctgctacgttgcactcgacttcgagaacgaaatggcgaccgcagctagcagcagtagccttgagaagtcttacgaattaccagatggccaagttatcaccatcgggaacgagaggtttcgatgtcctgagaccctgttccaaccctcgttcatcgggatggagagcgcaggcatccacgagacgacttataacagcataatgaagtgcgacattgatattcgaaaggacttatatgccaataatgtgctatccggaggtacaacaatgtaccccggaatcgcggataggatgcagaaagagattactgccctggctccgtccacaatgaagataaagataatcgctcctcctgagagaaagtactcggtctggatcggaggttccatactagccagtttatcgacgttccaacagatgtggataagcaagcaagaatatgacgaggccggtccttccatcgtccaccgcaagtgcttctag

SEQ ID NO: 153430 - protein, 688 aa, Artificial Sequence
  derived and/or modified sequence
MADLEAVLADVSYLMAMEKSKATPAARASKRIVLPEPSIRSVMQKYLAERNEITFDKIFNQKIGFLLFKDFCLNEINEAVPQVKFYEEIKEYEKLDNEEDRLCRSRQIYDAYIMKELLSCSHPFSKQAVEHVQSHLSKKQVTSTLFQPYIEEICESLRGDIFQKFMESDKFTRFCQWKNVELNIHLTMNEFSVHRIIGRGGFGEVYGCRKADTGKMYAMKCLDKKRIKMKQGETLALNERIMLSLVSTGDCPFIVCMTYAFHTPDKLCFILDLMNGGDLHYHLSQHGVFSEKEMRFYATEIILGLEHMHNRFVVYRDLKPANILLDEHGHARISDLGLACDFSKKKPHASVGTHGYMAPEVLQKGTAYDSSADWFSLGCMLFKLLRGHSPFRQHKTKDKHEIDRMTLTVNVELPDTFSPELKSLLEGLLQRDVSKRLGCHGGGSQEVKEHSFFKGVDWQHVYLQKYPPPLIPPRGEVNAADAFDIGSFDEEDTKGIKLLDCDQELYKNFPLVISERWQQEVTETVYEAVNADTDKIEARKRAKNKQLGHEEDYALGKDCIMHGYMLKLGNPFLTQWQRRYFYLFPNRLEWRGEGESRQNLLTMEQILSVEETQIKDKKCILFRIKGGKQFVLQCESDPEFVQWKKELNETFKEAQRLLRRAPKFLNKPRSGTVELPKPSLCHRNSNGL

SEQ ID NO: 153431 - protein, 387 aa, Artificial Sequence
  derived and/or modified sequence
MADLEAVLADVSYLMAMEKSKATPAARASKRIVLPEPSIRSVMQKYLAERNEITFDKIFNQKIGFLLFKDFCLNEINEAVPQVKFYEEIKEYEKLDNEEDRLCRSRQIYDAYIMKELLSCSHPFSKQAVEHVQSHLSKKQVTSTLFQPYIEEICESLRGDIFQKFMESDKFTRFCQWKNVELNIHLTMNEFSVHRIIGRGGFGEVYGCRKADTGKMYAMKCLDKKRIKMKQGETLALNERIMLSLVSTGDCPFIVCMTYAFHTPDKLCFILDLMNGGDLHYHLSQHGVFSEKEMRFYATEIILGLEHMHNRFVVYRDLKPANILLDEHGHARISDLGLACDFSKKKPHASVGTHGYMAPEVLQKGTAYDSSADWFSLGCMLFKLLRG

SEQ ID NO: 153432 - DNA, 2067 bp, Artificial Sequence
  derived and/or modified sequence
atggccgatcttgaggcagtactcgccgatgtttcctacctgatggcaatggagaagtcaaaggctactcctgctgcacgggcctctaagcgcattgtgttgcctgagccctctatacggagtgtgatgcaaaaatacctggcagagagaaacgaaattacattcgataaaatatttaaccagaagatcggctttctgctgtttaaagacttttgcctgaatgagatcaatgaagcagtaccccaggtgaagttctatgaagagatcaaggagtatgagaagctcgacaatgaagaggacaggttatgtagaagcagacagatttacgatgcttacataatgaaggagctccttagttgcagccatccattttcaaaacaggcggtagagcatgtacagagtcacctttcaaagaagcaagtgacctcgaccctgttccaaccatatatcgaagaaatatgcgaaagtctacgcggcgatatcttccagaaattcatggaaagtgacaagtttacacggttctgccaatggaagaacgtggaactcaatatacacctcacaatgaacgagttctccgtgcacaggataattggtcgcggaggctttggcgaggtgtacggatgtcgaaaggctgacaccggcaagatgtacgccatgaaatgtctcgacaagaagcgtatcaagatgaaacagggagaaaccctcgctctgaatgagagaattatgctcagtctggtctccaccggagattgtcccttcatagtttgcatgacatatgcattccatactcccgataaactgtgtttcatcctggatttgatgaatgggggagatttgcattaccacctctcacaacatggagtgttttctgagaaggagatgcgcttctacgcgactgaaatcattctaggtctggagcacatgcataatcgatttgtggtttaccgggatcttaaaccagccaacatccttttggatgaacacggacatgcccggatatctgacctgggtttggcttgtgacttcagcaagaagaaaccccacgcctcagtgggcactcacgggtacatggcgcccgaggtgctgcagaaagggactgcctacgactctagcgccgactggttcagcttaggctgcatgctattcaaactgctccggggtcacagtccatttcgccagcataagactaaggacaaacacgagatcgaccgtatgaccctgaccgtgaacgttgagctccccgatacattctctcctgagctgaaaagtctgctggagggacttctacaacgcgacgtgtcgaagcgcctcggatgccatggaggaggatcccaggaagtaaaagaacactcctttttcaagggggtggactggcagcatgtgtacctccagaagtatcctccaccattgattccacctagaggagaggtcaatgcagcggacgccttcgatatcggtagtttcgacgaggaggatactaagggcattaagctactggattgtgatcaggagctgtataagaactttcccttagtgatctctgagaggtggcagcaggaggtcactgagactgtgtacgaagctgttaacgcggacacagacaaaattgaggcacgaaaaagagcaaagaataaacaactggggcacgaagaagattacgcccttggtaaggactgcataatgcacgggtacatgctaaaacttggtaacccgtttttaactcagtggcagcggcgctatttttatctcttcccaaatcggctagaatggagaggggagggcgagagtcgccaaaatttgctgactatggaacaaatactgagcgtagaagagacccaaataaaggataaaaaatgcattttgtttcggatcaagggaggaaaacaatttgtgctgcagtgtgagtcggatcccgagtttgtccagtggaaaaaggaactgaatgagaccttcaaggaggctcaacggttgctgcgacgcgctcctaagtttttgaataagccacgcagtgggacggttgagctgcccaagccaagcttgtgccacagaaattcgaatggtctatag

SEQ ID NO: 153433 - DNA, 1164 bp, Artificial Sequence
  derived and/or modified sequence
atggcagacctcgaagctgtactggcagatgtgtcttatctgatggccatggaaaaatctaaagcgactccagctgcgcgcgcgtctaagaggatcgtgctccccgaaccctcaatcaggagcgtcatgcagaagtatctggccgagagaaatgagatcacatttgacaaaatctttaatcaaaaaattggctttctcctgttcaaagacttttgcctgaatgagattaacgaggccgtgccccaggtgaagttctacgaagagatcaaagagtacgagaaactggataacgaggaggaccgactatgccgatctaggcagatctacgacgcttacataatgaaagaattactttcctgcagtcatccattcagcaaacaggcagtcgagcatgtccaaagtcatctgagcaaaaaacaagtcacaagcactctgtttcagccctatatcgaggaaatatgcgagagtctcagaggcgatatattccagaagttcatggagtccgacaagtttactaggttttgccagtggaagaatgtcgaacttaatatccacttgacgatgaacgagttcagcgtccacaggattataggccgcggagggttcggcgaagtgtacgggtgtcgaaaggctgacaccggcaagatgtatgccatgaagtgcttggataagaagcgcattaaaatgaagcagggggaaacgttggctctgaacgaacggataatgttgagcctggtgagcaccggcgattgcccctttattgtgtgcatgacttatgcattccatacccccgacaagctttgcttcatcctggaccttatgaatgggggggaccttcactaccatctgtctcaacatggggttttctcagaaaaggaaatgagattttacgccactgaaatcatactgggcttggaacatatgcataacaggttcgtagtatatcgggaccttaaacctgctaacatcctgcttgatgaacacggacatgctaggatctccgacctcgggcttgcctgcgacttctccaagaaaaaacctcacgccagcgtgggcactcacggatatatggcaccggaggtgctgcagaaaggaacggcctacgattcttctgccgactggttctcactgggctgtatgctcttcaagctgttgagaggctag

SEQ ID NO: 153434 - DNA, 2443 bp, Artificial Sequence
  derived and/or modified sequence
ggccggctacagcctgcggcgcgcgcagagcgctagtggggcgcgcggcgcgcgcgcggggcgggggcgcgcggaggggggggctgccccggggcggcccccccaggtcggggcgcggcgggcggcggcggcgggcgcgcgtcccgtccaggtccggagtaaccgccgccgccgccgccaaagctcgccaacatggcggacctggaggctgtgctggccgatgtcagttacctgatggccatggagaagagcaaggcgaccccggccgcccgcgccagcaagaggatcgtcctgccggagcccagtatccggagtgtgatgcagaagtaccttgcagagagaaatgaaataacctttgacaagattttcaatcagaaaattggtttcttgctatttaaagatttttgtttgaatgaaattaatgaagctgtacctcaggtgaagttttatgaagagataaaggaatatgaaaaacttgataatgaggaagaccgcctttgcagaagtcgacaaatttatgatgcctacatcatgaaggaacttctttcctgttcacatcctttctcaaagcaagctgtagaacacgtacaaagtcatttatccaagaaacaagtgacatcaactctttttcagccatacatagaagaaatttgtgaaagccttcgaggtgacatttttcaaaaatttatggaaagtgacaagttcactagattttgtcagtggaaaaacgttgaattaaatatccatttgaccatgaatgagttcagtgtgcataggattattggacgaggaggattcggggaagtttatggttgcaggaaagcagacactggaaaaatgtatgcaatgaaatgcttagataagaagaggatcaaaatgaaacaaggagaaacattagccttaaatgaaagaatcatgttgtctcttgtcagcacaggagactgtcctttcattgtatgtatgacctatgccttccataccccagataaactctgcttcatcctggatctgatgaacgggggcgatttgcactaccacctttcacaacacggtgtgttctctgagaaggagatgcggttttatgccactgaaatcattctgggtctggaacacatgcacaatcggtttgttgtctacagagatttgaagccagcaaatattctcttggatgaacatggacacgcaagaatatcagatcttggtcttgcctgcgatttttccaaaaagaagcctcatgcgagtgttggcacccatgggtacatggctcccgaggtgctgcagaaggggacggcctatgacagcagtgccgactggttctccctgggctgcatgcttttcaaacttctgagaggtcacagccctttcagacaacataaaaccaaagacaagcatgaaattgaccgaatgacactcaccgtgaatgtggaacttccagacaccttctctcctgaactgaagtcccttttggagggcttgcttcagcgagacgttagcaagcggctgggctgtcacggaggcggctcacaggaagtaaaagagcacagctttttcaaaggtgttgactggcagcatgtctacttacaaaagtacccaccacccttgattcctccccggggagaagtcaatgctgctgatgcctttgatattggctcatttgatgaagaggataccaaagggattaagctacttgattgcgaccaagaactctacaagaacttccctttggtcatctctgaacgctggcagcaagaagtaacggaaacagtttatgaagcagtaaatgcagacacagataaaatcgaggccaggaagagagctaaaaataagcaacttggccacgaagaagattacgctctggggaaggactgtattatgcacgggtacatgctgaaactgggaaacccatttctgactcagtggcagcgtcgctatttttacctctttccaaatagacttgaatggagaggagagggagagtcccggcaaaatttactgacaatggaacagattctctctgtggaagaaactcaaattaaagacaaaaaatgcattttgttcagaataaaaggagggaaacaatttgtcttgcaatgtgagagtgatccagagtttgtgcagtggaagaaagagttgaacgaaaccttcaaggaggcccagcggctattgcgtcgtgccccgaagttcctcaacaaacctcggtcaggtactgtggagctcccaaagccatccctctgtcacagaaacagcaacggcctctagcacccagaaacagggagggtcctcgaggaggacacaccagggtctcagccttttggggtgaacgaggatgaggcatctgatctattcgctaccgggactcctccaggctcccgagaggagtcgggacccttcggcttggggtcagctcagctccctgccttgtcacatttgtctgcattagaaa

SEQ ID NO: 153435 - DNA, 2873 bp, Artificial Sequence
  derived and/or modified sequence
ggggcgcgcggaggggggggctgccccggggcggcccccccaggtcggggcgcggcgggcggcggcgccgccgccaaagctcgccaacatggcggacctggaggctgtgctggccgatgtcagttacctgatggccatggagaagagcaaggcgaccccggccgcccgcgccagcaagaggatcgtcctgccggagcccagtatccggagtgtgatgcagaagtaccttgcagagagaaatgaaataacctttgacaagattttcaatcagaaaattggtttcttgctatttaaagatttttgtttgaatgaaattaatgaagctgtacctcaggtgaagttttatgaagagataaaggaatatgaaaaacttgataatgaggaagaccgcctttgcagaagtcgacaaatttatgatgcctacatcatgaaggaacttctttcctgttcacatcctttctcaaagcaagctgtagaacacgtacaaagtcatttatccaagaaacaagtgacatcaactctttttcagccatacatagaagaaatttgtgaaagccttcgaggtgacatttttcaaaaatttatggaaagtgacaagttcactagattttgtcagtggaaaaacgttgaattaaatatccatttgaccatgaatgagttcagtgtgcataggattattggacgaggaggattcggggaagtttatggttgcaggaaagcagacactggaaaaatgtatgcaatgaaatgcttagataagaagaggatcaaaatgaaacaaggagaaacattagccttaaatgaaagaatcatgttgtctcttgtcagcacaggagactgtcctttcattgtatgtatgacctatgccttccataccccagataaactctgcttcatcctggatctgatgaacgggggcgatttgcactaccacctttcacaacacggtgtgttctctgagaaggagatgcggttttatgccactgaaatcattctgggtctggaacacatgcacaatcggtttgttgtctacagagatttgaagccagcaaatattctcttggatgaacatggacacgcaagaatatcagatcttggtcttgcctgcgatttttccaaaaagaagcctcatgcgagtgttggcacccatgggtacatggctcccgaggtgctgcagaaggggacggcctatgacagcagtgccgactggttctccctgggctgcatgcttttcaaacttctgagaggatgaagaattgatactgaaggtttctatgtggctgacagtcactaaaccaacaagtcacaacttgaacccagcttttctgactctggagtcgggttctgcacagggaaaacaggaagcgctcagagctgtggagaatctgctggtgcacgtcacagccctttcagacaacataaaaccaaagacaagcatgaaattgaccgaatgacactcaccgtgaatgtggaacttccagacaccttctctcctgaactgaagtcccttttggagggcttgcttcagcgagacgttagcaagcggctgggctgtcacggaggcggctcacaggaagtaaaagagcacagctttttcaaaggtgttgactggcagcatgtctacttacaaaagtacccaccacccttgattcctccccggggagaagtcaatgctgctgatgcctttgatattggctcatttgatgaagaggataccaaagggattaagctacttgattgcgaccaagaactctacaagaacttccctttggtcatctctgaacgctggcagcaagaagtaacggaaacagtttatgaagcagtaaatgcagacacagataaaatcgaggccaggaagagagctaaaaataagcaacttggccacgaagaagattacgctctggggaaggactgtattatgcacgggtacatgctgaaactgggaaacccatttctgactcagtggcagcgtcgctatttttacctctttccaaatagacttgaatggagaggagagggagagtcccggcaaaatttactgacaatggaacagattctctctgtggaagaaactcaaattaaagacaaaaaatgcattttgttcagaataaaaggagggaaacaatttgtcttgcaatgtgagagtgatccagagtttgtgcagtggaagaaagagttgaacgaaaccttcaaggaggcccagcggctattgcgtcgtgccccgaagttcctcaacaaacctcggtcaggtactgtggagctcccaaagccatccctctgtcacagaaacagcaacggcctctagcacccagaaacagggagggtcctcgaggaggacacaccagggtctcagccttttggggtgaacgaggatgaggcatctgatctattcgctaccgggactcctccaggctcccgagaggagtcgggacccttcggcttggggtcagctcagctccctgccttgtcacatttgtctgcattagaaactactgaagaaataaaagttctttttctttgctacacactttggtacctatgaacctagaacttgaagtgactcctacttatcacgtaaatttttatgtctgatatcaaacacatcttagactccccagaatggaatttaaagatgttcagtgttgggtaacagattgccctaagcattgccacatattctgtctagtcactgctgattttctatgtctttgctccatactgctgggggatgggagagccacagtgtgtttcttttgtgcacttcgcaactgacttcttgtcctggggttaaaagttgaagatattttctgatgatattaaaagttgaagatatttctgcacttgggccctcctctgggagccgcacccacatg

SEQ ID NO: 153436 - DNA, 2067 bp, Artificial Sequence
  derived and/or modified sequence
atggctgacctggaggccgtgctggctgatgtgtcctacctgatggccatggagaagagcaaggccaccccagctgcccgggccagcaagagaattgtgctgcctgagcccagcatccgctctgtgatgcagaagtacctggccgagagaaatgagatcacctttgacaagatcttcaaccagaagattggcttcctgctcttcaaggacttctgcctgaatgagatcaatgaagctgtgccccaggtgaagttctatgaggagatcaaggagtatgagaagctggacaatgaagaagatcggctgtgccgcagccggcagatctatgatgcctacatcatgaaggagctgctgagctgcagccaccccttcagcaagcaggccgtggagcacgtgcagagccacctgagcaagaagcaggtgaccagcaccctcttccagccctacatcgaggagatctgtgagagcctgcggggggacatcttccagaagttcatggagagtgacaagttcacccgcttctgccagtggaagaatgtggagctgaacatccacctgaccatgaatgagttctctgtgcaccgcatcatcggccggggcggctttggagaggtgtatggctgcaggaaggctgacaccgggaagatgtatgccatgaagtgcctggacaagaagaggatcaagatgaagcagggcgagaccctggccctgaatgaaagaatcatgctgagcctggtgtccactggagactgccccttcatcgtgtgcatgacctacgccttccacaccccagacaagctgtgcttcatcctggacctgatgaatggaggagacctgcactaccacctgagccagcacggcgtcttcagcgagaaggagatgaggttctacgccacagagatcatcctgggcctggagcacatgcacaacagatttgtggtgtacagagacctgaagccagccaacatcctgctggatgagcacggccacgcccgcatcagtgacctgggcctggcctgtgacttcagcaagaagaagccccacgcctctgtgggcacccacggctacatggcccctgaggtgctgcagaagggcacagcctatgacagcagcgctgactggttcagcctgggctgcatgctgttcaagctgctgcggggccacagccccttccggcagcacaagaccaaggacaagcatgaaattgacaggatgaccctgactgtgaatgtggagctgcctgacaccttcagccctgagctgaagagcctgctggagggcctgctgcagagagatgtgtccaagaggctgggctgccacggcggcggcagccaggaggtgaaggagcacagcttcttcaagggcgtggactggcagcacgtgtacctgcagaagtaccccccacccctcatccccccaagaggagaggtgaatgctgctgatgcctttgatattggcagctttgatgaggaggacaccaagggcatcaagctgctggactgtgaccaggagctgtacaagaacttccccctggtgatcagcgagcgctggcagcaggaggtgacagagaccgtgtatgaggccgtgaatgctgacacagacaagattgaggccaggaagagggccaagaacaagcagctgggccatgaagaagattatgccctgggcaaggactgcatcatgcacggctacatgctgaagctgggcaaccccttcctgacccagtggcagaggcgctacttctacctgttccccaaccggctggagtggagaggagagggggagagccggcagaacctgctgaccatggagcagatcctgtctgtggaggagacccagatcaaggacaagaagtgcatcctcttccgcatcaagggcggcaagcagtttgtgctgcagtgtgagagtgaccctgagtttgtgcagtggaagaaggagctgaatgagaccttcaaggaggcccagaggctgctgcggcgggcccccaagttcctgaacaagcccaggagcggcaccgtggagctgcccaagcccagcctgtgccacaggaacagcaatggcctgtag

SEQ ID NO: 153437 - DNA, 1164 bp, Artificial Sequence
  derived and/or modified sequence
atggctgacctggaggccgtgctggctgatgtgtcctacctgatggccatggagaagagcaaggccaccccagctgcccgggccagcaagagaattgtgctgcctgagcccagcatccgctctgtgatgcagaagtacctggccgagagaaatgagatcacctttgacaagatcttcaaccagaagattggcttcctgctcttcaaggacttctgcctgaatgagatcaatgaagctgtgccccaggtgaagttctatgaggagatcaaggagtatgagaagctggacaatgaagaagatcggctgtgccgcagccggcagatctatgatgcctacatcatgaaggagctgctgagctgcagccaccccttcagcaagcaggccgtggagcacgtgcagagccacctgagcaagaagcaggtgaccagcaccctcttccagccctacatcgaggagatctgtgagagcctgcggggggacatcttccagaagttcatggagagtgacaagttcacccgcttctgccagtggaagaatgtggagctgaacatccacctgaccatgaatgagttctctgtgcaccgcatcatcggccggggcggctttggagaggtgtatggctgcaggaaggctgacaccgggaagatgtatgccatgaagtgcctggacaagaagaggatcaagatgaagcagggcgagaccctggccctgaatgaaagaatcatgctgagcctggtgtccactggagactgccccttcatcgtgtgcatgacctacgccttccacaccccagacaagctgtgcttcatcctggacctgatgaatggaggagacctgcactaccacctgagccagcacggcgtcttcagcgagaaggagatgaggttctacgccacagagatcatcctgggcctggagcacatgcacaacagatttgtggtgtacagagacctgaagccagccaacatcctgctggatgagcacggccacgcccgcatcagtgacctgggcctggcctgtgacttcagcaagaagaagccccacgcctctgtgggcacccacggctacatggcccctgaggtgctgcagaagggcacagcctatgacagcagcgctgactggttcagcctgggctgcatgctgttcaagctgctgcggggctag

SEQ ID NO: 153438 - DNA, 2067 bp, Artificial Sequence
  derived and/or modified sequence
atggccgacctggaggccgtgctggccgacgtgagctacctgatggctatggagaagagtaaagccacacctgctgcacgcgcttcaaaacgcatcgtcctccccgagccgagtatccggtccgtcatgcagaagtatctggccgagaggaatgagattacgtttgacaagatattcaatcagaagataggcttcttgctttttaaagacttctgcttaaatgaaatcaacgaggcagtgcctcaagttaaattctacgaggaaattaaggaatacgaaaaacttgacaacgaagaggatcgactgtgtagaagcaggcaaatatacgacgcgtacatcatgaaagaactgctgtcatgttcacaccctttcagcaagcaagctgtggaacacgtgcagtcccacttaagcaagaagcaggtcacaagcaccctttttcagccctatatcgaagagatctgcgagtcactccgaggtgacatcttccagaaattcatggaatccgacaaatttacccgtttctgtcagtggaagaacgtcgagcttaacatccatctgacaatgaatgaatttagcgtgcacaggatcatcgggaggggaggcttcggcgaggtgtacggttgccgaaaggccgacactggcaaaatgtacgctatgaaatgcttggacaagaagcggatcaagatgaaacagggagaaacattggctttaaacgaacgcattatgctttcccttgtgtcaactggtgattgtccgttcatcgtctgcatgacatatgccttccacactccggataaactttgtttcatcctggacttaatgaatgggggcgatctccactatcacctgagccaacatggggtattctccgaaaaagagatgagattctacgccacggagattattctcgggctcgaacatatgcacaaccgatttgtagtatacagagatttaaagcctgcgaacattttacttgacgaacacggccacgcaagaatctccgacctcggcctggcttgcgatttctccaaaaaaaaaccacacgcaagcgtcggcacccatggatacatggcaccagaggtgttacagaagggaactgcgtacgatagcagtgccgactggttttcacttgggtgcatgctatttaagttgttaagaggccattccccgttccggcagcataagaccaaggacaagcacgagatcgaccgcatgaccctcacagtaaacgttgagctgccggatacgttcagtccagaattgaagtcattgctggagggccttctccagagagatgtgtccaagcggttagggtgccacggaggaggaagccaagaagttaaagaacactcgttttttaaaggagtggattggcagcatgtttatctgcagaaatatcccccccctctcattcctccccgcggcgaggtcaatgccgccgatgctttcgacattggatccttcgatgaagaagataccaaaggcatcaagttgttggactgtgatcaggaattgtataagaattttccactggttatcagcgagcgatggcaacaggaggtgactgagactgtgtatgaggcagtgaacgctgataccgataagatcgaggctaggaaaagagccaagaacaagcaactggggcatgaagaagactatgcacttggcaaggactgtattatgcatggatacatgctcaaattgggcaatccgttccttacccaatggcagagacgttacttttatctgttccctaatagactggaatggcggggcgagggagagagccgccaaaatctcctgaccatggagcagattctgtccgttgaagagacccagatcaaggacaagaagtgcattttattccggatcaagggagggaagcaattcgtgcttcagtgtgagtccgatccagagtttgtgcagtggaagaaagagcttaatgaaaccttcaaggaggcccagaggctgctgagacgggccccaaagttcctgaacaagccacgcagtggtactgttgagctccctaagccatccttatgtcacaggaacagcaatggcctgtag

SEQ ID NO: 153439 - DNA, 1164 bp, Artificial Sequence
  derived and/or modified sequence
atggccgacctggaggccgtgctggccgacgtgagctacctgatggccatggagaagagcaaggctacccccgcagccagagcttcgaaaaggatagtgctgccagaaccctcaatcagatctgttatgcagaaatatctggcagaacgaaatgagatcacctttgacaagatctttaatcagaagatcgggtttctccttttcaaggacttctgtctgaatgagattaatgaggcagtgccccaggtgaagttctacgaagagattaaggaatatgagaaactcgacaacgaggaagatcggctgtgtaggtctaggcagatatatgatgcctatataatgaaggagcttttatcatgttctcacccattctcaaagcaggcggtggagcatgtgcagtcacacctgtccaagaaacaggtcacatcaactttgtttcagccttacattgaagagatctgcgagagcctcaggggtgatatcttccagaagttcatggaatctgacaaattcacgcggttttgtcaatggaagaacgttgagctgaacattcacttaacaatgaacgagttttccgttcacagaattattggacggggcggcttcggcgaggtgtacggatgtcgaaaggccgatactggcaagatgtatgccatgaagtgcctggacaagaagcgcatcaaaatgaaacaaggcgagacactggcactaaatgagcgcatcatgttgtctctggtatctaccggcgattgccccttcatagtgtgcatgacctacgcttttcacacaccagataagctttgtttcatcctcgacctgatgaacgggggagatttacattatcatctctcacagcatggcgtcttctcagagaaggaaatgcggttctatgcaacagagattattctcggactggagcatatgcataaccggtttgtggtgtatcgcgatctgaaacctgctaacattctgctcgacgagcatggccatgcaagaattagcgatctggggctggcctgcgacttttccaagaagaaaccacatgcatccgttgggactcacggatatatggctccagaagtcctgcaaaaaggcactgcatatgatagctccgctgactggttttccctgggctgtatgctgtttaagctgctgcgcggatag

SEQ ID NO: 153440 - DNA, 2067 bp, Artificial Sequence
  derived and/or modified sequence
atggctgaccttgaagcagtgcttgcggatgtcagctaccttatggcgatggagaaaagtaaggcaaccccagcagcaagagcttcaaagcggatcgttctgccagaacctagtattcgcagcgtcatgcaaaagtatttagctgaaagaaacgaaattacctttgacaagatcttcaaccaaaaaatcggatttctgctctttaaggacttctgcctgaatgagattaacgaggcagttccacaggtgaagttctatgaagaaatcaaagaatacgagaagctggataacgaagaagaccgtctatgccgatcacgccagatctatgacgcatatatcatgaaagagctgctgagttgtagccacccctttagtaaacaggcagtggaacacgttcagagtcatctgtcaaaaaaacaagtcacatcaactttgttccagccctacatcgaggagatatgcgaaagcctccgaggagatatcttccaaaaattcatggaatcggataagttcacgcggttctgccagtggaagaacgtggagctgaacattcacctcacgatgaatgagtttagtgtccatcggatcataggacgcggagggttcggcgaggtttacgggtgtcgcaaagcagatacgggcaagatgtacgcgatgaaatgtctcgacaagaagcggatcaagatgaaacagggcgaaacccttgcactcaatgaaagaattatgctgtcactggtgagcaccggtgattgtcctttcatcgtgtgcatgacatacgcattccacacacctgacaagctctgctttattctcgacctgatgaacggtggagacctgcactaccaccttagccagcatggagtgtttagcgagaaggaaatgcgattctatgctacagagatcattctgggcctggaacatatgcacaatagattcgtggtctacagagatctgaaacccgctaacatcctgctggacgagcatgggcatgcccgtatttcagatttgggactggcctgtgatttctcgaagaagaagccacacgccagtgtgggtacgcacggctatatggctccggaggtgctgcaaaaagggacagcctacgactcctctgcagattggttttccctggggtgtatgctttttaagctcttaaggggtcactcccctttcagacagcacaagaccaaagacaagcacgaaatagataggatgacactgactgtgaacgtggaactgccggacaccttctcaccagaactcaagagcctgctcgagggtctgctgcagcgcgatgtctctaaaagacttggatgtcacggcggtggcagccaggaggttaaagagcactccttttttaagggcgtggattggcagcacgtatacctgcaaaagtatcctccacctctgataccccctaggggtgaagtgaacgccgcagacgcctttgatatcgggagcttcgacgaggaggatacaaaaggcataaaactgctggactgtgaccaggagctctataaaaactttcctctcgtcatttctgagagatggcagcaggaagtgacagaaacagtgtacgaggctgtgaatgctgacactgacaagatcgaggcacggaagagggccaagaataaacaactggggcacgaagaagattatgcgttggggaaggactgcatcatgcacggctacatgctgaaactaggcaatccctttttgacccagtggcagagacgatacttttatttattccctaaccgattggaatggcgcggagagggcgaaagtaggcagaatctcctgacaatggaacagatcctttctgtggaagagacacaaatcaaggataagaagtgcattctgttccgcatcaagggtggaaaacagttcgtcctgcagtgcgagagcgatccagagttcgtgcagtggaagaaggaactcaacgaaacttttaaggaggctcagaggctcctgagacgtgcaccaaaattcctcaacaagcccaggagcgggaccgtggagttgcctaaaccttccctgtgtcataggaattcgaatggcctttag

SEQ ID NO: 153441 - DNA, 1164 bp, Artificial Sequence
  derived and/or modified sequence
atggccgacttggaagcagtactggcggacgtcagctatcttatggccatggaaaagtccaaagccacccccgcagccagggccagtaaaagaatcgtgctgccggaacccagcatccggtccgtgatgcagaagtaccttgctgagagaaatgaaattaccttcgacaagattttcaaccagaagatcggctttctcctgttcaaagatttttgtttgaatgagatcaacgaagccgtcccacaggtgaaattttatgaggaaatcaaagaatatgagaagctggacaacgaagaggaccggctgtgtaggtcacgtcagatctacgatgcctacataatgaaagaacttctgagctgttcacatccattttccaaacaggcagtcgagcacgtgcagtctcacctgtccaaaaagcaggtcacgtcaaccctgttccaaccctatatcgaagagatttgtgagtctctacgaggcgatatcttccagaagtttatggaatccgacaagtttactagattctgccaatggaagaatgtagagctcaacattcacctaacaatgaatgagttctcagtgcaccgcattatcggtaggggtgggttcggagaggtgtacggatgccgcaaagctgataccggcaaaatgtacgccatgaaatgcctggacaagaaaagaatcaagatgaagcagggtgaaactttggccttgaacgagcgcattatgctatccctagttagcaccggcgactgtccgttcatcgtgtgtatgacatacgccttccacactcctgacaaactgtgttttattctggatcttatgaatgggggagacctccactatcatctttctcagcacggagtgtttagcgaaaaagagatgcgcttttacgcaacagaaatcatcctgggccttgagcacatgcataatagattcgtggtatatcgcgacttgaagccagcaaatatcctattagacgagcatgggcacgcaagaatttcagacttgggtttggcttgcgacttttctaagaaaaagccgcatgcctcggtgggcacgcatggctacatggccccagaagtgcttcagaaaggtacggcctacgattcctccgccgactggttctctctggggtgcatgctgttcaaacttttacgagggtag

SEQ ID NO: 153442 - DNA, 2067 bp, Artificial Sequence
  derived and/or modified sequence
atggccgacctggaggccgtgctggccgacgtgagctacctgatggccatggagaagagcaaggccacccccgccgccagagccagcaagagaatcgtgctgcccgagcccagcatcagaagcgtgatgcagaagtacctggccgagagaaacgagatcaccttcgacaagatcttcaaccagaagatcggcttcctgctgttcaaggacttctgcctgaacgagatcaacgaggccgtgccccaggtgaagttctacgaggagatcaaggagtacgagaagctggacaacgaggaggacagactgtgcagaagcagacagatctacgacgcctacatcatgaaggagctgctgagctgcagccaccccttcagcaagcaggccgtggagcacgtgcagagccacctgagcaagaagcaggtgaccagcaccctgttccagccctacatcgaggagatctgcgagagcctgagaggcgacatcttccagaagttcatggagagcgacaagttcaccagattctgccagtggaagaacgtggagctgaacatccacctgaccatgaacgagttcagcgtgcacagaatcatcggcagaggcggcttcggcgaggtgtacggctgcagaaaggccgacaccggcaagatgtacgccatgaagtgcctggacaagaagagaatcaagatgaagcagggcgagaccctggccctgaacgagagaatcatgctgagcctggtgagcaccggcgactgccccttcatcgtgtgcatgacctacgccttccacacccccgacaagctgtgcttcatcctggacctgatgaacggcggcgacctgcactaccacctgagccagcacggcgtgttcagcgagaaggagatgagattctacgccaccgagatcatcctgggcctggagcacatgcacaacagattcgtggtgtacagagacctgaagcccgccaacatcctgctggacgagcacggccacgccagaatcagcgacctgggcctggcctgcgacttcagcaagaagaagccccacgccagcgtgggcacccacggctacatggcccccgaggtgctgcagaagggcaccgcctacgacagcagcgccgactggttcagcctgggctgcatgctgttcaagctgctgagaggccacagccccttcagacagcacaagaccaaggacaagcacgagatcgacagaatgaccctgaccgtgaacgtggagctgcccgacaccttcagccccgagctgaagagcctgctggagggcctgctgcagagagacgtgagcaagagactgggctgccacggcggcggcagccaggaggtgaaggagcacagcttcttcaagggcgtggactggcagcacgtgtacctgcagaagtaccccccccccctgatcccccccagaggcgaggtgaacgccgccgacgccttcgacatcggcagcttcgacgaggaggacaccaagggcatcaagctgctggactgcgaccaggagctgtacaagaacttccccctggtgatcagcgagagatggcagcaggaggtgaccgagaccgtgtacgaggccgtgaacgccgacaccgacaagatcgaggccagaaagagagccaagaacaagcagctgggccacgaggaggactacgccctgggcaaggactgcatcatgcacggctacatgctgaagctgggcaaccccttcctgacccagtggcagagaagatacttctacctgttccccaacagactggagtggagaggcgagggcgagagcagacagaacctgctgaccatggagcagatcctgagcgtggaggagacccagatcaaggacaagaagtgcatcctgttcagaatcaagggcggcaagcagttcgtgctgcagtgcgagagcgaccccgagttcgtgcagtggaagaaggagctgaacgagaccttcaaggaggcccagagactgctgagaagagcccccaagttcctgaacaagcccagaagcggcaccgtggagctgcccaagcccagcctgtgccacagaaacagcaacggcctgtag

SEQ ID NO: 153443 - DNA, 1164 bp, Artificial Sequence
  derived and/or modified sequence
atggccgacctggaggccgtgctggccgacgtgagctacctgatggccatggagaagagcaaggccacccccgccgccagagccagcaagagaatcgtgctgcccgagcccagcatcagaagcgtgatgcagaagtacctggccgagagaaacgagatcaccttcgacaagatcttcaaccagaagatcggcttcctgctgttcaaggacttctgcctgaacgagatcaacgaggccgtgccccaggtgaagttctacgaggagatcaaggagtacgagaagctggacaacgaggaggacagactgtgcagaagcagacagatctacgacgcctacatcatgaaggagctgctgagctgcagccaccccttcagcaagcaggccgtggagcacgtgcagagccacctgagcaagaagcaggtgaccagcaccctgttccagccctacatcgaggagatctgcgagagcctgagaggcgacatcttccagaagttcatggagagcgacaagttcaccagattctgccagtggaagaacgtggagctgaacatccacctgaccatgaacgagttcagcgtgcacagaatcatcggcagaggcggcttcggcgaggtgtacggctgcagaaaggccgacaccggcaagatgtacgccatgaagtgcctggacaagaagagaatcaagatgaagcagggcgagaccctggccctgaacgagagaatcatgctgagcctggtgagcaccggcgactgccccttcatcgtgtgcatgacctacgccttccacacccccgacaagctgtgcttcatcctggacctgatgaacggcggcgacctgcactaccacctgagccagcacggcgtgttcagcgagaaggagatgagattctacgccaccgagatcatcctgggcctggagcacatgcacaacagattcgtggtgtacagagacctgaagcccgccaacatcctgctggacgagcacggccacgccagaatcagcgacctgggcctggcctgcgacttcagcaagaagaagccccacgccagcgtgggcacccacggctacatggcccccgaggtgctgcagaagggcaccgcctacgacagcagcgccgactggttcagcctgggctgcatgctgttcaagctgctgagaggctag

SEQ ID NO: 153444 - protein, 380 aa, Artificial Sequence
  derived and/or modified sequence
MEEGGDFDNYYGADNQSECEYTDWKSSGALIPAIYMLVFLLGTTGNGLVLWTVFRSSREKRRSADIFIASLAVADLTFVVTLPLWATYTYRDYDWPFGTFFCKLSSYLIFVNMYASVFCLTGLSFDRYLAIVRPVANARLRLRVSGAVATAVLWVLAALLAMPVMVLRTTGDLENTTKVQCYMDYSMVATVSSEWAWEVGLGVSSTTVGFVVPFTIMLTCYFFIAQTIAGHFRKERIEGLRKRRRLLSIIVVLVVTFALCWMPYHLVKTLYMLGSLLHWPCDFDLFLMNIFPYCTCISYVNSCLNPFLYAFFDPRFRQACTSMLCCGQSRCAGTSHSSSGEKSASYSSGHSQGPGPNMGKGGEQMHEKSIPYSQETLVVD

SEQ ID NO: 153445 - protein, 261 aa, Artificial Sequence
  derived and/or modified sequence
MEEGGDFDNYYGADNQSECEYTDWKSSGALIPAIYMLVFLLAMPVMVLRTTGDLENTTKVQCYMDYSMVATVSSEWAWEVGLGVSSTTVGFVVPFTIMLTCYFFIAQTIAGHFRKERIEGLRKRRRLLSIIVVLVVTFALCWMPYHLVKTLYMLGSLLHWPCDFDLFLMNIFPYCTCISYVNSCLNPFLYAFFDPRFRQACTSMLCCGQSRCAGTSHSSSGEKSASYSSGHSQGPGPNMGKGGEQMHEKSIPYSQETLVVD

SEQ ID NO: 153446 - protein, 299 aa, Artificial Sequence
  derived and/or modified sequence
MLVFLLGTTGNGLVLWTVFRSSREKRRSADIFIASLAVADLTFVVTLPLWATYTYRDYDWPFGTFFCKLSSYLIFVNMYAMPVMVLRTTGDLENTTKVQCYMDYSMVATVSSEWAWEVGLGVSSTTVGFVVPFTIMLTCYFFIAQTIAGHFRKERIEGLRKRRRLLSIIVVLVVTFALCWMPYHLVKTLYMLGSLLHWPCDFDLFLMNIFPYCTCISYVNSCLNPFLYAFFDPRFRQACTSMLCCGQSRCAGTSHSSSGEKSASYSSGHSQGPGPNMGKGGEQMHEKSIPYSQETLVVD

SEQ ID NO: 153447 - DNA, 1143 bp, Artificial Sequence
  derived and/or modified sequence
atggaggagggcggcgacttcgacaactactacggcgccgacaaccagagcgagtgcgagtacaccgactggaagagcagcggcgccctgatccccgccatctacatgctggtgttcctgctgggcaccaccggcaacggcctggtgctgtggaccgtgttcagaagcagcagagagaagagaagaagcgccgacatcttcatcgccagcctggccgtggccgacctgaccttcgtggtgaccctgcccctgtgggccacctacacctacagagactacgactggcccttcggcaccttcttctgcaagctgagcagctacctgatcttcgtgaacatgtacgccagcgtgttctgcctgaccggcctgagcttcgacagatacctggccatcgtgagacccgtggccaacgccagactgagactgagagtgagcggcgccgtggccaccgccgtgctgtgggtgctggccgccctgctggccatgcccgtgatggtgctgagaaccaccggcgacctggagaacaccaccaaggtgcagtgctacatggactacagcatggtggccaccgtgagcagcgagtgggcctgggaggtgggcctgggcgtgagcagcaccaccgtgggcttcgtggtgcccttcaccatcatgctgacctgctacttcttcatcgcccagaccatcgccggccacttcagaaaggagagaatcgagggcctgagaaagagaagaagactgctgagcatcatcgtggtgctggtggtgaccttcgccctgtgctggatgccctaccacctggtgaagaccctgtacatgctgggcagcctgctgcactggccctgcgacttcgacctgttcctgatgaacatcttcccctactgcacctgcatcagctacgtgaacagctgcctgaaccccttcctgtacgccttcttcgaccccagattcagacaggcctgcaccagcatgctgtgctgcggccagagcagatgcgccggcaccagccacagcagcagcggcgagaagagcgccagctacagcagcggccacagccagggccccggccccaacatgggcaagggcggcgagcagatgcacgagaagagcatcccctacagccaggagaccctggtggtggactag

SEQ ID NO: 153448 - DNA, 786 bp, Artificial Sequence
  derived and/or modified sequence
atggaggagggcggcgacttcgacaactactacggcgccgacaaccagagcgagtgcgagtacaccgactggaagagcagcggcgccctgatccccgccatctacatgctggtgttcctgctggccatgcccgtgatggtgctgagaaccaccggcgacctggagaacaccaccaaggtgcagtgctacatggactacagcatggtggccaccgtgagcagcgagtgggcctgggaggtgggcctgggcgtgagcagcaccaccgtgggcttcgtggtgcccttcaccatcatgctgacctgctacttcttcatcgcccagaccatcgccggccacttcagaaaggagagaatcgagggcctgagaaagagaagaagactgctgagcatcatcgtggtgctggtggtgaccttcgccctgtgctggatgccctaccacctggtgaagaccctgtacatgctgggcagcctgctgcactggccctgcgacttcgacctgttcctgatgaacatcttcccctactgcacctgcatcagctacgtgaacagctgcctgaaccccttcctgtacgccttcttcgaccccagattcagacaggcctgcaccagcatgctgtgctgcggccagagcagatgcgccggcaccagccacagcagcagcggcgagaagagcgccagctacagcagcggccacagccagggccccggccccaacatgggcaagggcggcgagcagatgcacgagaagagcatcccctacagccaggagaccctggtggtggactag

SEQ ID NO: 153449 - DNA, 900 bp, Artificial Sequence
  derived and/or modified sequence
atgctggtgttcctgctgggcaccaccggcaacggcctggtgctgtggaccgtgttcagaagcagcagagagaagagaagaagcgccgacatcttcatcgccagcctggccgtggccgacctgaccttcgtggtgaccctgcccctgtgggccacctacacctacagagactacgactggcccttcggcaccttcttctgcaagctgagcagctacctgatcttcgtgaacatgtacgccatgcccgtgatggtgctgagaaccaccggcgacctggagaacaccaccaaggtgcagtgctacatggactacagcatggtggccaccgtgagcagcgagtgggcctgggaggtgggcctgggcgtgagcagcaccaccgtgggcttcgtggtgcccttcaccatcatgctgacctgctacttcttcatcgcccagaccatcgccggccacttcagaaaggagagaatcgagggcctgagaaagagaagaagactgctgagcatcatcgtggtgctggtggtgaccttcgccctgtgctggatgccctaccacctggtgaagaccctgtacatgctgggcagcctgctgcactggccctgcgacttcgacctgttcctgatgaacatcttcccctactgcacctgcatcagctacgtgaacagctgcctgaaccccttcctgtacgccttcttcgaccccagattcagacaggcctgcaccagcatgctgtgctgcggccagagcagatgcgccggcaccagccacagcagcagcggcgagaagagcgccagctacagcagcggccacagccagggccccggccccaacatgggcaagggcggcgagcagatgcacgagaagagcatcccctacagccaggagaccctggtggtggactag

SEQ ID NO: 153450 - DNA, 1143 bp, Artificial Sequence
  derived and/or modified sequence
atggaagaagggggtgatttcgataattattatggggccgacaaccagtccgagtgtgaatataccgactggaaatcttctggggctttgattcctgccatctacatgctcgtatttttattgggaacgaccgggaacgggctagtgctgtggacagtctttaggagttcacgcgagaagcggcggagtgcggacattttcattgcctctttggcggtagcggatctgaccttcgtagtgaccctgccgctgtgggctacatacacctatcgggattacgattggccattcgggacatttttttgcaagctaagctcatacctcatttttgtgaatatgtatgcatctgtgttctgtctcaccggtctgagcttcgaccgctatctggccatcgtgcgcccagtcgccaacgcaaggctgaggctgcgagtttccggagctgtcgcaacggcagtgctgtgggtgctggctgcactgctggccatgcctgtgatggtcctgcgaaccaccggcgatctagaaaacaccacgaaggtccaatgttacatggactacagtatggtcgcaactgtcagttccgaatgggcatgggaagtgggactaggcgtctcctccacgacagttggtttcgttgtaccatttacaataatgctgacctgctacttttttatcgctcagacaattgccgggcactttcggaaggaacgcattgaggggcttcgaaagagaaggaggcttctgtcaattatcgttgtacttgtagtaacattcgccttgtgctggatgccatatcatctggttaaaaccctgtatatgctcgggagcctactacactggccctgcgattttgatctctttttaatgaacatcttcccgtactgtacatgtatttcttacgttaactcctgcctgaatcccttcctctacgccttcttcgatccgcgcttcaggcaggcttgcacaagcatgttatgctgtggccagtctcggtgtgccggaacatcccattcatcctcaggggaaaaatcagcctcctatagttctggccacagtcaaggacccgggccaaacatgggcaaaggaggtgagcagatgcatgaaaagtccatcccatactctcaagaaacactcgtagtagactag

SEQ ID NO: 153451 - DNA, 786 bp, Artificial Sequence
  derived and/or modified sequence
atggaggagggtggcgactttgacaactactatggcgccgataatcagagcgaatgtgagtataccgattggaagtccagtggagcattaattcccgcgatctacatgctggttttccttcttgccatgccagtcatggtcctgcgcacaactggggacttggaaaacacaacaaaagtccagtgctatatggactacagcatggtggccactgtgtctagtgagtgggcctgggaagttggcctgggcgtatcatccacgacagtgggcttcgtggtcccttttacgataatgctgacatgctattttttcatcgcacagacaatcgccggacatttccgcaaggagaggatcgagggcctaagaaaaagaagacgcctgctgagtatcattgtggtactggtggtgacctttgctctctgctggatgccttaccacctcgttaaaaccctgtacatgttgggatctctcctccactggccatgcgattttgatcttttcctgatgaacatctttccatactgcacctgcatctcctacgtgaacagctgcctgaacccttttctgtatgcatttttcgaccccagatttagacaggcatgtacgagtatgctatgttgcggtcagtctcggtgtgcaggcaccagccactcgtcttccggtgaaaaaagcgcctcctacagcagcggtcactctcaggggcctggtccaaatatgggaaaaggcggagagcagatgcacgagaagtcgattccttactcacaggaaacactcgtggttgattag

SEQ ID NO: 153452 - DNA, 900 bp, Artificial Sequence
  derived and/or modified sequence
atgctcgtcttcttactgggtactacaggaaatggcctcgttttgtggaccgtgttccggagctctcgggaaaagcgcaggagtgcagacatctttatcgccagtcttgcggtggcagatcttaccttcgtggtcacactgccgttgtgggctacctacacctatcgagactatgattggcccttcggcacattcttctgcaaactgtcctcctatctcatctttgttaacatgtacgctatgcctgtaatggtactccggacgaccggcgaccttgaaaacacaactaaggtacagtgttacatggactacagtatggtcgccactgtgtctagcgagtgggcctgggaggtgggcctaggtgtttcctccaccacagtgggatttgtcgtgccatttactatcatgctgacctgttacttttttatcgcccagacaatcgctggccattttagaaaagaacggatcgagggcctccgtaagagaaggcggctactctccattatagtagtgcttgttgtgacgtttgctctgtgctggatgccatatcacctggtcaagaccctctatatgttagggagcttacttcactggccatgtgacttcgacctgtttcttatgaatatctttccctattgcacttgcatatcttacgtgaatagttgtctgaatccttttctgtacgcatttttcgaccccaggtttcgacaggcttgcaccagcatgctgtgctgcggccaaagtaggtgtgcaggtacaagccattcatcatccggagagaagagcgcaagctatagcagcgggcattcccaaggccctggtccaaacatgggaaagggtggcgaacaaatgcacgaaaagtctattccctatagtcaagagaccctggtagtcgattag

SEQ ID NO: 153453 - DNA, 1143 bp, Artificial Sequence
  derived and/or modified sequence
atggaggagggcggggactttgacaactactatggagctgacaaccagagtgaatgtgagtacacagactggaagagcagcggggccctgatcccagccatctacatgctggtgttcctgctgggcaccactggaaatggcctggtgctgtggacagtgttccgcagcagccgggagaagagaagatctgctgacatcttcatcgccagcctggccgtggccgacctgacctttgtggtgaccctgcccctgtgggccacctacacctacagagattatgactggcccttcggcaccttcttctgcaagctgagcagctacctgatctttgtgaacatgtatgccagcgtcttctgcctgaccggcctgagctttgaccgctacctggccatcgtgcggcctgtggccaatgcccggctgcggctgcgggtgtctggagctgtggccacagctgtgctgtgggtgctggccgccctgctggccatgcctgtgatggtgctgcggaccaccggggacctggagaacaccaccaaggtgcagtgctacatggactacagcatggtggccaccgtgtcctctgagtgggcctgggaggtgggcctgggcgtgagcagcaccaccgtgggctttgtggtgcccttcaccatcatgctgacctgctacttcttcatcgcccagaccatcgccggccacttcaggaaggagagaattgagggcctgaggaagagaagaaggctgctgagcatcatcgtggtgctggtggtgacctttgccctgtgctggatgccctaccacctggtgaagaccctgtacatgctgggcagcctgctgcactggccctgtgactttgacctcttcctgatgaacatcttcccctactgcacctgcatctcctatgtgaacagctgcctgaaccccttcctgtatgccttctttgacccccgcttccggcaggcctgcacctccatgctgtgctgcggccagagccgctgtgccggcaccagccacagcagcagtggagagaagagcgccagctacagcagcggccacagccagggccctggccccaacatgggcaagggcggggagcagatgcatgagaagagcatcccctacagccaggagaccctggtggtggactag

SEQ ID NO: 153454 - DNA, 786 bp, Artificial Sequence
  derived and/or modified sequence
atggaggagggcggggactttgacaactactatggagctgacaaccagagtgaatgtgagtacacagactggaagagcagcggggccctgatcccagccatctacatgctggtgttcctgctggccatgcctgtgatggtgctgcggaccactggagacctggagaacaccaccaaggtgcagtgctacatggactacagcatggtggccaccgtgagcagcgagtgggcctgggaggtgggcctgggcgtgagcagcaccaccgtgggctttgtggtgcccttcaccatcatgctgacctgctacttcttcatcgcccagaccatcgccggccacttcaggaaggagcgcatcgagggcctgaggaagagaagaaggctgctgagcatcatcgtggtgctggtggtgacctttgccctgtgctggatgccctaccacctggtgaagaccctgtacatgctgggcagcctgctgcactggccctgtgactttgacctcttcctgatgaacatcttcccctactgcacctgcatctcctatgtgaacagctgcctgaaccccttcctgtatgccttctttgacccccgcttccggcaggcctgcacctccatgctgtgctgcggccagagccgctgtgccggcaccagccacagcagcagcggggagaagagcgccagctacagcagcggccacagccagggccctggccccaacatgggcaaaggaggagagcagatgcatgagaagagcatcccctacagccaggagaccctggtggtggactag

SEQ ID NO: 153455 - DNA, 900 bp, Artificial Sequence
  derived and/or modified sequence
atgctggtgttcctgctgggcaccactggaaatggcctggtgctgtggacagtgttccgcagcagccgggagaagagaagatctgctgacatcttcatcgccagcctggccgtggccgacctgacctttgtggtgaccctgcccctgtgggccacctacacctacagagattatgactggcccttcggcaccttcttctgcaagctgagcagctacctgatctttgtgaacatgtatgccatgcctgtgatggtgctgcggaccactggagacctggagaacaccaccaaggtgcagtgctacatggactacagcatggtggccaccgtgagcagcgagtgggcctgggaggtgggcctgggcgtgagcagcaccaccgtgggctttgtggtgcccttcaccatcatgctgacctgctacttcttcatcgcccagaccatcgccggccacttcaggaaggagcgcatcgagggcctgaggaagagaagaaggctgctgagcatcatcgtggtgctggtggtgacctttgccctgtgctggatgccctaccacctggtgaagaccctgtacatgctgggcagcctgctgcactggccctgtgactttgacctcttcctgatgaacatcttcccctactgcacctgcatctcctatgtgaacagctgcctgaaccccttcctgtatgccttctttgacccccgcttccggcaggcctgcacctccatgctgtgctgcggccagagccgctgtgccggcaccagccacagcagcagcggggagaagagcgccagctacagcagcggccacagccagggccctggccccaacatgggcaaaggaggagagcagatgcatgagaagagcatcccctacagccaggagaccctggtggtggactag

SEQ ID NO: 153456 - DNA, 1143 bp, Artificial Sequence
  derived and/or modified sequence
atggaggagggcggcgacttcgacaactactacggcgccgacaaccaaagtgaatgtgagtacacagactggaaatcctcaggggccctcattccagctatttatatgcttgtgtttctgttggggaccacaggcaatggcctcgttctttggacagtctttcgcagtagcagagagaagagacgaagcgctgacatcttcattgctagcctggccgtcgccgaccttactttcgtagtcaccctcccactgtgggctacttatacctacagagattatgactggccatttggcacattcttctgcaaactgtcaagttatctgatttttgttaatatgtacgcgtctgtcttctgtctaaccgggctgagcttcgatcggtatctagcaattgtgcgtcctgtggctaatgcaagattacgcctcagagtaagtggggccgtcgccaccgccgtactttgggtccttgcagcgctcctagcgatgcccgtgatggtgctgcggacgactggcgaccttgaaaacactaccaaggtgcagtgctacatggactacagcatggtggcgaccgtgagcagcgagtgggcctgggaggttgggctgggtgtctcctccacgactgtgggatttgtggtacccttcaccataatgcttacatgttacttctttatagctcagaccatcgctggccattttcgcaaagagagaattgaggggctcaggaaaaggagacgcctgctctcgatcattgtggtgctcgtggtgacctttgccttgtgctggatgccatatcaccttgtaaagacgctgtacatgttgggttctctcctccactggccatgcgatttcgacctgttcctgatgaacatttttccatactgtacgtgtataagttacgttaattcttgtctcaacccattcttgtatgctttcttcgacccccgcttccggcaggcgtgcacatctatgttgtgttgcggccagtctaggtgcgcaggcactagccattctagctcaggcgaaaagagtgcaagttacagttcgggacacagccaaggacctggtcctaatatgggcaaaggaggagaacagatgcacgaaaagtccatcccttatagccaggagacactggtcgtggactag

SEQ ID NO: 153457 - DNA, 786 bp, Artificial Sequence
  derived and/or modified sequence
atggaggagggcggcgacttcgacaactactacggcgccgacaaccagagtgaatgcgagtacacagattggaagagctcaggagccctcatccctgcaatttatatgttggtctttctcctcgccatgccagttatggttcttcgaaccaccggagatctggagaacactacaaaggtccagtgttacatggactactccatggtggccacagtgtccagtgaatgggcatgggaggtaggtttgggcgtgtccagcactaccgtggggtttgtcgtaccatttaccatcatgctcacttgctactttttcatagcacagaccatagccggacacttccggaaggaacggattgaaggtctgcggaaacgtcgccggctgctctctataattgtcgttctggtggtgacctttgccctttgttggatgccttaccatctggtgaaaacactctacatgctgggctctcttttacattggccttgcgatttcgacttatttttaatgaacatctttccctattgcacttgtataagttacgtgaattcttgtctcaaccctttcctctatgcattctttgaccccaggtttaggcaggcttgtacaagcatgctctgctgtggacagtcgcgatgcgccggtaccagccacagttccagcggtgaaaaaagtgcttcttactcatctggccattcgcaggggcctggaccaaatatggggaaagggggtgagcagatgcacgagaagagtatcccatattctcaggagacactggtggtcgattag

SEQ ID NO: 153458 - DNA, 900 bp, Artificial Sequence
  derived and/or modified sequence
atgctggtgttcctgctgggcaccaccggcaacggcctggtgctgtggaccgtgttcagaagtagtcgtgaaaagcgcagatctgcagatattttcatcgcgtcactggcagtggcagacctgactttcgtggttacactacccctgtgggcgacctacacctacagggattatgattggccattcgggaccttcttttgcaaactgtcctcttatttgatttttgtgaacatgtatgctatgccagtgatggtcctgcggactaccggcgaccttgagaacacgacaaaggtgcagtgctacatggattattccatggttgctacagtaagttctgagtgggcctgggaagttggcctgggtgtatcgtctaccactgttggatttgtggtgccgttcacaatcatgcttacctgctacttctttatagcccagaccatcgcaggtcatttccggaaggagaggatcgaagggctgcggaagcgcagacgccttctgagcatcatcgttgtcctggttgtgacatttgctctgtgctggatgccgtatcacctcgtgaaaaccctttacatgcttggaagtctactgcactggccatgcgactttgatctgttcctgatgaacatatttccctactgtacatgcattagttatgtgaactcttgtctgaacccattcctgtatgcattcttcgaccctcgtttcagacaggcatgcacatctatgttgtgctgcggtcaatcaagatgcgcaggcacatctcacagtagctctggcgaaaaaagtgccagctacagtagcggacactcacagggccctggtccaaacatggggaagggcggagagcagatgcacgagaagagtattccttattcacaggagaccctcgttgtagactag

SEQ ID NO: 153459 - DNA, 1726 bp, Artificial Sequence
  derived and/or modified sequence
ggggtaaggcaagagagggtggaggaaattctgcaggagacaggcttcctccagggtctggagaacccagaggcagctcctcctgagtgctgggaaggactctgggcatcttcagcccttcttactctctgaggctcaagccagaaattcaggctgcttgcagagtgggtgacagagccacggagctggtgtccctgggaccctctgcccgtcttctctccactccccagcatggaggaaggtggtgattttgacaactactatggggcagacaaccagtctgagtgtgagtacacagactggaaatcctcgggggccctcatccctgccatctacatgttggtcttcctcctgggcaccacgggcaacggtctggtgctctggaccgtgtttcggagcagccgggagaagaggcgctcagctgatatcttcattgctagcctggcggtggctgacctgaccttcgtggtgacgctgcccctgtgggctacctacacgtaccgggactatgactggccctttgggaccttcttctgcaagctcagcagctacctcatcttcgtcaacatgtacgccagcgtcttctgcctcaccggcctcagcttcgaccgctacctggccatcgtgaggccagtggccaatgctcggctgaggctgcgggtcagcggggccgtggccacggcagttctttgggtgctggccgccctcctggccatgcctgtcatggtgttacgcaccaccggggacttggagaacaccactaaggtgcagtgctacatggactactccatggtggccactgtgagctcagagtgggcctgggaggtgggccttggggtctcgtccaccaccgtgggctttgtggtgcccttcaccatcatgctgacctgttacttcttcatcgcccaaaccatcgctggccacttccgcaaggaacgcatcgagggcctgcggaagcggcgccggctgctcagcatcatcgtggtgctggtggtgacctttgccctgtgctggatgccctaccacctggtgaagacgctgtacatgctgggcagcctgctgcactggccctgtgactttgacctcttcctcatgaacatcttcccctactgcacctgcatcagctacgtcaacagctgcctcaaccccttcctctatgcctttttcgacccccgcttccgccaggcctgcacctccatgctctgctgtggccagagcaggtgcgcaggcacctcccacagcagcagtggggagaagtcagccagctactcttcggggcacagccaggggcccggccccaacatgggcaagggtggagaacagatgcacgagaaatccatcccctacagccaggagacccttgtggttgactagggctgggagcagagagaagcctggcgccctcggccctccccggcctttgcccttgctttctgaaaatcagagtcacctcctctgcccagagctgtcctcaaagcatccagtgaacactggaagaggcttctagaagggaagaaattgtccctctgaggccgccgtgggtgacctgcagagacttcctgcctggaactcatctgtgaactgggacagaagcagaggaggctgcctgctgtgatacccccttacctcccccagtgccttcttcagaatatctgcactgtcttctgatcctgttagtcactgtggttcatcaaataaaactgtttgtgcaactgttgtgtccaaa

SEQ ID NO: 153460 - DNA, 1370 bp, Artificial Sequence
  derived and/or modified sequence
gtgtcttaactgagacgggggtaaggcaagagagggtggaggaaattctgcaggagacaggcttcctccagggtctggagaacccagaggcagctcctcctgagtgctgggaaggactctgggcatcttcagcccttcttactctctgaggctcaagccagaaattcaggctgcttgcagagtgggtgacagagccacggagctggtgtccctgggaccctctgcccgtcttctctccactccccagcatggaggaaggtggtgattttgacaactactatggggcagacaaccagtctgagtgtgagtacacagactggaaatcctcgggggccctcatccctgccatctacatgttggtcttcctcctggccatgcctgtcatggtgttacgcaccaccggggacttggagaacaccactaaggtgcagtgctacatggactactccatggtggccactgtgagctcagagtgggcctgggaggtgggccttggggtctcgtccaccaccgtgggctttgtggtgcccttcaccatcatgctgacctgttacttcttcatcgcccaaaccatcgctggccacttccgcaaggaacgcatcgagggcctgcggaagcggcgccggctgctcagcatcatcgtggtgctggtggtgacctttgccctgtgctggatgccctaccacctggtgaagacgctgtacatgctgggcagcctgctgcactggccctgtgactttgacctcttcctcatgaacatcttcccctactgcacctgcatcagctacgtcaacagctgcctcaaccccttcctctatgcctttttcgacccccgcttccgccaggcctgcacctccatgctctgctgtggccagagcaggtgcgcaggcacctcccacagcagcagtggggagaagtcagccagctactcttcggggcacagccaggggcccggccccaacatgggcaagggtggagaacagatgcacgagaaatccatcccctacagccaggagacccttgtggttgactagggctgggagcagagagaagcctggcgccctcggccctccccggcctttgcccttgctttctgaaaatcagagtcacctcctctgcccagagctgtcctcaaagcatccagtgaacactggaagaggcttctagaagggaagaaattgtccctctgaggccgccgtgggtgacctgcagagacttcctgcctggaactcatctgtgaactgggacagaagcagaggaggctgcctgctgtgatacccccttacctcccccagtgccttcttcagaatatctgcactgtcttctgatcctgttagtcactgtggttcatcaaataaaactgtttgtgc

SEQ ID NO: 153461 - DNA, 3248 bp, Artificial Sequence
  derived and/or modified sequence
ctactatggggcagacaaccagtctgagtgtgagtacacagactggaaatcctcgggggccctcatccctgccatctacatgttggtcttcctcctgggcaccacgggcaacggtctggtgctctggaccgtgtttcggagcagccgggagaagaggcgctcagctgatatcttcattgctagcctggcggtggctgacctgaccttcgtggtgacgctgcccctgtgggctacctacacgtaccgggactatgactggccctttgggaccttcttctgcaagctcagcagctacctcatcttcgtcaacatgtacgccatgcctgtcatggtgttacgcaccaccggggacttggagaacaccactaaggtgcagtgctacatggactactccatggtggccactgtgagctcagagtgggcctgggaggtgggccttggggtctcgtccaccaccgtgggctttgtggtgcccttcaccatcatgctgacctgttacttcttcatcgcccaaaccatcgctggccacttccgcaaggaacgcatcgagggcctgcggaagcggcgccggctgctcagcatcatcgtggtgctggtggtgacctttgccctgtgctggatgccctaccacctggtgaagacgctgtacatgctgggcagcctgctgcactggccctgtgactttgacctcttcctcatgaacatcttcccctactgcacctgcatcagctacgtcaacagctgcctcaaccccttcctctatgcctttttcgacccccgcttccgccaggcctgcacctccatgctctgctgtggccagagcaggtgcgcaggcacctcccacagcagcagtggggagaagtcagccagctactcttcggggcacagccaggggcccggccccaacatgggcaagggtggagaacagatgcacgagaaatccatcccctacagccaggagacccttgtggttgactagggctgggagcagagagaagcctggcgccctcggccctccccggcctttgcccttgctttctgaaaatcaggtagtgtggctactccttgtcctatgcacatcctttaactgtcccctgattctgccccgccctgtcctcctctactgctttattctttctcagaggtttgtggtttaggggaaagagactgggctctacagacctgaccctgcacaagccatttaatctcactcagcctcagtttctccattggtatgaaatgggggaaagtcatattgatcctaaaatgttgaagcctgagtctggacgcagtaaaagcttgtttccctctgctgctttcttagatctgcaatcgtctttcctcccttctttccttgtagtttttcccccaccactctctgcagctgccgctccttatccctgccttctggcaccaatcccctcctacagctcgtccccctccctccatccatccttctcccctgtctactttcttgttctgaagggctactaagggttaaggatcccaaagcttgcagagactgaccctgtttaagctttctatcctgttttctgagtgtgaggcagggaatgggctggggccgggggtgggctgtgtgtcagcagataattagtgctccagcccttagatctgggagctccagagcttgccctaaaattggatcacttccctgtcattttgggcattggggctagtgtgattcctgcagttcccccatggcaccatgacactgactagatatgctttctccaaattgtccgcagaccctttcatccttcctctattttctatgagaattggaaggcagcagggctgatgaatggatgtactccttggtttcattatgtgagtggggagttgggaagggcaactagagagagaggatggaggggtgtctgcatttagtccagacactgcttggctcgctccccgagtcctcctgtttctgacttcctgcataactgtgagctgaagggtttcctcatctccccatcttaccccatcatactgatttctttcttgggcactggtgctacttggtgccaagaatcatgttgtttgggatggagatgcctgcctcttgtctgtgtgtgttgtacttatatgtctatatggatgagcctggcatgaacagcagtgtgcctgggtcatttggacaaacctcctcccaccccccaatccactgcaactctgctgttcacacattacccttggcagggggtggtggggggcagggacacactgaggcaatgaaaaatgtagaataaaaatgagtccaccccctactggatttgggggctccaacggctggtccgtgctttaggagcgaagttaatgtttgcaccaggcttcctgtagggagatccctccccaaagcagctggcgccaaggcttgggggcgtcctactgagctgggttcctgctccttcttgggctccatgaaggaagtaagaggctagttgagagcctcccttggcccctttccggtgcctccccgcctggcttcaaatttatgagcattgccctcatcgtcctttcttgttccagggtcagtggccctcttcctaaggaggcctcctgcttgccatgggccaaaaggcacggggtgggttttttctctccctaccctcaggattggacctcttggcttctgctggattggggatctgggaatagggactggagcaagtgtgcagatagcatgatgtctacactgccagagagaccgtgaggatgaaattaatagtggggcctttgtgagctagaggctgggagtgtctattccgggttttgttcttggaggactatgaaagtgaaggacaagacatgagcgatggagataagaaaagcccagcttgatgtgaatggacatcttgaccctccctggaatgacgccagctctgggggcagagggaggaggagaggggaaggggctcctcacagcctagtctccccatcttaagatagcatctttcacagagtcacctcctctgcccagagctgtcctcaaagcatccagtgaacactggaagaggcttctagaagggaagaaattgtccctctgaggccgccgtgggtgacctgcagagacttcctgcctggaactcatctgtgaactgggacagaagcagaggaggctgcctgctgtgatacccccttacctcccccagtgccttcttcagaatatctgcactgtcttctgatcctgttagtcactgtggttcatcaaataaaactgtttgtgc

SEQ ID NO: 153462 - DNA, 1143 bp, Artificial Sequence
  derived and/or modified sequence
atggaggaggggggtgacttcgacaactactacggagccgataaccagtcagaatgtgaatatactgactggaagtccagtggggctctgatcccagccatatacatgctggtgttcctactcggcacgacaggaaacggactagtcctgtggacagttttccggtcctcaagggaaaaaagaaggagtgctgatatcttcatagcctccctggctgtggcagacttgacttttgtcgtcaccctgccattgtgggcaacctacacttatcgagactatgattggccttttggcactttcttttgcaaactcagctcataccttatattcgtgaatatgtatgccagtgtattctgcctaaccgggctatccttcgacagatatttagccattgtcagacctgtggcaaatgccaggctgcgcctgcgcgtgagtggggctgtcgccactgctgttttatgggtgctggccgcattgctcgccatgcccgtgatggttctgcgaacgacgggagacctcgaaaacacaacgaaggtgcagtgttatatggactattcaatggtagcaacagtttcatccgaatgggcctgggaagtcggcttgggcgtctcttctaccactgtgggcttcgtggtcccatttaccatcatgctgacttgctattttttcattgcccagactatcgcaggacacttcaggaaagagcgaatcgagggactgcgcaagaggcggagactgctcagcatcatagtggttcttgtggtcacctttgccctctgctggatgccctatcacctcgtcaagactctgtacatgctgggcagcctgctgcactggccctgcgactttgatttatttctcatgaacatctttccttattgtacctgcatttcttatgttaacagctgcctaaaccctttcctgtatgcgttcttcgatcctcgttttcgacaggcttgcacctctatgctgtgctgcggccagtctagatgtgccggtacatctcacagttcttccggcgaaaaaagcgcctcctattcctctggacactctcaaggaccagggcctaatatgggcaaaggaggcgagcaaatgcacgaaaagtctatcccgtacagccaggaaacgctggttgtggattag

SEQ ID NO: 153463 - DNA, 786 bp, Artificial Sequence
  derived and/or modified sequence
atggaggagggaggagatttcgataactactacggtgcagacaatcaaagcgaatgtgaatataccgattggaaatcctccggtgccctaatccctgctatctatatgctggtcttcctcctcgcaatgcctgtgatggtgttacgcactactggagatctcgagaacaccacaaaagtgcagtgctacatggactacagtatggtcgccacggtgtccagtgagtgggcctgggaagttgggctcggggtgagttcaaccacagtcgggtttgtggtccccttcactataatgctgacatgttacttcttcatcgcacaaactattgccggtcatttccggaaggagcggatcgaaggactgaggaagcgaaggcgcctgctgtccatcatcgtggtgttggtggtaacgttcgcattgtgctggatgccgtaccacctggtaaaaaccttgtatatgctcggcagtttacttcactggccatgtgacttcgatctgttcctgatgaatattttcccatactgtacctgcattagttacgtaaattcctgtctgaatcctttcctgtatgccttcttcgaccctagattccgccaggcatgcacgagtatgctctgctgtggccagagtaggtgtgcaggcacgtcgcactcttccagcggagagaaatcagcatcttactctagcggccacagccagggccctggtccaaatatgggaaagggtggcgagcaaatgcatgaaaagagtatcccttacagccaggagaccctcgttgtggattag

SEQ ID NO: 153464 - DNA, 900 bp, Artificial Sequence
  derived and/or modified sequence
atgctggtgttcttgctgggaacaactggcaatggactcgtgctgtggaccgtcttcagaagtagtagagaaaaacggaggagcgcagacatcttcatcgctagtctggccgtcgcggacttgaccttcgtagtgactctcccactttgggccacatacacataccgtgactatgattggccctttggaactttcttctgcaaactcagcagttatctgattttcgttaacatgtatgcaatgcccgtaatggtgctccgtacaaccggtgatctggagaatactactaaagtgcagtgctacatggattattccatggtggccacagtcagctccgagtgggcgtgggaggttggactcggagtgtcgtccaccacagtgggatttgtggtcccattcactatcatgctgacatgctacttctttattgcccagactatcgcgggtcacttcagaaaggaacgcattgaaggtctccggaagagacgtaggttgctctcaattattgtcgtgctagtggtcactttcgctctctgttggatgccatatcacctcgtgaagaccctgtacatgttgggtagcctgctgcattggccttgtgattttgatctgtttctgatgaatatttttccctactgtacatgtatcagctatgtcaatagctgcctgaatccattcttatacgctttctttgacccgagattcagacaggcctgtacctctatgctctgctgcggccagtccaggtgtgccggaacatctcattcctcttcaggagaaaaaagtgcgtcgtattcttccgggcactcccagggcccagggccaaatatgggcaaaggaggagagcaaatgcacgaaaagtccatcccttactctcaggagaccttggtggtggactag

SEQ ID NO: 153465 - DNA, 540 bp, Artificial Sequence
  derived and/or modified sequence
atgggcagctggcactgggagtggtatggcgcacccacctctacgctgagcctgggatgtctgcttcttccaggcgagaagtggacattccttattctgccgtcacactacggcactaccacccacgctcactcccttcaggggtgtgttgagcgccaatggcaggattccaagcagcttgccatcagccctgggcctacactgctgcgctctgaatacgtcgggtccttatctcctgtttgctcctctttgacccaggtacaccgggtgccctgggggcaacacagagcctgccccgtcatgctgctggtcttcaccaagtggctgcagcgctacttacacttcgagaagcctgctgagcccgcatccgtcgggcaggatcctgacttcttcggcaagagcgagggcgaacgcgcaacttgtttgctttcacgcagctgcttgtatctcgcctcagtatgtaatttgcgcgaaaatgattcctgcatgggcaggagtggcggaacagggaaatccgacctcccaggcagttgccgatag

SEQ ID NO: 153466 - protein, 364 aa, Artificial Sequence
  derived and/or modified sequence
MPHSYPALSAEQKKELSDIALRIVAPGKGILAADESVGSMAKRLSQIGVENTEENRRLYRQVLFSADDRVKKCIGGVIFFHETLYQKDDNGVPFVRTIQDKGIVVGIKVDKGVVPLAGTDGETTTQGLDGLSERCAQYKKDGADFAKWRCVLKISERTPSALAILENANVLARYASICQQNGIVPIVEPEILPDGDHDLKRCQYVTEKVLAAVYKALSDHHVYLEGTLLKPNMVTPGHACPIKYTPEEIAMATVTALRRTVPPAVPGVTFLSGGQSEEEASFNLNAINRCPLPRPWALTFSYGRALQASALNAWRGQRDNAGAATEEFIKRAEVNGLAAQGKYEGSGEDGGAAAQSLYIANHAY

SEQ ID NO: 153467 - protein, 149 aa, Artificial Sequence
  derived and/or modified sequence
MPHSYPALSAEQKKELSDIALRIVAPGKGILAADESVGSMAKRLSQIGVENTEENRRLYRQVLFSADDRVKKCIGGVIFFHETLYQKDDNGVPFVRTIQDKGIVVGIKVDKGVVPLAGTDGETTTQGLDGLSERCAQYKKDGADFAKWR

SEQ ID NO: 153468 - DNA, 1095 bp, Artificial Sequence
  derived and/or modified sequence
atgccccactcttatcctgctctttccgcagagcaaaaaaaggaactgagtgacattgctctaagaattgtggccccaggaaagggaatcttagcagctgacgaatcagtgggtagtatggcaaagaggctctcccagatcggagtggaaaacacggaggaaaaccggagactgtaccgccaggtcctattttcagcagacgatcgagtgaagaagtgcatcggaggggtaatcttcttccatgaaaccctatatcagaaggacgataacggcgttccgttcgtgcgcacaattcaggataagggcattgtagtaggaattaaagtcgacaaaggcgtcgtgccacttgcgggaactgatggtgagaccaccacccagggcctggacggcctgtctgagaggtgtgctcagtacaaaaaggatggggccgacttcgccaagtggagatgtgtgctgaagatcagcgagaggaccccctctgcccttgcgattcttgaaaatgccaatgtgctcgctcggtatgcctccatctgccagcagaatgggatcgtgcccatcgtagagcccgaaatcttgccagacggcgaccacgacctgaagaggtgccaatatgtcactgaaaaggtgttggcagcagtttacaaggccctgtccgaccaccatgtgtatctcgagggaacactactcaaaccaaacatggttacgcccggccatgcatgccccatcaagtacacccctgaggagattgccatggcaacagtcaccgcgctcagaagaacggtccccccagctgtccctggcgttacgtttctttcagggggacagtctgaagaagaggcctctttcaaccttaacgcaatcaatcgatgtccgctgccaagaccttgggcactgaccttttcttacggacgagcactgcaggcctctgctctaaatgcctggcgggggcagcgtgacaacgccggtgctgctactgaggagtttataaaaagggccgaggtgaacggtcttgctgcacagggcaagtacgagggttctggtgaagatgggggcgcagctgcccagtctctgtacattgcaaatcatgcatactag

SEQ ID NO: 153469 - DNA, 450 bp, Artificial Sequence
  derived and/or modified sequence
atgccccactcttaccctgcactgtccgctgagcagaagaaagagctgagtgatattgccttacgaatcgtcgccccaggaaaaggaattctggctgccgacgagagtgtcgggtctatggcgaagagactgagtcaaataggggtggagaatactgaggaaaatcggcgactgtacagacaggtcttgttttccgctgatgacagagttaagaagtgcattggtggagttattttcttccacgagacactgtaccagaaggacgacaatggggtgcccttcgtacgtacaatccaggacaaaggaattgtcgtggggatcaaagtggataagggggtagtgccactcgcaggtacagatggagaaacgaccacccagggcttagatggattgagcgaacgatgtgcccaatacaagaaagatggcgcagattttgccaagtggcgctag

SEQ ID NO: 153470 - DNA, 1095 bp, Artificial Sequence
  derived and/or modified sequence
atgcctcattcttacccagctctgagcgcagagcagaagaaggaactctcagatattgcactccgaatagtggcaccagggaaggggattcttgccgcggatgaaagtgtcggctccatggccaagcggttatcccagataggggtggagaacaccgaggagaatagaagactctatagacaggttctctttagcgcggacgaccgtgtgaagaagtgtatcggcggcgtgatattcttccacgaaactttatatcagaaagatgacaacggggtccctttcgttagaacaatccaggataaggggattgttgtgggcattaaggttgacaagggtgtggtgccactggctggcacagacggcgagactacaacgcagggtttagatggattaagtgaaaggtgtgcccagtataagaaggacggggctgacttcgccaagtggagatgcgtgctcaaaatctcagaacggactccctccgcgctcgcgatcctcgagaatgccaacgtcctggcgcgttacgcctctatctgccaacaaaatggtatcgttccgatcgtagaaccagaaatattgcccgacggtgaccatgatctcaagaggtgccagtatgtaactgaaaaagtgctggcggccgtgtataaagccctctcagaccaccacgtctaccttgagggaactttactgaagcctaacatggttactcctggccacgcttgtcccatcaagtacacgccagaggagatcgctatggctaccgtgacagctctcagacggaccgttcccccagcggtcccaggagtgacattcctttccggcgggcagagcgaggaagaagcatccttcaacctgaatgccatcaacaggtgtcccctgccccgcccttgggcacttaccttcagctacgggcgggcactgcaggccagcgccctgaacgcctggcgtggccaaagagataatgctggcgcagcgaccgaggagttcatcaagcgggctgaagtcaacggccttgctgcacaggggaagtatgaaggatccggcgaagatggtggtgcggccgcgcaatccctgtacatcgccaatcacgcctattag

SEQ ID NO: 153471 - DNA, 1095 bp, Artificial Sequence
  derived and/or modified sequence
atgccccacagctacccagccctgtctgctgagcagaagaaggagctgagtgacatcgccctgagaattgtggcccctgggaagggcatcctggccgcagatgagagcgtgggctccatggccaagaggctgagccagattggagtggagaacacagaggagaacagaaggctgtaccggcaggtgctcttcagcgcagatgacagagtgaagaagtgcatcggcggcgtcatcttcttccacgagaccctgtaccagaaggatgacaacggggtgccctttgtgaggaccatccaggacaagggcatcgtggtgggcatcaaggtggacaagggcgtggtgcccctggccggcacagatggagagaccaccacccagggcctggatggcctgtctgagcgctgtgcccagtacaagaaggatggagctgactttgccaagtggaggtgtgtgctgaagatcagcgagaggacccccagcgccctggccatcctggagaatgccaacgtgctggcccgctatgccagcatctgccagcagaatggaattgtgcccatcgtggagcctgagatcctgcctgatggagaccatgacctgaagcgctgccagtatgtgacagagaaggtgctggccgctgtgtacaaggccctgagtgaccaccacgtgtacctggagggcaccctgctgaagcccaacatggtgaccccaggccacgcctgccccatcaagtacaccccagaggagatcgccatggccaccgtgacagccctgcggaggacagtgcccccagctgtgcctggggtgaccttcctgagcggcggccagagcgaggaggaggccagcttcaacctgaatgccatcaaccgctgccccctgccccggccctgggccctgaccttctcctatggccgggccctgcaggccagcgccctgaatgcctggaggggccagagggacaatgctggggccgccacagaggagttcatcaagagagctgaggtgaatggcctggccgcccagggcaagtatgagggcagcggggaggatggaggagctgctgcccagagcctgtacatcgccaaccacgcctactag

SEQ ID NO: 153472 - DNA, 450 bp, Artificial Sequence
  derived and/or modified sequence
atgccccacagctacccagccctgtctgctgagcagaagaaggagctgagtgacatcgccctgagaattgtggcccctgggaagggcatcctggccgcagatgagagcgtgggctccatggccaagaggctgagccagattggagtggagaacacagaggagaacagaaggctgtaccggcaggtgctcttcagcgcagatgacagagtgaagaagtgcatcggcggcgtcatcttcttccacgagaccctgtaccagaaggatgacaacggggtgccctttgtgaggaccatccaggacaagggcatcgtggtgggcatcaaggtggacaagggcgtggtgcccctggccggcacagatggagagaccaccacccagggcctggatggcctgtctgagcgctgtgcccagtacaagaaggatggagctgactttgccaagtggaggtag

SEQ ID NO: 153473 - DNA, 1652 bp, Artificial Sequence
  derived and/or modified sequence
cccggaggagtcacgtagctctgcgacatccgcagcctcatttaccagagggagccagggctgcagcctcatctgtttgcggatcagaacccgagctgtgcttgtggctgcggctgctaactggctgcgcacagggagctgtcaccatgcctcactcgtacccagccctttctgctgagcagaagaaggagttgtctgacattgccctgcggattgtagccccgggcaaaggcattctggctgcggatgagtctgtaggcagcatggccaagcggctgagccaaattggggtggaaaacacagaggagaaccgccggctgtaccgccaggtcctgttcagtgctgatgaccgtgtgaaaaagtgcattggaggcgtcattttcttccatgagaccctctaccagaaagatgataatggtgttcccttcgtccgaaccatccaggataagggcatcgtcgtgggcatcaaggttgacaagggtgtggtgcctctagctgggactgatggagaaaccaccactcaagggctggatgggctctcagaacgctgtgcccaatacaagaaggatggtgctgactttgccaagtggcgctgtgtgctgaaaatcagtgagcgtacaccctctgcacttgccattctggagaacgccaacgtgctggcccgttatgccagtatctgccagcagaatggcattgtgcctattgtggaacctgaaatattgcctgatggagaccacgacctcaaacgttgtcagtatgttacagagaaggtcttggctgctgtgtacaaggccctgagtgaccatcatgtatacctggaggggaccctgctcaagcccaacatggtgaccccgggccatgcctgtcccatcaagtataccccagaggagattgccatggcaactgtcactgccctgcgtcgcactgtgcccccagctgtcccaggagtgaccttcctgtctgggggtcagagcgaagaagaggcatcattcaacctcaatgccatcaaccgctgcccccttccccgaccctgggcgcttaccttctcctatgggcgtgccctgcaagcctctgcactcaatgcctggcgagggcaacgggacaatgctggggctgccactgaggagttcatcaagcgggctgaggtgaatgggcttgcagcccagggcaagtatgaaggcagtggagaagatggtggagcagcagcacagtcactctacattgccaaccatgcctactgagtatccactccataccacagcccttggcccagccatctgcacccacttttgcttgtagtcatggccagggccaaatagctatgcagagcagagatgccttcacctggcaccaacttgtcttcctttctctcttcccttcccctctctcattgctgcacctgggaccataggatgggaggatagggagcccctcatgactgagggcagaagaaattgctagaagtcagaacaggatggctgggtctccccctacctcttccagctcccacaattttcccatgatgaggtagcttctccctgggctctccttcttgcctgccctgtctcctgggatcagagggtagtacagaagccctgactcatgccttgagtacataccatacagcaaataaatggtagcaaaacattcta

SEQ ID NO: 153474 - DNA, 1708 bp, Artificial Sequence
  derived and/or modified sequence
cccggaggagtcacgtagctctgcgacatccgcagcctcatttaccagagggagccagggctgcagcctcatctgtttgcggatcagaacccgagctgtgcttgtggctgcggctgctaactggctgcgcacagaagctgagagaagagggtggcaataagtacttttgcctcattctgaagccttggaaggagctgtcaccatgcctcactcgtacccagccctttctgctgagcagaagaaggagttgtctgacattgccctgcggattgtagccccgggcaaaggcattctggctgcggatgagtctgtaggcagcatggccaagcggctgagccaaattggggtggaaaacacagaggagaaccgccggctgtaccgccaggtcctgttcagtgctgatgaccgtgtgaaaaagtgcattggaggcgtcattttcttccatgagaccctctaccagaaagatgataatggtgttcccttcgtccgaaccatccaggataagggcatcgtcgtgggcatcaaggttgacaagggtgtggtgcctctagctgggactgatggagaaaccaccactcaagggctggatgggctctcagaacgctgtgcccaatacaagaaggatggtgctgactttgccaagtggcgctgtgtgctgaaaatcagtgagcgtacaccctctgcacttgccattctggagaacgccaacgtgctggcccgttatgccagtatctgccagcagaatggcattgtgcctattgtggaacctgaaatattgcctgatggagaccacgacctcaaacgttgtcagtatgttacagagaaggtcttggctgctgtgtacaaggccctgagtgaccatcatgtatacctggaggggaccctgctcaagcccaacatggtgaccccgggccatgcctgtcccatcaagtataccccagaggagattgccatggcaactgtcactgccctgcgtcgcactgtgcccccagctgtcccaggagtgaccttcctgtctgggggtcagagcgaagaagaggcatcattcaacctcaatgccatcaaccgctgcccccttccccgaccctgggcgcttaccttctcctatgggcgtgccctgcaagcctctgcactcaatgcctggcgagggcaacgggacaatgctggggctgccactgaggagttcatcaagcgggctgaggtgaatgggcttgcagcccagggcaagtatgaaggcagtggagaagatggtggagcagcagcacagtcactctacattgccaaccatgcctactgagtatccactccataccacagcccttggcccagccatctgcacccacttttgcttgtagtcatggccagggccaaatagctatgcagagcagagatgccttcacctggcaccaacttgtcttcctttctctcttcccttcccctctctcattgctgcacctgggaccataggatgggaggatagggagcccctcatgactgagggcagaagaaattgctagaagtcagaacaggatggctgggtctccccctacctcttccagctcccacaattttcccatgatgaggtagcttctccctgggctctccttcttgcctgccctgtctcctgggatcagagggtagtacagaagccctgactcatgccttgagtacataccatacagcaaataaatggtagcaaaacattcta

SEQ ID NO: 153475 - DNA, 579 bp, Artificial Sequence
  derived and/or modified sequence
agtctcatctctctctcaggctctctactcctttcagccttggtcctctgccctcccgtctgggtgtctgagttgtggggaattgaagtgcttcctattgctatcctcctgccaaacagggagctgtcaccatgcctcactcgtacccagccctttctgctgagcagaagaaggagttgtctgacattgccctgcggattgtagccccgggcaaaggcattctggctgcggatgagtctgtaggcagcatggccaagcggctgagccaaattggggtggaaaacacagaggagaaccgccggctgtaccgccaggtcctgttcagtgctgatgaccgtgtgaaaaagtgcattggaggcgtcattttcttccatgagaccctctaccagaaagatgataatggtgttcccttcgtccgaaccatccaggataagggcatcgtcgtgggcatcaaggttgacaagggtgtggtgcctctagctgggactgatggagaaaccaccactcaagggctggatgggctctcagaacgctgtgcccaatacaagaaggatggtgctgactttgccaagtggcgct

SEQ ID NO: 153476 - DNA, 1095 bp, Artificial Sequence
  derived and/or modified sequence
atgccccacagctaccccgccctgagcgccgagcagaagaaggagctgagcgacattgcactcaggattgtggcacccggcaagggcattctggctgcggacgaatccgtcgggtccatggccaagaggctgtcacagataggcgttgagaacactgaggagaaccgaagactgtatagacaggtgctgttttccgctgatgaccgtgtgaaaaaatgcattgggggcgtgatttttttccatgagaccctgtatcagaaagacgacaatggagtgcctttcgtgcgcaccatacaggacaaaggcatcgttgttggaatcaaggtagataaaggagttgtgccactggctggtacggacggcgaaactactacacaaggcctggacgggctctcagaacgatgtgcacagtacaagaaagatggcgctgactttgcgaagtggaggtgtgtcctcaaaatctctgaaaggaccccttctgccctggctatccttgagaatgcaaacgtgctcgctaggtatgcctccatatgtcagcagaacggcatagttcccatcgtggaaccagaaatcctgccagacggagaccacgatctgaagcggtgccagtatgtgaccgaaaaagtgcttgccgcagtgtacaaagccttgtccgaccaccatgtatatctggaggggactcttttaaaaccgaatatggtgactcccggtcacgcatgcccgataaagtacaccccagaggaaatcgctatggccacggtgactgccctacgccgcaccgtgcccccggcagtaccaggggttaccttcttatctgggggacaatcggaggaggaggcctcttttaatctgaacgctattaatcgctgccctctgccccgcccttgggcactgaccttcagttacggcagagccctccaggcttctgctctcaacgcttggcgaggtcagcgggataatgccggagcagccactgaagagttcatcaagcgggcagaggtgaatggcctggcagcacaggggaagtacgagggctccggagaggatggaggagcggcagcgcaatctctgtacatcgctaatcatgcttactag

SEQ ID NO: 153477 - DNA, 450 bp, Artificial Sequence
  derived and/or modified sequence
atgccccacagctaccccgccctgagcgccgagcagaagaaggagttatcagatatcgccctgcgtattgtcgcgcccggcaagggaatactggctgcagacgaatccgtaggttccatggctaagaggctttctcaaatcggggtcgaaaacaccgaggaaaacagaagattgtacaggcaagtgctgttcagtgccgacgacagagtcaaaaagtgtattggtggcgttatctttttccacgagacgctataccagaaggatgataatggtgtgcctttcgtgcggacgatccaggacaaaggcatcgtggtaggcatcaaagtagataagggagtggtcccactggccggcactgacggagaaaccactacacagggcttagatggactgtctgaaaggtgtgctcagtacaagaaggatggtgcggatttcgcaaaatggcgctag

SEQ ID NO: 153478 - DNA, 1095 bp, Artificial Sequence
  derived and/or modified sequence
atgccccacagctaccccgccctgagcgccgagcagaagaaggagctgagtgatattgccctgcgcatcgtcgcccctgggaaaggcatcttagccgctgacgagtctgtaggaagcatggccaagcgactcagccagatcggtgttgaaaataccgaagagaatcggagactgtaccgccaagtgttgtttagtgccgacgatagagttaagaagtgtattgggggtgtgatctttttccatgagaccctgtatcagaaagatgacaatggcgttcctttcgttaggacaatacaagataagggtattgtagttggtataaaggtggacaaaggggtggtaccactggcaggaacggatggggagactacaacacagggcttggatggcctgtccgaacgctgcgcccaatacaagaaagatggagcagatttcgctaagtggcgctgtgttttgaagattagcgagcggacaccttcggccctggccatacttgaaaatgcgaatgttctcgctaggtacgcttcaatttgccaacagaacggaatcgtccctatcgtggagcccgagattctccccgacggagatcatgatctcaagcggtgtcaatatgtgactgaaaaggtcctggccgccgtgtacaaggctctgtccgatcatcacgtgtaccttgagggaacactgctgaagcccaacatggttacccccggacatgcttgtcccatcaaatatactcccgaagagatcgccatggctactgtcacagccttgcggcggacagtgcccccagcggtgcccggggtcacatttctctcgggaggacaatctgaagaagaggcatctttcaatctgaatgctatcaataggtgtcctctgcctagaccttgggccttgacattcagctatggaagggccctccaggccagcgccctgaacgcatggcgcgggcagagggataacgccggcgctgcaactgaagagttcatcaaacgtgcggaagtgaacggtcttgctgcacaaggtaaatacgagggaagcggggaggatggaggcgctgcagcacaaagcctgtatattgctaaccatgcctattag

SEQ ID NO: 153479 - DNA, 1095 bp, Artificial Sequence
  derived and/or modified sequence
atgccgcactcttaccctgctttaagcgccgagcagaaaaaagagctcagcgacatcgcactgcggatcgtggcgcctggaaaggggatccttgcagccgacgagtcagtgggatctatggccaagcgtcttagtcagataggcgtagagaacactgaagagaaccggcgactatatcgccaggtgctgttcagcgctgatgatcgagtgaagaaatgcattggaggcgtgattttcttccacgagacgctttatcaaaaggacgacaatggagtgcccttcgtccgtacaattcaggacaaaggcatcgttgtgggcatcaaggtcgacaagggggtagtgcccctagccggtacagacggggagacaaccacacagggactcgacggactgtctgagaggtgcgcccagtacaagaaggatggggcagatttcgccaaatggaggtgtgtgctgaaaatttctgagagaactccctctgccttggcaatactcgagaacgccaacgtgcttgcccgatatgcttccatttgccagcagaacggtattgtgcctatagtagaaccggaaattttgcctgacggtgatcacgatctgaagcgctgtcagtacgttacagaaaaagttctggccgcagtttacaaggctctcagcgaccatcacgtttacttggaggggactctcctaaagcccaacatggtcacaccgggtcatgcttgcccgatcaaatatacaccagaagagatagcgatggccaccgtgactgccctgaggaggaccgtcccacctgccgtgcctggagttacctttctgtcaggcggtcagtcagaggaggaagcctcattcaaccttaatgctatcaatcgctgcccattaccacggccttgggcccttacattcagctatggcagagccctgcaggcgagcgccctcaacgcgtggagagggcagagagataatgcaggcgcagcaaccgaagagttcataaaaagagccgaagtcaacgggttagcagcacagggcaaatacgaaggctccggagaggatgggggagctgcagcccagagtctctatattgctaaccacgcttactag

SEQ ID NO: 153480 - DNA, 450 bp, Artificial Sequence
  derived and/or modified sequence
atgccacacagctacccggctttgagcgcagagcagaagaaggagctttctgatatagccctgaggatagtggcacctggcaagggcattctggcggctgacgaaagcgttggcagcatggccaagaggctttcccagatcggcgtggagaacaccgaggagaatcggcgactgtatcgccaggtcctgttttccgctgatgacagggtcaaaaagtgtattggaggggtaatattcttccacgagactctatatcagaaagacgacaacggtgtgcccttcgtgcgcactatccaggataaggggattgtcgtgggcatcaaggttgacaaaggggtggttccactggccggaaccgacggcgaaacaaccacacagggcttagacggcttgagcgaaaggtgtgcccaatacaaaaaggacggagcagacttcgctaagtggcgatag

SEQ ID NO: 153481 - DNA, 1095 bp, Artificial Sequence
  derived and/or modified sequence
atgccgcactcataccccgcactgagcgccgagcaaaaaaaagaactgtctgatatcgctctgaggatcgtggcccctggtaagggcattctcgccgcagacgagtcagttgggtctatggcgaaacggctctctcagatcggagtggaaaataccgaagagaatcgtcgcttgtatcgccaggtcctcttttctgctgatgaccgggtgaaaaagtgcattgggggtgtcatctttttccatgagacactgtaccagaaagatgacaatggggtgcccttcgtcagaacaatccaggacaaaggaattgtcgtgggcatcaaagtggacaagggcgtggtaccacttgccggaactgacggggagacaacgacgcaagggttggacggtctgtccgagcgctgcgcccagtacaagaaggacggggctgatttcgcaaaatggaggtgcgtcttgaagataagtgaaaggacgccctccgctctggcaatcctcgagaacgcgaatgtcttagccagatatgcctctatttgccagcagaatgggatcgttccgatcgtggagccagagatacttccagatggcgatcacgatttgaagcggtgccagtatgttacagagaaggtgctggctgccgtgtataaagcattaagcgatcaccatgtgtacctggaagggacactgctgaaacccaatatggttacccccggtcatgcttgtcccatcaagtacacccctgaggagattgccatggccaccgtgaccgcactgcgcaggactgtgccaccagccgtgccaggtgtcacgtttctttccggagggcaaagtgaggaggaggcctctttcaaccttaatgcgatcaacagatgtcctctgccacggccttgggctctaacgttctcctatggacgcgcactgcaggccagcgctctcaacgcgtggaggggccagcgggataacgccggagccgcaaccgaggaatttatcaagcgggctgaggtgaatgggctggccgcacaaggcaaatacgaaggctcaggcgaagatggtggggctgccgctcagagcttatacattgcaaatcatgcctattag

SEQ ID NO: 153482 - DNA, 1095 bp, Artificial Sequence
  derived and/or modified sequence
atgccccacagctaccccgccctgagcgccgagcagaagaaggagctgagcgacatcgccctgagaatcgtggcccccggcaagggcatcctggccgccgacgagagcgtgggcagcatggccaagagactgagccagatcggcgtggagaacaccgaggagaacagaagactgtacagacaggtgctgttcagcgccgacgacagagtgaagaagtgcatcggcggcgtgatcttcttccacgagaccctgtaccagaaggacgacaacggcgtgcccttcgtgagaaccatccaggacaagggcatcgtggtgggcatcaaggtggacaagggcgtggtgcccctggccggcaccgacggcgagaccaccacccagggcctggacggcctgagcgagagatgcgcccagtacaagaaggacggcgccgacttcgccaagtggagatgcgtgctgaagatcagcgagagaacccccagcgccctggccatcctggagaacgccaacgtgctggccagatacgccagcatctgccagcagaacggcatcgtgcccatcgtggagcccgagatcctgcccgacggcgaccacgacctgaagagatgccagtacgtgaccgagaaggtgctggccgccgtgtacaaggccctgagcgaccaccacgtgtacctggagggcaccctgctgaagcccaacatggtgacccccggccacgcctgccccatcaagtacacccccgaggagatcgccatggccaccgtgaccgccctgagaagaaccgtgccccccgccgtgcccggcgtgaccttcctgagcggcggccagagcgaggaggaggccagcttcaacctgaacgccatcaacagatgccccctgcccagaccctgggccctgaccttcagctacggcagagccctgcaggccagcgccctgaacgcctggagaggccagagagacaacgccggcgccgccaccgaggagttcatcaagagagccgaggtgaacggcctggccgcccagggcaagtacgagggcagcggcgaggacggcggcgccgccgcccagagcctgtacatcgccaaccacgcctactag

SEQ ID NO: 153483 - DNA, 450 bp, Artificial Sequence
  derived and/or modified sequence
atgccccacagctaccccgccctgagcgccgagcagaagaaggagctgagcgacatcgccctgagaatcgtggcccccggcaagggcatcctggccgccgacgagagcgtgggcagcatggccaagagactgagccagatcggcgtggagaacaccgaggagaacagaagactgtacagacaggtgctgttcagcgccgacgacagagtgaagaagtgcatcggcggcgtgatcttcttccacgagaccctgtaccagaaggacgacaacggcgtgcccttcgtgagaaccatccaggacaagggcatcgtggtgggcatcaaggtggacaagggcgtggtgcccctggccggcaccgacggcgagaccaccacccagggcctggacggcctgagcgagagatgcgcccagtacaagaaggacggcgccgacttcgccaagtggagatag

SEQ ID NO: 153484 - protein, 611 aa, Artificial Sequence
  derived and/or modified sequence
MLASLEKDKTAPGSAQVAGLCGRLTLHRDLRTGRWEPDPQRSRRCLRDPQRVLEYCRQMYPELQIARVEQATQAIPMERWCGGSRSGSCAHPHHQVVPFRCLPGEFVSEALLVPEGCRFLHQERMDQCESSTRRHQEAQEACSSQGLILHGSGMLLPCGSDRFRGVEYVCCPPPGTPDPSGTAVGDPSTRSWPPGSRVEGAEDEEEEESFPQPVDDYFVEPPQAEEEEETVPPPSSHTLAVVGKVTPTPRPTDGVDIYFGMPGEISEHEGFLRAKMDLEERRMRQINEVMREWAMADNQSKNLPKADRQALNEHFQSILQTLEEQVSGERQRLVETHATRVIALINDQRRAALEGFLAALQADPPQAERVLLALRRYLRAEQKEQRHTLRHYQHVAAVDPEKAQQMRFQVHTHLQVIEERVNQSLGLLDQNPHLAQELRPQIQELLHSEHLGPSELEAPAPGGSSEDKGGLQPPDSKDDTPMTLPKGSTEQDAASPEKEKMNPLEQYERKVNASVPRGFPFHSSEIQRDELAPAGTGVSREAVSGLLIMGAGGGSLIVLSMLLLRRKKPYGAISHGVVEVDPMLTLEEQQLRELQRHGYENPTYRFLEERP

SEQ ID NO: 153485 - DNA, 1836 bp, Artificial Sequence
  derived and/or modified sequence
atgttagcatctctagagaaagacaaaacagcacccgggagcgcccaggtggcgggcctgtgcggcagattaaccctccaccgcgacttaaggaccggacgatgggagcctgacccacagcgctcccgccggtgcctgcgagaccctcaacgagtgctggaatattgtcggcagatgtaccctgagctgcagatcgccagggtagagcaggccacgcaggccattccaatggagcggtggtgcggtggctctcgcagcggatcttgtgcacaccctcaccaccaggttgtgccctttagatgcctgccgggtgaattcgtatcagaagcacttctcgtcccagagggatgtcgtttccttcaccaggaacggatggaccaatgtgagtcaagcacccgaagacatcaagaagcacaggaagcttgtagctcccagggactcattctgcacgggtcaggcatgctgctgccttgtggctcggataggttccggggagtagagtacgtgtgctgccctccacctggcactcccgacccaagcggaacagccgtgggcgatccctcaaccaggtcatggccccctggatctcgggtggaaggggccgaagatgaggaggaggaagagtctttcccccagccagttgatgactatttcgtggaacccccgcaggccgaagaagaggaagagactgtccccccaccctccagtcacacactagccgtagtgggcaaagtcaccccaactcctaggcccaccgacggcgtagacatttacttcggcatgccaggtgaaataagcgaacacgagggtttcttgcgggccaagatggacctggaagaaaggaggatgcgacagattaacgaggtgatgagggaatgggccatggcggacaatcaatcgaagaacctgcccaaggctgatagacaggcattgaatgaacacttccagtccattcttcagacgctcgaagagcaagtaagcggagagcgccagcggctggttgaaacccacgccactagagttattgccctcattaacgaccagcgcagggcagccttggaaggattcttggctgcactccaggcagatcctcctcaggccgagcgcgttctcttagctttgcgcaggtacctacgagctgagcagaaggaacaaaggcacactctaagacattaccagcatgtggctgccgtggaccctgaaaaagcccagcagatgcgctttcaggtccatacacacctccaagtgatcgaggagcgggttaatcagagcctcggactgcttgaccagaatcctcacctcgctcaggaattgagacctcagatccaggaattgctgcacagtgaacacctaggaccatctgaactggaggctcctgcgccaggcggcagcagtgaggacaaaggcggactccaaccccctgacagcaaagacgatactcccatgaccttgcccaagggttctacggaacaggacgccgcctctcctgaaaaagagaaaatgaatcccctggagcagtatgagagaaaagtgaacgcttctgtgccaaggggatttcccttccactcaagtgagatccagagggacgagctggcccccgccggcactggggtgtcgcgcgaggcggtgtctggactgctgataatgggtgccggcgggggaagcctcatagtgctgtctatgttactgttgaggcgaaagaagccctacggggccatatctcacggagttgtggaggttgaccccatgttgactcttgaagagcaacagttgagggaattgcagaggcatggatacgagaatccaacctatcgttttctggaggagcggccttag

SEQ ID NO: 153486 - DNA, 1836 bp, Artificial Sequence
  derived and/or modified sequence
atgctggccagcctggagaaggacaagacagcccctggcagcgcccaggtggccggcctgtgtggccgcctgaccctgcaccgggacctgaggacaggccgctgggagccagacccccagaggagccgccgctgcctgcgggacccccagagggtgctggagtactgccggcagatgtacccagagctgcagatcgcccgggtggagcaggccacccaggccatccccatggagcgctggtgtggcggcagccgcagcggcagctgtgcccacccccaccaccaggtggtgcccttccgctgcctgcctggagaatttgtgtctgaggccctgctggtgcctgagggctgccgcttcctgcaccaggagaggatggaccagtgtgagagcagcaccaggaggcaccaggaggcccaggaggcctgcagcagccagggcctcatcctgcacggcagcggcatgctgctgccctgtggcagtgaccgcttccggggcgtggagtatgtgtgctgccccccacctggcaccccagaccccagcggcacagctgtgggggaccccagcaccaggtcctggcccccaggcagccgggtggagggcgcagaagatgaggaggaggaggagagcttcccccagcctgtggatgactactttgtggagcccccccaggccgaggaggaggaggagaccgtgcccccacccagcagccacaccctggccgtggtgggcaaggtgacccccaccccccggcccacagatggagtggacatctacttcggcatgcctggagagatcagcgagcacgagggcttcctgcgggccaagatggacctggaggagaggaggatgaggcagatcaatgaggtgatgagggagtgggccatggctgacaaccagagcaagaacctgcccaaggctgaccggcaggccctgaatgagcacttccagagcatcctgcagaccctggaggagcaggtgtctggagagcggcagaggctggtggagacccacgccaccagggtcatcgccctgatcaatgaccagaggagagctgccctggagggcttcctggccgccctgcaggccgaccccccccaggccgagcgggtgctgctggccctgcggcgctacctgcgggcagagcagaaggagcagaggcacaccctgcggcactaccagcacgtggccgctgtggaccctgagaaggcccagcagatgaggttccaggtgcacacccacctgcaggtgattgaggagcgggtgaaccagagcctgggcctgctggaccagaacccccacctggcccaggagctgcggccccagatccaggagctgctgcacagcgagcacctgggccccagcgagctggaggccccagcccctgggggcagcagcgaggacaagggcggcctgcagcccccagacagcaaggatgacacccccatgaccctgcccaagggcagcacagagcaggatgctgccagccctgagaaggagaagatgaaccccctggagcagtatgaaaggaaggtgaatgcctctgtgccccggggcttccccttccacagcagcgagatccagagagatgagctggccccagctggcaccggggtgtcccgggaggccgtgtctggcctgctgatcatgggcgccggcggcggcagcctgattgtgctgtccatgctgctgctgcggaggaagaagccctacggggccatcagccatggagtggtggaggtggaccccatgctgaccctggaggagcagcagctgcgggagctgcagagacatggctatgagaaccccacctaccgcttcctggaggagcggccctag

SEQ ID NO: 153487 - DNA, 1836 bp, Artificial Sequence
  derived and/or modified sequence
atgctggccagcctggagaaggacaagaccgcccccggcagcgcccaggttgccgggctttgtggcagactcactcttcatcgagatctacgcactgggcgatgggagcctgaccctcaaagatcaaggcggtgcctgagggacccgcagagggttctcgagtactgccgccaaatgtaccctgaactgcagatagctcgggtcgaacaggctacacaagcgatcccaatggaacggtggtgtggcgggtcacgaagtggttcttgcgctcaccctcatcaccaggtcgtccccttcaggtgcctaccaggcgagtttgtatccgaggctctgcttgtgccggaggggtgcaggtttctgcaccaggagcgtatggaccaatgcgagtcgagcacaagaagacaccaggaggcccaggaagcctgttcttcacagggcctgatacttcatgggtcgggcatgctactaccttgtgggagcgaccggtttagaggtgtggagtacgtgtgctgtccacctccaggcacaccagaccccagcggcacggccgtgggagatcccagcacaagatcatggcccccgggaagccgggtggagggcgccgaagatgaggaagaagaagagtccttcccccaacctgttgacgattattttgtagagcccccgcaagcggaggaggaggaagagaccgtgcctcccccatcatctcatacccttgctgttgtgggaaaggttacgccaaccccaagaccaacagatggagtggacatttacttcggtatgccaggggagatctccgagcatgagggattcctgcgggctaagatggacctggaggagagaagaatgcgacagataaatgaggtgatgcgggagtgggccatggctgacaaccaatcaaagaatctgcccaaggccgatcgccaggcattaaatgaacactttcagagcatcctgcagacactggaggaacaggtgagcggagagaggcagcggctggtggagacccatgctacccgagttatcgccctgatcaatgatcagcgtcgcgcggcacttgaaggattcctggcggcactgcaagcggatcccccccaggctgaaagagtcctgttagctctgaggcggtatctgcgcgcggagcagaaagagcagcgacatactctgagacactatcagcacgtagccgcagtggatccagagaaagcccaacagatgcgatttcaggtgcacacccacttgcaggtaatcgaggagagggtaaaccagagcctcgggctgctggatcagaatccccatctcgctcaagagctaagacctcaaatccaagaactgctccattccgaacatctcggtccctcagaacttgaggccccagccccaggtgggagcagcgaggataaaggtggattacaacctcctgatagcaaagacgatactcccatgaccctgccaaagggaagcacagagcaagatgccgcttcacctgaaaaagaaaagatgaatcctttggaacaatatgagagaaaggtgaacgcgagcgtgcccaggggcttccctttccacagctccgagattcaacgcgacgagttggctccagctggcaccggagttagccgagaggcggttagcggcctgctgatcatgggagctggaggtggtagcttgattgtcctttcaatgctgttgctgcgccggaaaaagccatatggtgcgatctcacatggtgtggtggaggtggatccaatgctgacgcttgaggagcagcagctgagagagctgcagaggcacggatacgaaaatccgacttacagattcctggaggaaaggccctag

SEQ ID NO: 153488 - DNA, 1929 bp, Artificial Sequence
  derived and/or modified sequence
ggtctctgatgcttgcatccttggaaaaggacaaaactgccccggggtcggcccaggtggctggactatgcgggcgcctaacccttcaccgggacctgcgcaccggccgctgggaaccagacccacagcgctctcgacgctgtctccgggacccgcagcgcgtgctggagtactgcagacagatgtacccggagctgcagattgcacgtgtggagcaggctacgcaggccatccccatggagcgctggtgcgggggttcccggagcggcagctgcgcccacccccaccaccaggttgtgcccttccgctgcctgcctggtgaatttgtgagtgaggccctgctggtgcctgaaggctgccggttcttgcaccaggagcgcatggaccaatgtgagagttcaacccggaggcatcaggaggcacaggaggcctgcagctcccagggcctcatcctgcacggctcgggcatgctcttaccctgtggctcggatcggttccgtggtgtggagtatgtgtgctgtccccctccagggacccccgacccatctgggacagcagttggtgacccctccacccggtcctggcccccggggagcagagtagagggggctgaggacgaggaagaggaggaatccttcccacagccagtagatgattacttcgtggagcctccgcaggctgaagaggaagaggaaacggtcccacccccaagctcccatacacttgcagtggtcggcaaagtcactcccaccccgaggcccacagacggtgtggatatttactttggcatgcctggggaaatcagtgagcacgaggggttcctgagggccaagatggacctggaggagcgtaggatgcgccagattaatgaggtgatgcgtgaatgggccatggcagacaaccagtccaagaacctgcctaaagccgacagacaggccctgaatgagcacttccagtccattctgcagactctggaggagcaggtgtctggtgagcgacagcgcctggtggaaacccacgccacccgcgtcatcgcccttatcaacgaccagcgccgggctgccttggagggcttcctggcagccctgcaggcagatccgcctcaggcggagcgtgtcctgttggccctgcggcgctacctgcgtgcggagcagaaggaacagaggcacacgctgcgccactaccagcatgtggccgccgtggatcccgagaaggcacagcagatgcgcttccaggtgcatacccaccttcaagtgattgaggagagggtgaatcagagcctgggcctgcttgaccagaacccccacctggctcaggagctgcggccccaaatccaggaactcctccactctgaacacctgggtcccagtgaattggaagcccctgcccctgggggcagcagcgaggacaagggtgggctgcagcctccagattccaaggatgacacccccatgacccttccaaaagggtccacagaacaagatgctgcatcccctgagaaagagaagatgaacccgctggaacagtatgagcgaaaggtgaatgcgtctgttccaaggggtttccctttccactcatcggagattcagagggatgagctggcaccagctgggacaggggtgtcccgtgaggctgtgtcgggtctgctgatcatgggagcgggcggaggctccctcatcgtcctctccatgctgctcctgcgcaggaagaagccctacggggctatcagccatggcgtggtggaggtggaccccatgctgaccctggaggagcagcagctccgcgaactgcagcggcacggctatgagaaccccacttaccgcttcctggaggaacgaccctgacccggcccccttcaccccttcagccgagcccagacctcccctcttcctggagccccagaaccccaactcccagcctagggcagca

SEQ ID NO: 153489 - DNA, 1836 bp, Artificial Sequence
  derived and/or modified sequence
atgctcgcttctcttgagaaggataaaaccgctccgggaagtgcccaggtagcaggcctgtgcggcagactcaccttgcatcgtgatctgcgcaccggcaggtgggaacctgacccacagcggtcacgaagatgtctccgggacccacaaagagtgttagaatactgtcgccagatgtaccccgagctacagatcgcacgggtggaacaggctacgcaggccatccctatggagcgctggtgtggtggctcacgctccggtagctgcgcgcatcctcaccatcaagtggtaccttttcggtgcctgcccggagaattcgtgtccgaagcgctgctggtccctgaaggttgtcggtttctgcatcaggagcgcatggatcagtgcgagagttccacgagacggcatcaagaagcccaggaagcctgttcttcccagggactgatactgcacgggagcgggatgctgctcccctgcgggagcgatcggtttcgtggagtcgaatacgtttgctgccctccacctgggacccccgatccctcaggaacagccgtcggggacccaagcacccggagctggccaccaggttctagggtagagggagccgaggacgaagaagaagaggagtcatttccgcagccggtggacgattactttgttgagcctcctcaagcggaagaggaggaggaaaccgtgccgcctccttcttcccacaccctcgccgttgtcggtaaagttacacctacaccccgtcctactgacggcgtcgacatctattttggaatgcccggagaaatcagtgagcatgagggttttctgcgggctaaaatggacttggaggagagacgaatgcgccaaataaatgaagtgatgagggagtgggctatggctgacaatcagagcaaaaatctgcctaaagctgaccggcaggccctgaatgagcatttccagtccatacttcagactctggaagagcaggtgtccggcgagaggcagagactcgtggagactcacgcgactcgagtaatcgcactgataaacgaccaaaggcgtgctgcactggaaggatttctggctgcccttcaagcagacccaccccaggccgaacgcgttctgctggccttgcgtagatatctgagagcggagcaaaaggagcagcgacacacccttcgccattatcagcacgtggccgcagtcgaccccgaaaaagcccagcagatgcgctttcaggtgcacacccatttgcaagttatagaagagagagtcaatcagtctctggggttgctggatcagaatccccacctggcacaggaactgcgcccacagattcaggagctccttcattcggagcacctcggaccaagcgagctcgaggcacccgctcccggagggagtagcgaggataaaggcggtctgcagcccccagatagcaaagacgacactccaatgacgttgcctaaaggatctaccgaacaggacgccgctagtcccgaaaaggaaaagatgaaccccctcgagcagtacgagcgcaaggtcaatgcttccgtgcccagggggtttccatttcattcctcagagatccagagagatgagctggctccggctggcaccggagtcagcagagaggccgtctctgggctgctgataatgggcgctggcggaggctccctaatcgtgctgagcatgctgctgcttcgaagaaaaaagccatatggcgctatctcccacggggtggtagaagtggatcccatgctgacactggaggagcaacaactaagggagctgcaacgccacggttatgaaaaccctacgtaccgctttctcgaggagcgcccttag

SEQ ID NO: 153490 - DNA, 1836 bp, Artificial Sequence
  derived and/or modified sequence
atgctggccagcctggagaaggacaagaccgcccccggcagcgcccaggtggccggcctgtgcggcagactgaccctgcacagagacctgagaaccggcagatgggagcccgacccccagagaagcagaagatgcctgagagacccccagagagtgctggagtactgcagacagatgtaccccgagctgcagatcgccagagtggagcaggccacccaggccatccccatggagagatggtgcggcggcagcagaagcggcagctgcgcccacccccaccaccaggtggtgcccttcagatgcctgcccggcgagttcgtgagcgaggccctgctggtgcccgagggctgcagattcctgcaccaggagagaatggaccagtgcgagagcagcaccagaagacaccaggaggcccaggaggcctgcagcagccagggcctgatcctgcacggcagcggcatgctgctgccctgcggcagcgacagattcagaggcgtggagtacgtgtgctgccccccccccggcacccccgaccccagcggcaccgccgtgggcgaccccagcaccagaagctggccccccggcagcagagtggagggcgccgaggacgaggaggaggaggagagcttcccccagcccgtggacgactacttcgtggagcccccccaggccgaggaggaggaggagaccgtgcccccccccagcagccacaccctggccgtggtgggcaaggtgacccccacccccagacccaccgacggcgtggacatctacttcggcatgcccggcgagatcagcgagcacgagggcttcctgagagccaagatggacctggaggagagaagaatgagacagatcaacgaggtgatgagagagtgggccatggccgacaaccagagcaagaacctgcccaaggccgacagacaggccctgaacgagcacttccagagcatcctgcagaccctggaggagcaggtgagcggcgagagacagagactggtggagacccacgccaccagagtgatcgccctgatcaacgaccagagaagagccgccctggagggcttcctggccgccctgcaggccgaccccccccaggccgagagagtgctgctggccctgagaagatacctgagagccgagcagaaggagcagagacacaccctgagacactaccagcacgtggccgccgtggaccccgagaaggcccagcagatgagattccaggtgcacacccacctgcaggtgatcgaggagagagtgaaccagagcctgggcctgctggaccagaacccccacctggcccaggagctgagaccccagatccaggagctgctgcacagcgagcacctgggccccagcgagctggaggcccccgcccccggcggcagcagcgaggacaagggcggcctgcagccccccgacagcaaggacgacacccccatgaccctgcccaagggcagcaccgagcaggacgccgccagccccgagaaggagaagatgaaccccctggagcagtacgagagaaaggtgaacgccagcgtgcccagaggcttccccttccacagcagcgagatccagagagacgagctggcccccgccggcaccggcgtgagcagagaggccgtgagcggcctgctgatcatgggcgccggcggcggcagcctgatcgtgctgagcatgctgctgctgagaagaaagaagccctacggcgccatcagccacggcgtggtggaggtggaccccatgctgaccctggaggagcagcagctgagagagctgcagagacacggctacgagaaccccacctacagattcctggaggagagaccctag

SEQ ID NO: 153491 - protein, 244 aa, Artificial Sequence
  derived and/or modified sequence
MKERRASQKLSSKSIMDPNQNVKCKIVVVGDSQCGKTALLHVFAKDCFPENYVPTVFENYTASFEIDTQRIELSLWDTSGSPYYDNVRPLSYPDSDAVLICFDISRPETLDSVLKKWKGEIQEFCPNTKMLLVGCKSDLRTDVSTLVELSNHRQTPVSYDQGANMAKQIGAATYIECSALQSENSVRDIFHVATLACVNKTNKNVKRNKSQRATKRISHMPSRPELSAVATDLRKDKAKSCTVM

SEQ ID NO: 153492 - protein, 115 aa, Artificial Sequence
  derived and/or modified sequence
MLLVGCKSDLRTDVSTLVELSNHRQTPVSYDQGANMAKQIGAATYIECSALQSENSVRDIFHVATLACVNKTNKNVKRNKSQRATKRISHMPSRPELSAVATDLRKDKAKSCTVM

SEQ ID NO: 153493 - protein, 116 aa, Artificial Sequence
  derived and/or modified sequence
MKERRASQKLSSKSIMDPNQNVKCKIVVVGDSQCGKTALLHVFAKDCFPENYVPTVFENYTASFEIDTQRIELSLWDTSGSPYYDNVRPLSYPDSDAVLICFDISRPETLDSVLKK

SEQ ID NO: 153494 - DNA, 735 bp, Artificial Sequence
  derived and/or modified sequence
atgaaggagagaagagccagccagaagctgagcagcaagagcatcatggaccccaaccagaacgtgaagtgcaagatcgtggtggtgggcgacagccagtgcggcaagaccgccctgctgcacgtgttcgccaaggactgcttccccgagaactacgtgcccaccgtgttcgagaactacaccgccagcttcgagatcgacacccagagaatcgagctgagcctgtgggacaccagcggcagcccctactacgacaacgtgagacccctgagctaccccgacagcgacgccgtgctgatctgcttcgacatcagcagacccgagaccctggacagcgtgctgaagaagtggaagggcgagatccaggagttctgccccaacaccaagatgctgctggtgggctgcaagagcgacctgagaaccgacgtgagcaccctggtggagctgagcaaccacagacagacccccgtgagctacgaccagggcgccaacatggccaagcagatcggcgccgccacctacatcgagtgcagcgccctgcagagcgagaacagcgtgagagacatcttccacgtggccaccctggcctgcgtgaacaagaccaacaagaacgtgaagagaaacaagagccagagagccaccaagagaatcagccacatgcccagcagacccgagctgagcgccgtggccaccgacctgagaaaggacaaggccaagagctgcaccgtgatgtag

SEQ ID NO: 153495 - DNA, 348 bp, Artificial Sequence
  derived and/or modified sequence
atgctgctggtgggctgcaagagcgacctgagaaccgacgtgagcaccctggtggagctgagcaaccacagacagacccccgtgagctacgaccagggcgccaacatggccaagcagatcggcgccgccacctacatcgagtgcagcgccctgcagagcgagaacagcgtgagagacatcttccacgtggccaccctggcctgcgtgaacaagaccaacaagaacgtgaagagaaacaagagccagagagccaccaagagaatcagccacatgcccagcagacccgagctgagcgccgtggccaccgacctgagaaaggacaaggccaagagctgcaccgtgatgtag

SEQ ID NO: 153496 - DNA, 351 bp, Artificial Sequence
  derived and/or modified sequence
atgaaggagagaagagccagccagaagctgagcagcaagagcatcatggaccccaaccagaacgtgaagtgcaagatcgtggtggtgggcgacagccagtgcggcaagaccgccctgctgcacgtgttcgccaaggactgcttccccgagaactacgtgcccaccgtgttcgagaactacaccgccagcttcgagatcgacacccagagaatcgagctgagcctgtgggacaccagcggcagcccctactacgacaacgtgagacccctgagctaccccgacagcgacgccgtgctgatctgcttcgacatcagcagacccgagaccctggacagcgtgctgaagaagtag

SEQ ID NO: 153497 - DNA, 735 bp, Artificial Sequence
  derived and/or modified sequence
atgaaagagcgcagagctagtcagaagctcagttcaaaaagcataatggacccaaaccagaatgtgaagtgcaaaattgtagtggttggtgacagccaatgtggtaaaactgctcttttgcacgtgttcgctaaagattgcttccccgaaaactacgtgccaacagtgtttgaaaactacactgccagttttgagattgacactcagcgcatcgagttgtccctgtgggataccagtggaagtccttactacgataatgtcaggccgcttagctacccagattctgacgccgtgctgatttgtttcgacatcagccggcccgagaccctggatagcgtcctgaagaagtggaagggcgaaattcaagagttctgcccaaacaccaaaatgttgttggtgggatgtaagtctgacttgaggacagatgtttcgaccttagtcgagctttccaaccaccgccagacccccgttagctacgaccagggcgccaatatggctaaacagataggggccgccacctatatagagtgttcggcgctacaatctgaaaattcagtcagagatatattccatgtcgccaccctggcttgcgttaacaaaacaaacaaaaatgtgaaaaggaataaatcccagagagctactaaacgcatatctcatatgccatcccgccccgaactaagtgctgtagctacagatctgcggaaagacaaagccaaaagctgtacggtgatgtag

SEQ ID NO: 153498 - DNA, 735 bp, Artificial Sequence
  derived and/or modified sequence
atgaaagagcggcgagcaagtcagaaactgtcttctaagtccatcatggatccaaaccaaaatgtgaaatgcaaaattgtggtagtcggggacagccagtgcggcaagacagctcttctccacgtgttcgccaaagattgctttccagagaactacgtgcctactgtctttgagaactatacagcatccttcgagatcgatacccagaggatcgagctgagtctatgggacacaagcggcagtccatattacgacaatgtgcgccctctgtcctatcccgactcagatgctgtgttgatctgtttcgatatcagccgccctgagaccttggactccgtcctcaagaaatggaaaggggaaatccaggagttttgccctaacactaaaatgctgctggtgggctgtaaatccgacctcagaaccgacgtctcaactttagtagaattgtctaatcatcggcagacccccgtttcttacgaccaaggagccaacatggctaagcaaattggcgctgccacttatatcgagtgttctgccctgcagtctgaaaactccgtgagagatatctttcatgttgccactctcgcatgcgtcaacaaaaccaacaagaacgtgaaacggaacaagagccagagggcgaccaagcggatatcccacatgccatcaaggcccgaactctccgcagtcgcaacggaccttagaaaggataaggccaagtcttgtacagtcatgtag

SEQ ID NO: 153499 - DNA, 348 bp, Artificial Sequence
  derived and/or modified sequence
atgctcctcgttggctgtaaaagcgacctgcgaacggatgtaagcactctggtggagctgtcaaaccacagacagaccccagtgtcttacgaccagggtgccaatatggccaagcagattggggctgccacctatatcgaatgcagcgccctacagagcgagaatagcgttagggatattttccacgttgcaaccctggcttgtgtgaacaagactaataagaatgtcaaaagaaataagtctcagcgcgccacaaagcggataagtcatatgccaagccggcccgagctttcagcagtagcaactgatctccgcaaagacaaagccaagtcatgcactgtgatgtag

SEQ ID NO: 153500 - DNA, 351 bp, Artificial Sequence
  derived and/or modified sequence
atgaaggaacgccgagcctcccagaaattaagctctaagtccatcatggatccgaatcagaatgtgaagtgtaagattgttgtggtaggagattcacagtgcggcaaaacggcccttcttcacgtctttgctaaagactgttttcctgaaaactacgtccctactgtgttcgagaattatactgctagttttgaaatcgatacacagcgcatcgagctcagcctatgggacacttctggttctccatactatgataatgtccggccactatcttaccccgattccgacgcagtactcatctgctttgacatcagtagacccgagactcttgactcggtcctaaagaagtag

SEQ ID NO: 153501 - DNA, 351 bp, Artificial Sequence
  derived and/or modified sequence
atgaaagagagacgggcgtcccagaagttgtcgtcaaaatctatcatggatcctaatcagaatgtaaagtgtaagattgtggtcgtcggggactcacagtgcggtaagacagcactgctccacgtattcgcgaaggactgttttcctgaaaattatgtgccgactgtgtttgagaactataccgcctctttcgagatagacacccagcggatcgaactttcgctgtgggacacatctggctccccctattatgacaacgtccgtccccttagttacccagactcagatgcggtgctgatttgcttcgatatcagtcgtccggaaacactcgacagcgtgctcaaaaagtag

SEQ ID NO: 153502 - DNA, 735 bp, Artificial Sequence
  derived and/or modified sequence
atgaaggagcggcgggccagccagaagctgagcagcaagagcatcatggaccccaaccagaatgtgaagtgcaagatcgtggtggtgggggacagccagtgtgggaagacagccctgctgcacgtgtttgccaaggactgcttccctgagaactacgtgcccaccgtgtttgagaactacacagccagctttgaaattgacacccagagaattgagctgagcctgtgggacaccagcggcagcccctactatgacaacgtgcggcccctgagctacccagacagtgatgctgtgctgatctgctttgacatcagcaggcctgagaccctggacagcgtgctgaagaagtggaagggggagatccaggagttctgccccaacaccaagatgctgctggtgggctgcaagagtgacctgaggacagatgtgtccaccctggtggagctgagcaaccaccggcagacccctgtgtcctatgaccagggcgccaacatggccaagcagattggagctgccacctacatcgagtgcagcgccctgcagagtgaaaattctgtgcgggacatcttccacgtggccaccctggcctgtgtgaacaagaccaacaagaatgtgaagaggaacaagagccagagggccaccaagaggatcagccacatgcccagcaggcctgagctgtctgctgtggccacagacctgaggaaggacaaggccaagagctgcaccgtgatgtag

SEQ ID NO: 153503 - DNA, 348 bp, Artificial Sequence
  derived and/or modified sequence
atgctgctggtgggctgcaagagtgacctgaggacagatgtgtccaccctggtggagctgagcaaccaccggcagacccctgtgtcctatgaccagggcgccaacatggccaagcagatcggggccgccacctacattgaatgttctgccctgcagagcgagaacagcgtgcgggacatcttccacgtggccaccctggcctgtgtgaacaagaccaacaagaatgtgaagaggaacaagagccagagggccaccaagaggatcagccacatgcccagcaggcctgagctgtctgctgtggccacagacctgaggaaggacaaggccaagagctgcaccgtgatgtag

SEQ ID NO: 153504 - DNA, 351 bp, Artificial Sequence
  derived and/or modified sequence
atgaaggagcggcgggccagccagaagctgagcagcaagagcatcatggaccccaaccagaatgtgaagtgcaagatcgtggtggtgggggacagccagtgtgggaagacagccctgctgcacgtgtttgccaaggactgcttccctgagaactacgtgcccaccgtgtttgagaactacacagccagctttgaaattgacacccagagaattgagctgagcctgtgggacaccagcggcagcccctactatgacaacgtgcggcccctgagctacccagacagtgatgctgtgctgatctgctttgacatcagcaggcctgagaccctggacagcgtgctgaagaagtag

SEQ ID NO: 153505 - DNA, 735 bp, Artificial Sequence
  derived and/or modified sequence
atgaaggagcggcgggccagccagaagctgagcagcaagagcatcatggaccccaaccaaaacgtaaagtgcaaaatagtggtcgtcggtgactcacagtgcggcaaaactgccttactacacgtgttcgccaaagactgtttccctgaaaattatgtaccaacggtgtttgagaactataccgctagttttgagattgatacccaacgcattgagctgagcttgtgggatacctccgggagtccatactacgataacgtgcgccctctgtcctatccggactctgacgccgtgctgatctgcttcgacatctccagaccagaaacactggactcagtgttaaagaaatggaaaggtgaaatacaggagttttgcccaaacacaaaaatgctacttgtggggtgtaagagcgacctccgaaccgacgtctccactctcgtggagctgtcaaatcatcggcaaacgcccgtctcctatgatcagggcgctaatatggcaaagcagatcggcgctgcaacctacattgaatgttcagcattgcagtccgagaattctgttagagacattttccatgtagccacactggcctgtgtcaataagacaaacaagaatgtgaagagaaacaagagtcagcgagccaccaagcgaatatcacatatgccgtcaagacccgagctgtcggctgtcgctactgacctcagaaaggacaaggctaagtcctgcactgtcatgtag

SEQ ID NO: 153506 - DNA, 735 bp, Artificial Sequence
  derived and/or modified sequence
atgaaggagcggcgggccagccagaagctgagcagcaagagcatcatggatcctaaccagaatgtaaaatgcaaaatcgttgtggtgggcgatagtcaatgcggaaagaccgcactgttgcacgtattcgccaaagactgttttcctgaaaactacgtgccaacagtttttgagaattatactgccagcttcgagatcgacactcagcgcatcgagctttctctgtgggacaccagcggcagtccttattatgacaatgtgcggccattgtcctaccccgacagtgacgccgtgttaatctgtttcgacattagccgtccagaaaccctagacagcgtgctaaaaaaatggaaaggcgagattcaggagttctgtccaaacactaaaatgttgttggtcggctgcaaaagtgatctgcgaaccgacgtgtccaccctggttgaactgtcaaaccaccggcaaactccagtgtcatatgaccagggggctaacatggcaaaacagattggtgccgccacatatattgaatgctctgcgctgcagtccgaaaactctgttagggatatcttccacgtagctaccttggcctgcgtgaacaaaacaaataagaatgtaaaacgcaataagagtcaacgagcaactaagaggatctctcacatgccctcccggcccgaacttagcgctgtggccacagatctgaggaaggataaagctaagtcttgcaccgtcatgtag

SEQ ID NO: 153507 - DNA, 348 bp, Artificial Sequence
  derived and/or modified sequence
atgctgctggtgggctgcaagagcgacctgcggaccgacgtgagcacactggtggaactgagcaaccataggcaaacacctgtaagttacgatcagggggccaacatggcaaaacagattggagctgcaacttatatcgagtgctccgccttacaatccgaaaactcggtgcgggacatttttcacgtcgctactctggcctgtgtgaataaaaccaataagaacgtgaaacggaacaaaagccagcgcgctacgaaacgcatcagtcacatgccgtccaggcctgagctgtcagcagtggcgactgacctcaggaaagataaagctaagagttgtaccgtgatgtag

SEQ ID NO: 153508 - DNA, 351 bp, Artificial Sequence
  derived and/or modified sequence
atgaaggagcggcgggccagccagaagctgagcagcaagagcatcatggaccctaaccaaaacgttaagtgtaagatcgtcgtggttggcgacagccaatgcggaaagactgcactcttgcacgtgttcgccaaggactgcttccccgaaaattacgtgcccactgtgtttgaaaactacaccgcaagcttcgaaatagacacccaaaggatcgagctcagcctatgggataccagtggcagcccttattatgacaacgttcgtccactgagttaccctgacagcgatgccgtcttgatctgcttcgacattagcaggcctgagaccttagatagcgtgctgaagaagtag

SEQ ID NO: 153509 - DNA, 351 bp, Artificial Sequence
  derived and/or modified sequence
atgaaggagcggcgggccagccagaagctgagcagcaagagcatcatggatcccaatcagaatgtgaaatgcaaaattgtggtcgtgggtgacagccagtgtgggaagacagccctcttgcatgtttttgctaaggactgcttccccgaaaactacgtgcctaccgtttttgaaaactataccgccagcttcgagatcgatactcagaggattgagttgagcctgtgggatacttcagggtccccttactatgataatgtgaggcccctttcataccctgattcagatgccgttcttatctgttttgacatcagccgaccagaaactctggacagcgtgctaaagaagtag

SEQ ID NO: 153510 - DNA, 735 bp, Artificial Sequence
  derived and/or modified sequence
atgaaggaaagacgggcttcccagaaactgtcttctaagtccatcatggaccccaaccagaatgtgaaatgcaaaatcgtcgtggtcggagattctcagtgtggtaaaacagcgctcctgcatgtgtttgccaaggactgtttccccgagaactacgtaccgaccgtgttcgagaactacactgcttcttttgagatcgatactcagagaatcgaactcagcctttgggacaccagcggctccccctattacgacaacgtgagaccgctatcctaccctgatagcgacgccgtcctcatctgctttgatatctctcggccagaaacactggattctgtgctgaaaaagtggaagggcgaaatccaagaattctgtcctaataccaagatgttactggtaggctgcaaaagcgatcttcggacagacgtgagcacccttgtggagctgtcaaaccaccgacagactccggtgagttacgaccagggcgcaaatatggcaaagcagatcggcgctgccacctatatagaatgttcagcacttcagtcagagaactcagttagagacatttttcatgtagcaactttggcctgcgttaataagacaaacaaaaacgttaagcggaataagtcccagcgcgctaccaagaggatctcccacatgccctcccggccagagctgtcagccgtggccaccgacctgaggaaagacaaggcaaagtcctgcaccgtgatgtag

SEQ ID NO: 153511 - DNA, 735 bp, Artificial Sequence
  derived and/or modified sequence
atgaaggaacggagagctagtcagaagttatctagcaaatccataatggatcctaaccagaacgttaagtgtaagatagtggtggtaggcgactctcagtgcggcaagacggctctactccatgtatttgccaaggactgctttcctgagaattacgtgcccactgtttttgaaaattacacagcgagctttgagattgacacacagcggattgaactgtcactgtgggacacgtctggctctccgtactacgacaacgtccgacctttaagttatccggattcagatgctgttctaatatgctttgatatctctcggccagaaaccctggattcagtcctaaaaaagtggaaaggcgagatacaggagttctgtcctaacactaaaatgttgctcgtgggctgcaagtccgatctgcggacggatgtgagtaccctagtggaattgagcaaccaccggcagacacccgttagttatgaccaaggtgcaaatatggctaaacaaattggcgcagctacctacatcgaatgcagcgccctccagagtgagaattcggtgcgggacatattccacgttgccaccctcgcctgtgtgaataagactaacaagaatgtgaagcgtaataaatcacagcgcgcaacgaaaaggattagccacatgccatcacgcccagaactgtcggccgtcgccaccgatctccgcaaagacaaagctaagtcatgtacagtaatgtag

SEQ ID NO: 153512 - DNA, 348 bp, Artificial Sequence
  derived and/or modified sequence
atgctgttggtgggctgtaaaagcgacctccgcactgatgtgtctacactcgtggagctgagcaatcaccggcagaccccagtgtcttacgatcagggggctaacatggcaaagcagatcggcgcagctacctatattgagtgttcggccctgcagtccgaaaattcagttagggacatcttccacgtcgcaaccctggcgtgtgtcaacaagacgaataagaacgtgaagaggaacaaatctcaacgagctacaaagcgcatatctcacatgccatcccggcctgagctgagtgccgtggcgactgaccttaggaaggataaagccaagagctgcacagtcatgtag

SEQ ID NO: 153513 - DNA, 351 bp, Artificial Sequence
  derived and/or modified sequence
atgaaagaacgcagagcatcgcagaaattatcctctaaaagcattatggaccctaatcagaacgtgaaatgtaaaatcgtcgtcgtgggagactcccaatgtggcaaaactgcgttgctgcatgttttcgccaaggactgtttccctgaaaattacgtccccactgtgtttgagaattatacagcctcctttgagatagacactcagagaatcgaactatccctgtgggacacaagcggcagcccctactacgataatgtgcgcccactgagttatccagattctgatgctgtcttaatttgtttcgacatcagtcgcccagaaacgctcgacagcgttctcaaaaaatag

SEQ ID NO: 153514 - DNA, 351 bp, Artificial Sequence
  derived and/or modified sequence
atgaaggagagacgggcttcccagaaactctcttctaagtcgatcatggaccccaaccaaaacgtgaagtgtaagatagtggtggtcggcgactctcagtgtggtaagaccgcactcctgcacgtctttgccaaagactgttttcccgagaattatgttcccactgtgttcgaaaactacacagcgagcttcgagattgacacgcaacggatcgagctttccctttgggatacatcaggcagtccttactacgacaacgtgcgccctctgtcctatcccgatagcgatgcagttctcatttgcttcgatatcagccgtccagaaactctagacagcgtcctgaagaagtag

SEQ ID NO: 153515 - DNA, 2711 bp, Artificial Sequence
  derived and/or modified sequence
aaagccgcgcagagagcgtgaaacaaagcagtcggctcggaattggacttgggaggcgcggtgaggagtcaggcttaaaacttgttggaggggagtaaccagcctgctcctctcgctctcctcctcgtctgcgccgcgtttcagagagaaaattcctgttccaagagaaaataaggcaacatcaatgaaggagagaagagccagccagaaattatccagcaaatctatcatggatcctaatcagaacgtgaaatgcaagatagttgtggtgggagacagtcagtgtggaaaaactgcgctgctccatgtcttcgccaaggactgcttccccgagaattacgttcctacagtgtttgagaattacacggccagttttgaaatcgacacacaaagaatagagttgagcctgtgggacacttcgggttctccttactatgacaatgtccgccccctctcttaccctgattcggatgctgtgctgatttgctttgacatcagtagaccagagaccctggacagtgtcctcaaaaagtggaaaggtgaaatccaggaattttgtccaaataccaaaatgctcttggtcggctgcaagtctgatctgcggacagatgttagtacattagtagagctctccaatcacaggcagacgccagtgtcctatgaccagggggcaaatatggccaaacagattggagcagctacttatatcgaatgctcagctttacagtcggaaaatagcgtcagagacatttttcacgttgccaccttggcatgtgtaaataagacaaataaaaacgttaagcggaacaaatcacagagagccacaaagcggatttcacacatgcctagcagaccagaactctcggcagttgctacggacttacgaaaggacaaagcgaagagctgcactgtgatgtgaatctttcattatctttaatgaagacaaaggaatctagtgtaaaaaacaacagcaaacaaaaaggtgaagtctaaatgaagtgcacagccaaagtcatgtataccagaggcttaggaggcgtttgagaggatactcatctttttggaatcctgaccttaggttcggcatgtagaccaagtgatgagaagtgaatacatggaagagtttttaagtgtgacttgaaaaatatgccaaaaaatgagagatacaaatgagctagaggaagatgaggggggatgcgagtacctccaagaagaaaaatcacactctgaatggtgcttgcatttttgggttttttttttttgttataatctattcatggatctccactttgatttaatttttaaatgttttaatctcctttacaaaaagtatacgttaatataccgtcctcaagggggaactggcactgtgaccttagcatttagttttctagaggatgtgatctaatttctttctagctcatcattaaaaaggaaattgtatcaggacccatgggatatatccagaggcaaactttatgaggctttgaaatcttgccttcctgaagatagctgagtaggatggttctaaggaaagcctttgcaatcttgcaagatttgtagaccagcactacaaagatcgcatagatcaaataggaaaaaaaatgtcgatttttattcagtctgatggttctgttcttcattgtgattgtcattaaaaagtggtaaattgctcaatgtaatatttttgtgcgctgtttagaagttgtgtgattttttgccatcgttgataaaaatgcaaagtcaaataaaaggtgtcttggtttgatgtcatagaatgatccaaggagagaaaaaaggtagttactgttttcaccagaaaaggtaatgagtgaaggaaagaatagtagcagaaagcacagtttgtgagtaaagctgtctggaattaagttaccaaaaatacaaagcaaaaggactattattttgggttgaagctccaaaactgacagcatctgataatctgttggtttatttcacttttcattaaatgaacattgatgagagaagatgccacttacccaagctttagagaatccctagtggaagattatatgataaactttcagtcctgacataacactagggcatttctagagtgtcattgctaaaacctcactgaacagatgcagccaaggtctgtgttcagcacttggtctctgttgttacgtaaaataataagcatttaaaatagtttacagatatttttgaccagttccttttagagattctttcagagaagaaaccagatctgacctgtttattgttggcgcttgttgaaaacgagctttctttcccatgatagtgcttcgtttttgaagtgttgaagctgtgctccccttaaatcgtggcaggagagattaaggtaattacaacactcagttctatgtcttacaagcactttgtcttgtctctgcaagaaaattcgattccagtcatttcccataaaatacagacattttaccaacataatatgctttgattgatgcagcattatgctttgggcagtattacaaaatagctggcgagtgctttctgtatttaaatattgtaaaaagaaaataagttataactgttataaagcagaacttttgttgcattttttaaactgttgaagtcactgtgtatgtttgtttggtcaatgtttccgcagtatttattaaaacatactttttttttcttcaaataaaaaagtaaccatgtctttgtctaaa

SEQ ID NO: 153516 - DNA, 2777 bp, Artificial Sequence
  derived and/or modified sequence
gcagtcggctcggaattggacttgggaggcgcggtgaggagtcaggcttaaaacttgttggaggggagtaaccagcctgctcctctcgctctcctcctcgtctgcgccgcgtttcagaggttgcccatcagccttgtgatttatttttatatctgctttttataaagagagaaatatatatatatatatatatttttttttttcttcttaagagaaaattcctgttccaagagaaaataaggcaacatcaatgaaggagagaagagccagccagaaattatccagcaaatctatcatggatcctaatcagaacgtgaaatgcaagatagttgtggtgggagacagtcagtgtggaaaaactgcgctgctccatgtcttcgccaaggactgcttccccgagaattacgttcctacagtgtttgagaattacacggccagttttgaaatcgacacacaaagaatagagttgagcctgtgggacacttcgggttctccttactatgacaatgtccgccccctctcttaccctgattcggatgctgtgctgatttgctttgacatcagtagaccagagaccctggacagtgtcctcaaaaagtggaaaggtgaaatccaggaattttgtccaaataccaaaatgctcttggtcggctgcaagtctgatctgcggacagatgttagtacattagtagagctctccaatcacaggcagacgccagtgtcctatgaccagggggcaaatatggccaaacagattggagcagctacttatatcgaatgctcagctttacagtcggaaaatagcgtcagagacatttttcacgttgccaccttggcatgtgtaaataagacaaataaaaacgttaagcggaacaaatcacagagagccacaaagcggatttcacacatgcctagcagaccagaactctcggcagttgctacggacttacgaaaggacaaagcgaagagctgcactgtgatgtgaatctttcattatctttaatgaagacaaaggaatctagtgtaaaaaacaacagcaaacaaaaaggtgaagtctaaatgaagtgcacagccaaagtcatgtataccagaggcttaggaggcgtttgagaggatactcatctttttggaatcctgaccttaggttcggcatgtagaccaagtgatgagaagtgaatacatggaagagtttttaagtgtgacttgaaaaatatgccaaaaaatgagagatacaaatgagctagaggaagatgaggggggatgcgagtacctccaagaagaaaaatcacactctgaatggtgcttgcatttttgggttttttttttttgttataatctattcatggatctccactttgatttaatttttaaatgttttaatctcctttacaaaaagtatacgttaatataccgtcctcaagggggaactggcactgtgaccttagcatttagttttctagaggatgtgatctaatttctttctagctcatcattaaaaaggaaattgtatcaggacccatgggatatatccagaggcaaactttatgaggctttgaaatcttgccttcctgaagatagctgagtaggatggttctaaggaaagcctttgcaatcttgcaagatttgtagaccagcactacaaagatcgcatagatcaaataggaaaaaaaatgtcgatttttattcagtctgatggttctgttcttcattgtgattgtcattaaaaagtggtaaattgctcaatgtaatatttttgtgcgctgtttagaagttgtgtgattttttgccatcgttgataaaaatgcaaagtcaaataaaaggtgtcttggtttgatgtcatagaatgatccaaggagagaaaaaaggtagttactgttttcaccagaaaaggtaatgagtgaaggaaagaatagtagcagaaagcacagtttgtgagtaaagctgtctggaattaagttaccaaaaatacaaagcaaaaggactattattttgggttgaagctccaaaactgacagcatctgataatctgttggtttatttcacttttcattaaatgaacattgatgagagaagatgccacttacccaagctttagagaatccctagtggaagattatatgataaactttcagtcctgacataacactagggcatttctagagtgtcattgctaaaacctcactgaacagatgcagccaaggtctgtgttcagcacttggtctctgttgttacgtaaaataataagcatttaaaatagtttacagatatttttgaccagttccttttagagattctttcagagaagaaaccagatctgacctgtttattgttggcgcttgttgaaaacgagctttctttcccatgatagtgcttcgtttttgaagtgttgaagctgtgctccccttaaatcgtggcaggagagattaaggtaattacaacactcagttctatgtcttacaagcactttgtcttgtctctgcaagaaaattcgattccagtcatttcccataaaatacagacattttaccaacataatatgctttgattgatgcagcattatgctttgggcagtattacaaaatagctggcgagtgctttctgtatttaaatattgtaaaaagaaaataagttataactgttataaagcagaacttttgttgcattttttaaactgttgaagtcactgtgtatgtttgtttggtcaatgtttccgcagtatttattaaaacatactttttttttcttcaaataaaaaagtaaccatgtctttgtctaaa

SEQ ID NO: 153517 - DNA, 2372 bp, Artificial Sequence
  derived and/or modified sequence
gcttgaaccgctggagcccccgagggacgcgggggttcagagagcaagaggaaggaaccagactgacagggtcgccagaggcagtcccagcacaaaggttctccttactatgacaatgtccgccccctctcttaccctgattcggatgctgtgctgatttgctttgacatcagtagaccagagaccctggacagtgtcctcaaaaagtggaaaggtgaaatccaggaattttgtccaaataccaaaatgctcttggtcggctgcaagtctgatctgcggacagatgttagtacattagtagagctctccaatcacaggcagacgccagtgtcctatgaccagggggcaaatatggccaaacagattggagcagctacttatatcgaatgctcagctttacagtcggaaaatagcgtcagagacatttttcacgttgccaccttggcatgtgtaaataagacaaataaaaacgttaagcggaacaaatcacagagagccacaaagcggatttcacacatgcctagcagaccagaactctcggcagttgctacggacttacgaaaggacaaagcgaagagctgcactgtgatgtgaatctttcattatctttaatgaagacaaaggaatctagtgtaaaaaacaacagcaaacaaaaaggtgaagtctaaatgaagtgcacagccaaagtcatgtataccagaggcttaggaggcgtttgagaggatactcatctttttggaatcctgaccttaggttcggcatgtagaccaagtgatgagaagtgaatacatggaagagtttttaagtgtgacttgaaaaatatgccaaaaaatgagagatacaaatgagctagaggaagatgaggggggatgcgagtacctccaagaagaaaaatcacactctgaatggtgcttgcatttttgggttttttttttttgttataatctattcatggatctccactttgatttaatttttaaatgttttaatctcctttacaaaaagtatacgttaatataccgtcctcaagggggaactggcactgtgaccttagcatttagttttctagaggatgtgatctaatttctttctagctcatcattaaaaaggaaattgtatcaggacccatgggatatatccagaggcaaactttatgaggctttgaaatcttgccttcctgaagatagctgagtaggatggttctaaggaaagcctttgcaatcttgcaagatttgtagaccagcactacaaagatcgcatagatcaaataggaaaaaaaatgtcgatttttattcagtctgatggttctgttcttcattgtgattgtcattaaaaagtggtaaattgctcaatgtaatatttttgtgcgctgtttagaagttgtgtgattttttgccatcgttgataaaaatgcaaagtcaaataaaaggtgtcttggtttgatgtcatagaatgatccaaggagagaaaaaaggtagttactgttttcaccagaaaaggtaatgagtgaaggaaagaatagtagcagaaagcacagtttgtgagtaaagctgtctggaattaagttaccaaaaatacaaagcaaaaggactattattttgggttgaagctccaaaactgacagcatctgataatctgttggtttatttcacttttcattaaatgaacattgatgagagaagatgccacttacccaagctttagagaatccctagtggaagattatatgataaactttcagtcctgacataacactagggcatttctagagtgtcattgctaaaacctcactgaacagatgcagccaaggtctgtgttcagcacttggtctctgttgttacgtaaaataataagcatttaaaatagtttacagatatttttgaccagttccttttagagattctttcagagaagaaaccagatctgacctgtttattgttggcgcttgttgaaaacgagctttctttcccatgatagtgcttcgtttttgaagtgttgaagctgtgctccccttaaatcgtggcaggagagattaaggtaattacaacactcagttctatgtcttacaagcactttgtcttgtctctgcaagaaaattcgattccagtcatttcccataaaatacagacattttaccaacataatatgctttgattgatgcagcattatgctttgggcagtattacaaaatagctggcgagtgctttctgtatttaaatattgtaaaaagaaaataagttataactgttataaagcagaacttttgttgcattttttaaactgttgaagtcactgtgtatgtttgtttggtcaatgtttccgcagtatttattaaaacatactttttttttcttcaaataaaaaagtaacca

SEQ ID NO: 153518 - DNA, 505 bp, Artificial Sequence
  derived and/or modified sequence
aatgctgaaggcaaagcaaaagatggtgattttggataaatgagaaaaaggagagagtaataggaagacaagcaagaatcacaaaaggaagcacgctaggtaatatacgatcctcccagagaaaattcctgttccaagagaaaataaggcaacatcaatgaaggagagaagagccagccagaaattatccagcaaatctatcatggatcctaatcagaacgtgaaatgcaagatagttgtggtgggagacagtcagtgtggaaaaactgcgctgctccatgtcttcgccaaggactgcttccccgagaattacgttcctacagtgtttgagaattacacggccagttttgaaatcgacacacaaagaatagagttgagcctgtgggacacttcgggttctccttactatgacaatgtccgccccctctcttaccctgattcggatgctgtgctgatttgctttgacatcagtagaccagagaccctggacagtgtcctcaaaaag

SEQ ID NO: 153519 - DNA, 481 bp, Artificial Sequence
  derived and/or modified sequence
attgagaaagaagaggattggaaggccgggcgtataaagccgcgcagagagcgtgaaacaaagcagtcggctcggaattggacttgggaggcgcgagaaaattcctgttccaagagaaaataaggcaacatcaatgaaggagagaagagccagccagaaattatccagcaaatctatcatggatcctaatcagaacgtgaaatgcaagatagttgtggtgggagacagtcagtgtggaaaaactgcgctgctccatgtcttcgccaaggactgcttccccgagaattacgttcctacagtgtttgagaattacacggccagttttgaaatcgacacacaaagaatagagttgagcctgtgggacacttcgggttctccttactatgacaatgtccgccccctctcttaccctgattcggatgctgtgctgatttgctttgacatcagtagaccagagaccctggacagtgtcctcaaaaag

SEQ ID NO: 153520 - protein, 284 aa, Artificial Sequence
  derived and/or modified sequence
MDYSYLNSYDSCVAAMEASAYGDFGACSQPGGFQYSPLRPAFPAAGPPCPALGSSNCALGALRDHQPAPYSAVPYKFFPEPSGLHEKRKQRRIRTTFTSAQLKELERVFAETHYPDIYTREELALKIDLTEARVQVWFQNRRAKFRKQERAASAKGAAGAAGAKKGEARCSSEDDDSKESTCSPTPDSTASLPPPPAPGLASPRLSPSPLPVALGSGPGPGPGPQPLKGALWAGVAGGGGGGPGAGAAELLKAWQPAESGPGPFSGVLSSFHRKPGPALKTNLF

SEQ ID NO: 153521 - DNA, 1716 bp, Artificial Sequence
  derived and/or modified sequence
acttgcgttgcacccgggctgagtgcggccgcgacggggcgggcggactctcgggcgctcagagctggcctcgggtcctcggagcctggcgctcgaacctcccttccgacctccacccggaccccgaccccgacccggcctggcccggcccccgcccccgccccccgggccgatggactactcctacctcaattcgtacgactcgtgcgtggcggccatggaggcgtccgcctacggcgactttggcgcctgcagccagcccggcggcttccaatacagccccctgcggcccgctttccccgcggcagggccgccctgccccgcgctcggctcctccaactgcgcacttggcgccctacgcgaccaccagcccgcgccctactcggcagtgccctacaagttcttcccagagccatccggcctgcacgagaagcgcaagcagcggcgcatccgcaccacgttcaccagcgcgcagctcaaggagctggagcgcgttttcgctgagacccactaccccgacatttacacgcgtgaggagctggcgctcaagatcgacctcactgaggctcgcgtgcaggtctggttccagaaccgccgggccaagttccgcaaacaggagcgcgcggccagcgccaagggcgcggcgggcgcggcgggcgccaaaaagggcgaggcgcgctgctcctccgaggacgacgattccaaggagtccacgtgcagccccacgcccgatagcaccgcctcgctgccgccgccgcctgcgcccggcctggccagcccgcgcctgagccccagcccgctgcccgtcgcactgggctccgggccgggacctgggccggggccacagccgctcaagggcgcactgtgggccggtgtggcgggcggtgggggcggcgggcctggcgcgggagcggccgaactacttaaggcttggcagccggcggagtccggccccgggcccttctccggggttctgtcctcctttcaccggaagcccggccccgccctgaagaccaatctcttctagctgccggcctctggaggctccgagcctgcccccagagacgtccctgcccctccaggacctgacagcccctcccatcctggccacccgcctggaagtccccatccgtctccactccctactgtctcacccctcggtgtgtcctccccaactttggagaccaagtcagggccactctcgtcctcacccaccctctaccagcagagcggagttctttataccgggacctcctccaggagaaccccggagctccttctagcttggccttctttggatgcggtatcacatgaggcctgtccctaacagtgccctcaaagtgaaggtcctcaaggaggatcggcacagcccccttccctggctctgcagcggctgggtcaccccttacgctggtgatcaggaaagcccgctgccccacccctcgggcccacccgtacagaggctggtggtcgccgggataattaatgaccaccgccaattcatccctcacgtgtctcctctcttccctagcccgtctggcacagagggtggacctgttagaggagtggaggggctgcctggggaatgggacagagggattctctttccctaatttttttggttgtcctttttctttgaaaaacttgtaatttattgaagttttactcaatccaaataaaacttaatttattgaagacaaaaaaaaaaaaaaaaaa

SEQ ID NO: 153522 - DNA, 855 bp, Artificial Sequence
  derived and/or modified sequence
atggactactcttacctcaactcttacgactcatgtgtggccgcaatggaggcatctgcgtatggagactttggggcttgcagtcagcccggggggtttcagtacagtccactgcgtccagcctttcctgctgctgggccaccctgtccggccttgggcagttctaactgtgcgctgggtgccttgcgcgatcaccagcctgctccttatagtgctgtgccatacaagttttttcctgaaccatccggcctgcatgaaaagagaaagcagcggcgcataaggaccacatttacatcagcgcagttgaaggaactggagcgggtgtttgctgaaacccactaccccgatatttatacacgtgaagaactggccttgaaaattgacttgacggaggcccgagtgcaggtgtggttccagaataggagagcaaaattccgaaagcaggaacgggcagctagcgctaaaggtgccgccggagcagccggagctaagaagggcgaggcacggtgttcttctgaggatgatgatagcaaagaatctacctgttctccaacaccagactcgacagctagtttaccacctcctcctgcgcccggactagcctcccctcgattgagcccttctccccttcccgtggcccttggttccggccccggtccggggcccggtccacagcccctgaagggagccctctgggcaggggtggccggcggcggaggcgggggaccaggtgctggcgccgctgaactacttaaggcctggcaacccgcagagagtgggccgggtcccttttcaggggtgctttctagcttccatcggaaacctgggcctgcgcttaagactaatctgttctag

SEQ ID NO: 153523 - DNA, 855 bp, Artificial Sequence
  derived and/or modified sequence
atggactacagctacctgaacagctatgacagctgtgtggccgccatggaggccagcgcctatggagactttggagcctgcagccagcccggcggcttccagtacagccccctgcggcctgccttccctgctgctggccccccctgcccagccctgggcagcagcaactgtgccctgggcgccctgcgggaccaccagcctgccccctacagcgctgtgccctacaagttcttccctgagcccagcggcctgcacgagaagaggaagcagaggcgcatccgcaccaccttcaccagcgcccagctgaaggagctggagcgggtgtttgctgagacccactacccagacatctacacccgggaggagctggccctgaagattgacctgacagaggcccgggtgcaggtgtggttccagaacagaagagccaagttcaggaagcaggagagagctgccagcgccaagggagctgctggagctgctggggccaagaagggggaggcccgctgcagcagtgaagatgatgacagcaaggagagcacctgcagccccaccccagacagcacagccagcctgcccccacctccagcccctggcctggccagcccccggctgagccccagccccctgcctgtggccctgggcagcggccctggccctggccctggcccccagcccctgaagggggccctgtgggccggcgtggccggcggcggcggcggcggccctggagctggagctgctgagctgctgaaggcctggcagcctgctgagagcggccctggccccttctctggagtgctgagcagcttccacaggaagccaggccctgccctgaagaccaacctcttctag

SEQ ID NO: 153524 - DNA, 855 bp, Artificial Sequence
  derived and/or modified sequence
atggactacagctacctgaacagctacgacagctgcgtggccgccatggaagcatccgcctacggtgattttggcgcctgctctcaaccaggaggcttccagtacagtcctctgagaccagcttttcccgcagccggccccccttgccccgcactgggctctagcaactgcgccctgggcgcgctccgagatcaccagcctgccccctacagtgccgtgccatataaatttttccccgaaccctccgggttgcacgagaaaagaaaacagaggagaatcagaaccacctttaccagtgcacagcttaaggaactcgagcgagtttttgctgagacccactatcccgacatttataccagggaagaacttgctctgaagatcgatttaacagaggcacgtgttcaggtctggttccagaatagacgagccaagttccggaaacaggaacgggccgccagcgctaaaggagcagctggtgctgcaggggcaaagaagggagaggctcgatgcagcagtgaagacgatgattccaaggagagcacttgcagtcccacccccgacagcacagctagtttgcctccacccccagctccgggcttggccagtcctcggctgagtccaagtcccttgcctgtcgctctaggatccggcccaggccctggccctggaccgcaacctctgaagggggccctgtgggcgggcgtggctggtggaggcggcggggggccaggggccggcgctgcagagctactgaaggcttggcagccggctgagagcgggccagggccgttcagcggagttctgagcagcttccatcgcaaacccggccctgctctgaaaaccaatctgttttag

SEQ ID NO: 153525 - DNA, 1699 bp, Artificial Sequence
  derived and/or modified sequence
acttgcgttgcacccgggctgagtgcggccgcgacggggcgggcggactctcgggcgctcagagctggcctcgggtcctcggagcctggcgctcgaacctcccttccgacctccacccggaccccgaccccgacccggcctggcccggcccccgcccccgccccccgggccgatggactactcctacctcaattcgtacgactcgtgcgtggcggccatggaggcgtccgcctacggcgactttggcgcctgcagccagcccggcggcttccaatacagccccctgcggcccgctttccccgcggcagggccgccctgccccgcgctcggctcctccaactgcgcacttggcgccctacgcgaccaccagcccgcgccctactcggcagtgccctacaagttcttcccagagccatccggcctgcacgagaagcgcaagcagcggcgcatccgcaccacgttcaccagcgcgcagctcaaggagctggagcgcgttttcgctgagacccactaccccgacatttacacgcgtgaggagctggcgctcaagatcgacctcactgaggctcgcgtgcaggtctggttccagaaccgccgggccaagttccgcaaacaggagcgcgcggccagcgccaagggcgcggcgggcgcggcgggcgccaaaaagggcgaggcgcgctgctcctccgaggacgacgattccaaggagtccacgtgcagccccacgcccgatagcaccgcctcgctgccgccgccgcctgcgcccggcctggccagcccgcgcctgagccccagcccgctgcccgtcgcactgggctccgggccgggacctgggccggggccacagccgctcaagggcgcactgtgggccggtgtggcgggcggtgggggcggcgggcctggcgcgggagcggccgaactacttaaggcttggcagccggcggagtccggccccgggcccttctccggggttctgtcctcctttcaccggaagcccggccccgccctgaagaccaatctcttctagctgccggcctctggaggctccgagcctgcccccagagacgtccctgcccctccaggacctgacagcccctcccatcctggccacccgcctggaagtccccatccgtctccactccctactgtctcacccctcggtgtgtcctccccaactttggagaccaagtcagggccactctcgtcctcacccaccctctaccagcagagcggagttctttataccgggacctcctccaggagaaccccggagctccttctagcttggccttctttggatgcggtatcacatgaggcctgtccctaacagtgccctcaaagtgaaggtcctcaaggaggatcggcacagcccccttccctggctctgcagcggctgggtcaccccttacgctggtgatcaggaaagcccgctgccccacccctcgggcccacccgtacagaggctggtggtcgccgggataattaatgaccaccgccaattcatccctcacgtgtctcctctcttccctagcccgtctggcacagagggtggacctgttagaggagtggaggggctgcctggggaatgggacagagggattctctttccctaatttttttggttgtcctttttctttgaaaaacttgtaatttattgaagttttactcaatccaaataaaacttaatttattgaagaca

SEQ ID NO: 153526 - DNA, 855 bp, Artificial Sequence
  derived and/or modified sequence
atggactacagctaccttaattcatatgacagttgcgtagcagcgatggaagccagtgcatatggggattttggggcatgcagccagcccggaggttttcagtattccccactcaggcctgcctttcccgctgcagggcctccttgtcctgcccttgggtcctcgaattgcgccctgggagctctaagggatcaccagccggcaccctattctgccgttccttacaaatttttcccagagccgtcaggcttacacgaaaagcgaaagcaaagacgtatacggacaacttttacgtcagctcagttaaaagaactggagcgggtgtttgccgaaacccactaccctgacatctatacccgagaagagctggcgcttaaaatcgacctgacagaggcgcgagtacaagtgtggttccagaataggcgcgcaaagtttagaaagcaagaaagagccgcttctgccaagggggctgccggagcggctggtgcgaagaagggcgaggctcggtgcagctccgaggatgacgactccaaggagtcaacctgctccccaactcctgacagcacagcaagcctaccccctccaccagcacccggactggccagccctaggctgtctccctcacccctgccagtcgccctcggatcgggcccagggccaggcccagggccacagccactgaaaggggcactctgggcaggagtggctggcggtggaggcggtgggccaggagctggagcagccgagttgctgaaggcttggcagcccgctgaatccggcccaggcccattttccggggtgctgagttcttttcatcggaagcctggcccagcccttaagacaaacctcttttag

SEQ ID NO: 153527 - DNA, 855 bp, Artificial Sequence
  derived and/or modified sequence
atggactacagctacctgaacagctacgacagctgcgtggccgccatggaggccagcgcctacggcgacttcggcgcctgcagccagcccggcggcttccagtacagccccctgagacccgccttccccgccgccggccccccctgccccgccctgggcagcagcaactgcgccctgggcgccctgagagaccaccagcccgccccctacagcgccgtgccctacaagttcttccccgagcccagcggcctgcacgagaagagaaagcagagaagaatcagaaccaccttcaccagcgcccagctgaaggagctggagagagtgttcgccgagacccactaccccgacatctacaccagagaggagctggccctgaagatcgacctgaccgaggccagagtgcaggtgtggttccagaacagaagagccaagttcagaaagcaggagagagccgccagcgccaagggcgccgccggcgccgccggcgccaagaagggcgaggccagatgcagcagcgaggacgacgacagcaaggagagcacctgcagccccacccccgacagcaccgccagcctgccccccccccccgcccccggcctggccagccccagactgagccccagccccctgcccgtggccctgggcagcggccccggccccggccccggcccccagcccctgaagggcgccctgtgggccggcgtggccggcggcggcggcggcggccccggcgccggcgccgccgagctgctgaaggcctggcagcccgccgagagcggccccggccccttcagcggcgtgctgagcagcttccacagaaagcccggccccgccctgaagaccaacctgttctag

SEQ ID NO: 153528 - protein, 193 aa, Artificial Sequence
  derived and/or modified sequence
MDGGTLPRSAPPAPPVPVGCAARRRPASPELLRCSRRRRPATAETGGGAAAVARRNERERNRVKLVNLGFQALRQHVPHGGASKKLSKVETLRSAVEYIRALQRLLAEHDAVRNALAGGLRPQAVRPSAPRGPPGTTPVAASPSRASSSPGRGGSSEPGSPRSAYSSDDSGCEGALSPAERELLDFSSWLGGY

SEQ ID NO: 153529 - DNA, 1864 bp, Artificial Sequence
  derived and/or modified sequence
ctggcggctcttgggactggcggggctgcgcgcggggttagggtgggggtacgggaaggctcaacccaggacctgcgtaccttgctttgggggcgcactaagcacctgccgggagcagggggcgcaccgggaactcgcagatttcgccagttgggcgcactggggatctgtggactgcgtccgggggatgggctagggggacatgcgcacgctttgggccttacagaatgtgatcgcgcgagggggagggcgaagcgtggcgggagggcgaggcgaaggaaggagggcgtgagaaaggcgacggcggcggcgcggaggagggttatctatacatttaaaaaccagccgcctgcgccgcgcctgcggagacctgggagagtccggccgcacgcgcgggacacgagcgtcccacgctccctggcgcgtacggcctgccaccactaggcctcctatccccgggctccagacgacctaggacgcgtgccctggggagttgcctggcggcgccgtgccagaagcccccttggggcgccacagttttccccgtcgcctccggttcctctgcctgcaccttcctgcggcgcgccgggacctggagcgggcgggtggatgcaggcgcgatggacggcggcacactgcccaggtccgcgccccctgcgccccccgtccctgtcggctgcgctgcccggcggagacccgcgtccccggaactgttgcgctgcagccggcggcggcgaccggccaccgcagagaccggaggcggcgcagcggccgtagcgcggcgcaatgagcgcgagcgcaaccgcgtgaagctggtgaacttgggcttccaggcgctgcggcagcacgtgccgcacggcggcgccagcaagaagctgagcaaggtggagacgctgcgctcagccgtggagtacatccgcgcgctgcagcgcctgctggccgagcacgacgccgtgcgcaacgcgctggcgggagggctgaggccgcaggccgtgcggccgtctgcgccccgcgggccgccagggaccaccccggtcgccgcctcgccctcccgcgcttcttcgtccccgggccgcgggggcagctcggagcccggctccccgcgttccgcctactcgtcggacgacagcggctgcgaaggcgcgctgagtcctgcggagcgcgagctactcgacttctccagctggttagggggctactgagcgccctcgacctatgagcctcagccccggaagccgagcgagcggccggcgcgctcatcgccggggagcccgccaggtggaccggcccgcgctccgcccccagcgagccggggacccacccaccaccccccgcaccgccgacgccgcctcgttcgtccggcccagcctgaccaatgccgcggtggaaacgggcttggagctggccccataagggctggcggcttcctccgacgccgcccctccccacagcttctcgactgcagtggggcggggggcaccaacacttggagatttttccggaggggagaggattttctaagggcacagagaatccattttctacacattaacttgagctgctggagggacactgctggcaaacggagacctatttttgtacaaagaacccttgacctggggcgtaataaagatgacctggacccctgcccccactatctggagttttccatgctggccaagatctggacacgagcagtccctgaggggcggggtccctggcgtgaggcccccgtgacagcccaccctggggtgggtttgtgggcactgctgctctgctagggagaagcctgtgtggggcacacctcttcaagggagcgtgaactttataaataaatcagttctgtttaaaaaaaaaaaaaaaa

SEQ ID NO: 153530 - DNA, 582 bp, Artificial Sequence
  derived and/or modified sequence
atggacgggggcacgcttccacggagtgccccacctgctccacccgtgccggttggatgtgccgccagacggaggcccgctagtccggaacttcttaggtgttccaggcgcagacgccctgctaccgctgaaacaggagggggggccgcggctgtggcaaggcggaatgagcgggaacggaaccgcgttaaattggtgaatctcggattccaggctttgcgccagcacgtcccacacggaggggcaagcaagaagttaagtaaggtcgaaaccctccggtctgctgtggaatacattagagccctccagcgcctcctggctgagcacgacgctgtacgtaatgcactcgcggggggccttaggccgcaagctgtgagaccgtctgctcccagggggccccccgggactaccccagtcgccgctagccctagtcgggccagctccagtccaggccggggtggtagcagtgagccgggctccccgcgatcagcatattcctccgacgacagcggatgcgaaggggcgctctcacccgccgagagagaactgctggatttcagtagctggctgggaggatattag

SEQ ID NO: 153531 - DNA, 582 bp, Artificial Sequence
  derived and/or modified sequence
atggatggcggcaccctgcccaggtctgcccccccagcccctcctgtgcctgtgggctgtgccgcccggcggcggcctgccagccctgagctgctgcgctgcagcagaagaagaagacctgccacagctgagactggaggaggagctgctgctgtggccaggagaaatgaaagagagaggaacagagtgaagctggtgaacctgggcttccaggccctgcggcagcacgtgccccatggaggagccagcaagaagctgagcaaggtggagaccctgcggtctgctgtggagtacatccgggccctgcagaggctgctggccgagcatgatgctgtgagaaatgccctggccggcggcctgcggccccaggccgtgcggcccagcgccccccggggccccccaggcaccacccctgtggccgccagccccagccgggccagcagcagccctggccggggcggcagcagcgagcccggcagccccaggtctgcctacagcagtgatgacagcggctgtgagggcgccctgagccctgctgagcgggagctgctggacttcagctcctggctgggcggctactag

SEQ ID NO: 153532 - DNA, 582 bp, Artificial Sequence
  derived and/or modified sequence
atggacggcggcaccctgccccggagcgccccccccgccccccccgttcctgtgggatgcgccgcccgcagacgacctgcatcgcccgagctgctcagatgctccaggcgacggcgaccggcaaccgccgaaaccggaggtggcgccgccgccgttgctcgcagaaacgagcgcgagagaaacagggtcaaactggtaaatctgggctttcaggccttgcggcaacacgttccccacggcggcgcctcaaaaaagctgtcaaaagtcgagacccttcgtagcgccgtggagtacatcagagctctccaacggttactggctgaacacgatgccgtgagaaacgccctcgccggaggcctgaggccacaggcagtaagaccctctgctcctagggggcccccaggcacaaccccagtggcggccagtccaagccgcgcgagcagctcgcccgggcgcggtgggagtagcgagcctgggagcccgaggtcagcatacagctcagacgactcgggatgcgagggcgcgttgtctcccgcggaacgagaactactcgatttcagctcgtggctgggcgggtactag

SEQ ID NO: 153533 - DNA, 582 bp, Artificial Sequence
  derived and/or modified sequence
atggacggtggcactctgccgaggagcgcccctccggcacctcccgttccagtggggtgtgccgctagaagacgacccgcttctcctgaacttcttaggtgctctcggagacgtagacctgccacggccgagacagggggtggggctgctgccgtcgcaagacgcaatgagagagagaggaaccgcgtgaaactggtgaatttggggtttcaggctctacggcagcacgtgccccacggcggagcttccaagaagctcagcaaagtagaaactctgcgaagcgctgtggaatacatcagggcccttcaaagattgctggccgaacacgacgcagtaagaaatgccctggccggtggacttaggccacaggctgtgaggccttccgcccctaggggaccaccgggtactactcctgtggcagcctctccatcccgtgcttccagcagtcctggtcgtggcggatcatctgagccaggatccccacgctcggcgtactcatctgatgacagcggctgtgaaggagcactgagcccagccgagcgagaactgctcgatttcagttcctggctgggcggatattag

SEQ ID NO: 153534 - DNA, 1852 bp, Artificial Sequence
  derived and/or modified sequence
ctggcggctcttgggactggcggggctgcgcgcggggttagggtgggggtacgggaaggctcaacccaggacctgcgtaccttgctttgggggcgcactaagcacctgccgggagcagggggcgcaccgggaactcgcagatttcgccagttgggcgcactggggatctgtggactgcgtccgggggatgggctagggggacatgcgcacgctttgggccttacagaatgtgatcgcgcgagggggagggcgaagcgtggcgggagggcgaggcgaaggaaggagggcgtgagaaaggcgacggcggcggcgcggaggagggttatctatacatttaaaaaccagccgcctgcgccgcgcctgcggagacctgggagagtccggccgcacgcgcgggacacgagcgtcccacgctccctggcgcgtacggcctgccaccactaggcctcctatccccgggctccagacgacctaggacgcgtgccctggggagttgcctggcggcgccgtgccagaagcccccttggggcgccacagttttccccgtcgcctccggttcctctgcctgcaccttcctgcggcgcgccgggacctggagcgggcgggtggatgcaggcgcgatggacggcggcacactgcccaggtccgcgccccctgcgccccccgtccctgtcggctgcgctgcccggcggagacccgcgtccccggaactgttgcgctgcagccggcggcggcgaccggccaccgcagagaccggaggcggcgcagcggccgtagcgcggcgcaatgagcgcgagcgcaaccgcgtgaagctggtgaacttgggcttccaggcgctgcggcagcacgtgccgcacggcggcgccagcaagaagctgagcaaggtggagacgctgcgctcagccgtggagtacatccgcgcgctgcagcgcctgctggccgagcacgacgccgtgcgcaacgcgctggcgggagggctgaggccgcaggccgtgcggccgtctgcgccccgcgggccgccagggaccaccccggtcgccgcctcgccctcccgcgcttcttcgtccccgggccgcgggggcagctcggagcccggctccccgcgttccgcctactcgtcggacgacagcggctgcgaaggcgcgctgagtcctgcggagcgcgagctactcgacttctccagctggttagggggctactgagcgccctcgacctatgagcctcagccccggaagccgagcgagcggccggcgcgctcatcgccggggagcccgccaggtggaccggcccgcgctccgcccccagcgagccggggacccacccaccaccccccgcaccgccgacgccgcctcgttcgtccggcccagcctgaccaatgccgcggtggaaacgggcttggagctggccccataagggctggcggcttcctccgacgccgcccctccccacagcttctcgactgcagtggggcggggggcaccaacacttggagatttttccggaggggagaggattttctaagggcacagagaatccattttctacacattaacttgagctgctggagggacactgctggcaaacggagacctatttttgtacaaagaacccttgacctggggcgtaataaagatgacctggacccctgcccccactatctggagttttccatgctggccaagatctggacacgagcagtccctgaggggcggggtccctggcgtgaggcccccgtgacagcccaccctggggtgggtttgtgggcactgctgctctgctagggagaagcctgtgtggggcacacctcttcaagggagcgtgaactttataaataaatcagttctgtttacca

SEQ ID NO: 153535 - DNA, 582 bp, Artificial Sequence
  derived and/or modified sequence
atggacggcggcaccctgcccagaagcgccccccccgccccccccgtgcccgtgggctgcgccgccagaagaagacccgccagccccgagctgctgagatgcagcagaagaagaagacccgccaccgccgagaccggcggcggcgccgccgccgtggccagaagaaacgagagagagagaaacagagtgaagctggtgaacctgggcttccaggccctgagacagcacgtgccccacggcggcgccagcaagaagctgagcaaggtggagaccctgagaagcgccgtggagtacatcagagccctgcagagactgctggccgagcacgacgccgtgagaaacgccctggccggcggcctgagaccccaggccgtgagacccagcgcccccagaggcccccccggcaccacccccgtggccgccagccccagcagagccagcagcagccccggcagaggcggcagcagcgagcccggcagccccagaagcgcctacagcagcgacgacagcggctgcgagggcgccctgagccccgccgagagagagctgctggacttcagcagctggctgggcggctactag

SEQ ID NO: 153536 - protein, 354 aa, Artificial Sequence
  derived and/or modified sequence
MSRLLHAEEWAEVKELGDHHRQPQPHHLPQPPPPPQPPATLQAREHPVYPPELSLLDSTDPRAWLAPTLQGICTARAAQYLLHSPELGASEAAAPRDEVDGRGELVRRSSGGASSSKSPGPVKVREQLCKLKGGVVVDELGCSRQRAPSSKQVNGVQKQRRLAANARERRRMHGLNHAFDQLRNVIPSFNNDKKLSKYETLQMAQIYINALSELLQTPSGGEQPPPPPASCKSDHHHLRTAASYEGGAGNATAAGAQQASGGSQRPTPPGSCRTRFSAPASAGGYSVQLDALHFSTFEDSALTAMMAQKNLSPSLPGSILQPVQEENSKTSPRSHRSDGEFSPHSHYSDSDEAS

SEQ ID NO: 153537 - DNA, 1065 bp, Artificial Sequence
  derived and/or modified sequence
atgtctcgactgctacatgccgaggagtgggcagaagtcaaggagcttggcgaccatcaccggcagccgcagccacaccacctacctcagcctccacccccaccgcagccacctgctacacttcaggctcgagaacacccagtgtatcctcccgaactcagcctcttggactcaaccgacccacgcgcttggctcgcccccaccttacaggggatttgtacagccagggcggcccagtacttgttacatagccctgaattaggagccagcgaggctgccgctccccgggacgaagtggacggaagaggcgagctggtgcgtcgcagcagcggtggcgcctcctcttcaaagagtccaggcccagttaaggtgagggaacaactctgcaaactgaaagggggcgttgtggtagacgaactaggctgttcacggcagcgggctccatcttctaaacaggtaaatggggtgcaaaaacagcgtcgactggccgcgaacgccagagagcggcggcggatgcacggactgaaccacgctttcgaccagctcagaaatgtgataccgtccttcaacaatgataaaaaactctccaaatatgaaaccctgcaaatggcccagatttatatcaacgcactaagcgagctgctgcagactccttcaggtggcgagcaaccacctccgccaccagcatcctgcaaatcagatcatcaccacctgcgtacagcagcctcttacgaaggtggcgccggtaatgccacagcagccggtgcccaacaagccagtggggggagccaacgccccactccgcctggttcttgtaggactcgcttcagtgctcctgcaagtgccggagggtactcagtccaactagacgcactgcattttagtaccttcgaagactctgccttgacagcaatgatggctcagaaaaacctgtcaccttccttaccgggcagcatcctccagccggttcaagaggaaaatagcaagaccagcccgagatctcaccgcagcgacggtgaattttcccctcactcgcactatagcgattctgatgaggctagttag

SEQ ID NO: 153538 - DNA, 1065 bp, Artificial Sequence
  derived and/or modified sequence
atgagccggctgctgcatgctgaggagtgggccgaggtgaaggagctgggggaccaccaccggcagccccagccccaccacctgccccagcccccacctccaccccagcccccagccaccctgcaggcccgggagcaccctgtgtacccacctgagctgagcctgctggacagcacagacccccgggcctggctggcccccaccctgcagggcatctgcacagcccgggccgcccagtacctgctgcacagccctgagctgggcgccagcgaggccgccgcccccagagatgaggtggatggccgcggggagctggtgagaagaagcagcggcggggccagcagcagcaagagccctggccctgtgaaggtgcgggagcagctgtgcaagctgaagggcggcgtggtggtggatgagctgggctgcagccggcagagggcccccagcagcaagcaggtgaatggagtgcagaagcagaggcggctggccgccaatgcccgggagaggaggaggatgcacggcctgaaccacgcctttgaccagctgagaaatgtcatccccagcttcaacaatgacaagaagctgagcaaatatgagaccctgcagatggcccagatctacatcaatgccctgtctgagctgctgcagaccccatctggaggagagcagcccccacctcctccagccagctgcaagagtgaccaccaccacctgaggacagctgccagctatgagggcggcgctggaaatgccacagctgctggggcccagcaggccagcggcggcagccagaggcccaccccacctggcagctgcaggacccgcttcagcgccccagccagcgctgggggctacagcgtgcagctggatgccctgcacttcagcacctttgaggacagcgccctgacagccatgatggcccagaagaacctgagccccagcctgcccggcagcatcctgcagcctgtgcaggaggagaacagcaagaccagccccaggagccacagaagtgatggagagttcagcccccacagccactacagcgacagtgatgaggccagctag

SEQ ID NO: 153539 - DNA, 1065 bp, Artificial Sequence
  derived and/or modified sequence
atgagccggctgctgcacgccgaggagtgggccgaggtgaaggagctgggcgaccaccatcggcagccacagcctcatcacttgccacagccacccccccctcctcagcccccagctaccctacaggcaagggaacaccccgtttacccccccgaactttctctcctggacagcacagatccgagggcatggctcgcccctactcttcagggaatatgtacggcacgggcggcccagtatctcctccacagtcctgaactaggcgcttcagaggccgccgctcctagggacgaagtcgacggccgtggagagctggtaagacgcagcagtgggggcgctagttcctccaagagccctgggcctgttaaggttagagagcagctgtgcaagctaaaaggcggcgtggtcgttgacgagctgggttgttctagacagagagctccctcaagcaaacaagtcaacggcgtgcaaaagcagcgacggctcgccgccaacgctcgtgagagacgacgcatgcacggactgaaccatgctttcgaccaactgcgtaacgtaatcccatcttttaacaatgacaaaaagctatcgaaatatgagaccttacagatggcacagatctatattaacgcactgagcgagctcctccaaaccccatcggggggcgaacagcccccccctccacctgcttcttgtaaatcagatcatcaccacctccggactgctgcttcctacgagggcggggctgggaatgctaccgctgccggagctcaacaggcatccggcgggtctcaacgtccaactccacctggctcctgtagaaccagattctcagcacctgccagtgcaggtggctacagcgtccagttggacgccctgcacttctccactttcgaggattccgcacttacagcgatgatggctcagaaaaatctgtccccttctctgccaggtagtatattacagcctgtgcaggaagagaattcaaagacatccccaagaagccaccggtccgatggcgaattttccccccactcacactactctgactcagacgaggcatcctag

SEQ ID NO: 153540 - DNA, 1065 bp, Artificial Sequence
  derived and/or modified sequence
atgtcccggctactgcatgctgaagaatgggctgaggtgaaggagcttggggatcaccataggcagccacaaccccatcaccttcctcagccgccaccgccaccacagcccccagctactctccaggccagagagcaccccgtgtatcctccagagctgtctttactggacagcactgatcccagggcttggctggcaccaactctacagggcatctgtacagctcgcgcagcccaatacctcctgcactctcctgaactgggagccagcgaagcagcagcacctagggatgaggtcgatggcagaggcgaactggttcggaggagctctggtggagcgtcctctagcaagtccccaggccctgtcaaggtaagggaacagctctgcaaactgaagggcggagtcgtagttgatgagcttgggtgttcacgtcagcgggcaccctcctccaaacaagtgaacggcgtgcagaagcagcgcagactggcagccaatgccagggaacgccgtcggatgcacggcctgaaccatgcgttcgaccagttacgcaacgtgattccctcatttaacaacgataaaaaactttctaaatacgaaaccttacaaatggcgcagatttatataaacgccttgtcagagttattgcagaccccttctggcggagaacagcctcctccccctcctgctagctgcaagagtgaccatcaccatctgaggaccgcggctagttatgaagggggagcaggcaacgcgaccgccgcaggggctcagcaggccagcgggggatcacaacggcctactccgccaggctcctgtaggacccgtttcagtgccccagctagcgccggtggatactcagtacagctggacgccctgcacttctccacctttgaggactccgccctgacggccatgatggctcagaagaatctctccccgagcttgcctggctctatcctgcagcccgtgcaggaggaaaactcaaaaactagcccacgttcacaccggtcagacggggagttcagtccacactctcattacagcgattccgatgaggcctcatag

SEQ ID NO: 153541 - DNA, 1180 bp, Artificial Sequence
  derived and/or modified sequence
gcctccgatcctgagcctccgagcctttgcagtgcaatgtcccgcctgctgcatgcagaagagtgggctgaagtgaaggagttgggagaccaccatcgccagccccagccgcatcatctcccgcaaccgccgccgccgccgcagccacctgcaactttgcaggcgagagagcatcccgtctacccgcctgagctgtccctcctggacagcaccgacccacgcgcctggctggctcccactttgcagggcatctgcacggcacgcgccgcccagtatttgctacattccccggagctgggtgcctcagaggccgctgcgccccgggacgaggtggacggccggggggagctggtaaggaggagcagcggcggtgccagcagcagcaagagccccgggccggtgaaagtgcgggaacagctgtgcaagctgaaaggcggggtggtggtagacgagctgggctgcagccgccaacgggccccttccagcaaacaggtgaatggggtgcagaagcagagacggctagcagccaacgccagggagcggcgcaggatgcatgggctgaaccacgccttcgaccagctgcgcaatgttatcccgtcgttcaacaacgacaagaagctgtccaaatatgagaccctgcagatggcccaaatctacatcaacgccttgtccgagctgctacaaacgcccagcggaggggaacagccaccgccgcctccagcctcctgcaaaagcgaccaccaccaccttcgcaccgcggcctcctatgaagggggcgcgggcaacgcgaccgcagctggggctcagcaggcttccggagggagccagcggccgaccccgcccgggagttgccggactcgcttctcagccccagcttctgcgggagggtactcggtgcagctggacgctctgcacttctcgactttcgaggacagcgccctgacagcgatgatggcgcaaaagaatttgtctccttctctccccgggagcatcttgcagccagtgcaggaggaaaacagcaaaacttcgcctcggtcccacagaagcgacggggaattttccccccattcccattacagtgactcggatgaggcaagttaggaaggtgacagaagcctgaaaactgagacagaaacaaaactgccctttcccagtgcgcgggaagccccgcggttaaaga

SEQ ID NO: 153542 - DNA, 1065 bp, Artificial Sequence
  derived and/or modified sequence
atgagcagactgctgcacgccgaggagtgggccgaggtgaaggagctgggcgaccaccacagacagccccagccccaccacctgccccagccccccccccccccccagccccccgccaccctgcaggccagagagcaccccgtgtacccccccgagctgagcctgctggacagcaccgaccccagagcctggctggcccccaccctgcagggcatctgcaccgccagagccgcccagtacctgctgcacagccccgagctgggcgccagcgaggccgccgcccccagagacgaggtggacggcagaggcgagctggtgagaagaagcagcggcggcgccagcagcagcaagagccccggccccgtgaaggtgagagagcagctgtgcaagctgaagggcggcgtggtggtggacgagctgggctgcagcagacagagagcccccagcagcaagcaggtgaacggcgtgcagaagcagagaagactggccgccaacgccagagagagaagaagaatgcacggcctgaaccacgccttcgaccagctgagaaacgtgatccccagcttcaacaacgacaagaagctgagcaagtacgagaccctgcagatggcccagatctacatcaacgccctgagcgagctgctgcagacccccagcggcggcgagcagcccccccccccccccgccagctgcaagagcgaccaccaccacctgagaaccgccgccagctacgagggcggcgccggcaacgccaccgccgccggcgcccagcaggccagcggcggcagccagagacccaccccccccggcagctgcagaaccagattcagcgcccccgccagcgccggcggctacagcgtgcagctggacgccctgcacttcagcaccttcgaggacagcgccctgaccgccatgatggcccagaagaacctgagccccagcctgcccggcagcatcctgcagcccgtgcaggaggagaacagcaagaccagccccagaagccacagaagcgacggcgagttcagcccccacagccactacagcgacagcgacgaggccagctag

SEQ ID NO: 153543 - protein, 297 aa, Artificial Sequence
  derived and/or modified sequence
MFSRAGVAGLSAWTLQPQWIQVRNMATLKDITRRLKSIKNIQKITKSMKMVAAAKYARAERELKPARIYGLGSLALYEKADIKGPEDKKKHLLIGVSSDRGLCGAIHSSIAKQMKSEVATLTAAGKEVMLVGIGDKIRGILYRTHSDQFLVAFKEVGRKPPTFGDASVIALELLNSGYEFDEGSIIFNKFRSVISYKTEEKPIFSLNTVASADSMSIYDDIDADVLQNYQEYNLANIIYYSLKESTTSEQSARMTAMDNASKNASEMIDKLTLTFNRTRQAVITKELIEIISGAAAL

SEQ ID NO: 153544 - protein, 250 aa, Artificial Sequence
  derived and/or modified sequence
MKMVAAAKYARAERELKPARIYGLGSLALYEKADIKGPEDKKKHLLIGVSSDRGLCGAIHSSIAKQMKSEVATLTAAGKEVMLVGIGDKIRGILYRTHSDQFLVAFKEVGRKPPTFGDASVIALELLNSGYEFDEGSIIFNKFRSVISYKTEEKPIFSLNTVASADSMSIYDDIDADVLQNYQEYNLANIIYYSLKESTTSEQSARMTAMDNASKNASEMIDKLTLTFNRTRQAVITKELIEIISGAAAL

SEQ ID NO: 153545 - DNA, 894 bp, Artificial Sequence
  derived and/or modified sequence
atgttctcacgtgctggcgttgccggactctcagcgtggacactccagcctcagtggattcaggtgaggaacatggccaccctcaaggatatcaccagacgactgaagagtattaagaacattcagaagatcacgaagtcaatgaagatggtagcagccgcgaaatacgcccgggcagagagggaattgaaaccagctaggatttatgggctcggctcactcgcactgtacgaaaaagcagatatcaaaggtccggaagataagaagaaacacctgcttatcggtgtctcctctgatcgcgggctgtgcggggccatccactcgagcatagcaaaacaaatgaagtcagaggtggccacccttacagccgcaggtaaagaagttatgctggtcggcatcggtgacaagatacgcggcattttgtaccggacgcacagtgatcagtttctcgtggccttcaaggaagtagggcggaagccaccaacattcggcgacgcatccgtgattgccctggagctactgaatagcggttacgaattcgacgaagggagcatcatcttcaacaaattccggagcgtgatcagctataaaactgaggagaagcctatctttagtttgaatacagttgcatctgcagactctatgtcaatctacgacgacatcgacgctgatgtgcttcagaactaccaagaatataacctggccaacattatctattatagtctcaaagaaagtacaacttctgagcagtctgctaggatgaccgcgatggataatgcctctaagaacgcttccgaaatgatcgacaagttgacgttgaccttcaataggacacggcaggctgttatcactaaggagctgattgaaattatctccggcgccgccgctttgtag

SEQ ID NO: 153546 - DNA, 894 bp, Artificial Sequence
  derived and/or modified sequence
atgttcagcagagctggggtggccggcctgagcgcctggaccctgcagccccagtggatccaggtgaggaacatggccaccctgaaggacatcacccggcggctgaagagcatcaagaacatccagaagatcaccaagtccatgaagatggtggccgccgccaagtatgcccgggcagagcgggagctgaagccagcccgcatctacggcctgggcagcctggccctgtatgagaaggctgacatcaagggccctgaggacaagaagaagcacctgctgattggagtgtccagtgaccggggcctgtgtggggccatccacagcagcatcgccaagcagatgaagtctgaggtggccaccctgacagctgctgggaaggaggtgatgctggtgggcattggagacaagatccggggcatcctgtaccgcacccacagcgaccagttcctggtggccttcaaggaggtgggcaggaagccacccacctttggagatgcctctgtgattgccctggagctgctgaacagcggctatgaatttgatgagggcagcatcatcttcaacaagttccgcagcgtcatctcctacaagacagaggagaagcccatcttcagcctgaacacagtggccagcgctgacagcatgagcatctatgatgacattgatgctgatgtgctgcagaactaccaggagtacaacctggccaacatcatctactacagcctgaaggagagcaccaccagcgagcagagcgccaggatgacagccatggacaatgccagcaagaatgccagcgagatgattgacaagctgaccctgaccttcaacagaacccggcaggccgtcatcaccaaggagctgattgagatcatcagcggggctgctgccctgtag

SEQ ID NO: 153547 - DNA, 894 bp, Artificial Sequence
  derived and/or modified sequence
atgttcagccgggccggcgtggccggcctgagcgcctggaccctgcagcctcagtggatccaggtacgcaacatggccacattaaaggacattactaggcgactcaagtccataaagaatatacagaaaattacgaagtcaatgaaaatggtggctgccgccaaatatgcccgggctgaaagggaactgaagccggcgaggatatacggcctcggctctctagccttgtatgagaaggctgacatcaaaggcccagaggataagaaaaagcacctcctgattggagtgagtagcgatcgaggtctttgtggcgctatacactcatctatcgccaaacagatgaagtcagaagttgccaccttgactgccgccggcaaagaggtaatgctggtcggaataggagacaagatccggggaatcttatataggactcattccgatcagttcctggtggcctttaaggaagtcggccgcaagccccctaccttcggcgatgcatctgtgatcgctttggagctgctgaatagtggctatgagttcgacgagggtagtatcatcttcaacaagtttcgctccgttatttcgtacaaaaccgaggagaaacccatttttagtcttaatactgtagccagtgctgatagcatgtccatttacgacgacattgatgccgacgtgctgcagaactaccaggagtataacctggccaatattatctattacagcctcaaggagtccacaactagcgagcagtcggcaaggatgaccgcaatggataacgccagtaagaacgccagcgagatgatagacaagttgacacttacgttcaaccggactcgacaggccgtgattacgaaggagttgatcgaaattatctccggagctgcagcactctag

SEQ ID NO: 153548 - DNA, 894 bp, Artificial Sequence
  derived and/or modified sequence
atgttttcgcgtgcaggagtggccggtctgtccgcatggaccctgcagccccagtggatccaagtcaggaatatggcaacccttaaggatattacccgtaggctgaagagcattaagaacattcagaagatcactaaatccatgaaaatggtagctgctgccaagtatgcgagagccgaacgtgagcttaagcccgctcgcatctacgggcttggatccctggctttatacgaaaaggccgatatcaagggccctgaagacaaaaagaaacacctcctgattggcgtctcatccgataggggattatgcggcgcaattcattcgagcattgctaaacaaatgaagagcgaagtggccactctgacagccgcaggcaaggaggtcatgctggtcggtatcggcgataagatacgagggatcttataccggactcacagtgaccagtttctagtcgccttcaaggaagtcggtcgcaagccgcctacatttggggatgcctccgtcattgcattagagctgctgaatagcggctacgagttcgatgaggggagtataatcttcaacaagttcaggtcggtaatcagttacaagacagaggagaagcctatctttagcctgaacactgtggcaagtgctgactctatgagtatatacgacgatatcgatgccgatgttctgcagaattaccaggaatataacctagccaacattatatactactcacttaaagagtccaccacctcggaacagtctgctaggatgacggccatggacaacgctagcaaaaacgcctccgaaatgattgataagctgactctgacatttaaccgaactcgtcaagccgtgattacgaaggagttgatcgagatcattagcggcgctgccgctctttag

SEQ ID NO: 153549 - DNA, 1078 bp, Artificial Sequence
  derived and/or modified sequence
ctgaccgaccttcagcagggctgtggctaccatgttctctcgcgcgggtgtcgctgggctgtcggcctggaccttgcagccgcaatggattcaagttcgaaatatggcaactttgaaagatatcaccaggagactaaagtccatcaaaaacatccagaaaattaccaagtctatgaaaatggtagcggcagcaaaatatgcccgagctgagagagagctgaaaccagctcgaatatatggattgggatctttagctctgtatgaaaaagctgatatcaaggggcctgaagacaagaagaaacacctccttattggtgtgtcctcagatcgaggactgtgtggtgctattcattcctccattgctaaacagatgaaaagcgaggttgctacactaacagcagctgggaaagaagttatgcttgttggaattggtgacaaaatcagaggcatactttataggactcattctgaccagtttctggtggcattcaaagaagtgggaagaaagccccccacttttggagatgcgtcagtcattgcccttgaattactaaattctggatatgaatttgatgaaggctccatcatctttaataaattcaggtctgtcatctcctataagacagaagaaaagcccatcttttcccttaataccgttgcaagtgctgacagcatgagtatctatgacgatattgatgctgacgtgctgcaaaattaccaagaatacaatctggccaacatcatctactactctctgaaggagtccaccactagtgagcagagtgccaggatgacagccatggacaatgccagcaagaatgcttctgagatgattgacaaattgacattgacattcaaccgtacccgccaagctgtcatcacaaaagagttgattgaaattatctctggtgctgcagctctgtaaagaaggaaaattcagccagttgattttgtttttagcttactgctgcctttgtccgaagaaactgttcctccattatttgaattactgaagacagcaagatatttgtaaattatcttaaaataaacaacttaaaataaaatcattgtttttctt

SEQ ID NO: 153550 - DNA, 907 bp, Artificial Sequence
  derived and/or modified sequence
ctgaccgaccttcagcagggctgtggctaccatgttctctcgcgcgggtgtcgctgggctgtcggcctggaccttgcagccgcaatgtcaccaggagactaaagtccatcaaaaacatccagaaaattaccaagtctatgaaaatggtagcggcagcaaaatatgcccgagctgagagagagctgaaaccagctcgaatatatggattgggatctttagctctgtatgaaaaagctgatatcaaggggcctgaagacaagaagaaacacctccttattggtgtgtcctcagatcgaggactgtgtggtgctattcattcctccattgctaaacagatgaaaagcgaggttgctacactaacagcagctgggaaagaagttatgcttgttggaattggtgacaaaatcagaggcatactttataggactcattctgaccagtttctggtggcattcaaagaagtgggaagaaagccccccacttttggagatgcgtcagtcattgcccttgaattactaaattctggatatgaatttgatgaaggctccatcatctttaataaattcaggtctgtcatctcctataagacagaagaaaagcccatcttttcccttaataccgttgcaagtgctgacagcatgagtatctatgacgatattgatgctgacgtgctgcaaaattaccaagaatacaatctggccaacatcatctactactctctgaaggagtccaccactagtgagcagagtgccaggatgacagccatggacaatgccagcaagaatgcttctgagatgattgacaaattgacattgacattcaaccgtacccgccaagctgtcatcacaaaagagttgattgaaattatctctggtgctgcagctctgtgagtaattgtagattgtcg

SEQ ID NO: 153551 - DNA, 894 bp, Artificial Sequence
  derived and/or modified sequence
atgttcagcagagccggcgtggccggcctgagcgcctggaccctgcagccccagtggatccaggtgagaaacatggccaccctgaaggacatcaccagaagactgaagagcatcaagaacatccagaagatcaccaagagcatgaagatggtggccgccgccaagtacgccagagccgagagagagctgaagcccgccagaatctacggcctgggcagcctggccctgtacgagaaggccgacatcaagggccccgaggacaagaagaagcacctgctgatcggcgtgagcagcgacagaggcctgtgcggcgccatccacagcagcatcgccaagcagatgaagagcgaggtggccaccctgaccgccgccggcaaggaggtgatgctggtgggcatcggcgacaagatcagaggcatcctgtacagaacccacagcgaccagttcctggtggccttcaaggaggtgggcagaaagccccccaccttcggcgacgccagcgtgatcgccctggagctgctgaacagcggctacgagttcgacgagggcagcatcatcttcaacaagttcagaagcgtgatcagctacaagaccgaggagaagcccatcttcagcctgaacaccgtggccagcgccgacagcatgagcatctacgacgacatcgacgccgacgtgctgcagaactaccaggagtacaacctggccaacatcatctactacagcctgaaggagagcaccaccagcgagcagagcgccagaatgaccgccatggacaacgccagcaagaacgccagcgagatgatcgacaagctgaccctgaccttcaacagaaccagacaggccgtgatcaccaaggagctgatcgagatcatcagcggcgccgccgccctgtag

SEQ ID NO: 153552 - protein, 136 aa, Artificial Sequence
  derived and/or modified sequence
MQTAGALFISPALIRCCTRGLIRPVSASFLNSPVNSSKQPSYSNFPLQVARREFQTSVVSRDIDTAAKFIGAGAATVGVAGSGAGIGTVFGSLIIGYARNPSLKQQLFSYAILGFALSEAMGLFCLMVAFLILFAM

SEQ ID NO: 153553 - DNA, 411 bp, Artificial Sequence
  derived and/or modified sequence
atgcaaaccgccggagcactcttcattagccctgccttaattcggtgttgtaccaggggcctaatccggcctgtttctgcatcattcttaaactcacctgtgaactcaagcaagcaacctagttattctaacttccctttacaggtggccagaagagagttccaaactagcgtggtcagtagggatatagatacagccgcgaaatttatcggtgctggggcggctacagttggggtagcgggaagtggcgctggtatcggtactgtgttcgggagcctcataattggttacgcgcgcaatcccagccttaaacaacagctgttctcttacgccatacttggatttgctctctctgaggcaatggggctgttctgtctgatggtggcttttctcatcctgtttgctatgtag

SEQ ID NO: 153554 - DNA, 411 bp, Artificial Sequence
  derived and/or modified sequence
atgcagactgctggtgccctgttcatatcacctgcgctcatcaggtgctgtacccggggattgattaggcctgtcagtgcctcattcctaaattcacctgtaaattcttccaaacagccctcatactctaacttccctttacaggtggccagaagggagtttcagacatcagtggtgtctagggatatcgataccgccgctaagttcattggagcgggcgcagccactgtaggggtggccgggtctggagctggtatcggcaccgtgtttggctctctgattatcgggtacgctcgaaatccatctctcaagcagcagctctttagctatgccattttgggttttgcactgagcgaggcaatgggactgttttgtctaatggtggcgttcttgatactattcgccatgtag

SEQ ID NO: 153555 - DNA, 411 bp, Artificial Sequence
  derived and/or modified sequence
atgcagacagctggggccctcttcatcagccctgccctgatccgctgctgcacccggggcctcatccggcctgtgtctgccagcttcctgaacagccctgtgaacagcagcaagcagcccagctacagcaacttccccctgcaggtggcccggcgggagttccagacctctgtggtgtcccgggacatcgacacagctgccaagttcatcggggccggggccgccaccgtgggcgtggccggcagcggggccggcatcggcaccgtgtttggcagcctcatcatcggctacgccaggaaccccagcctgaagcagcagctgttctcctatgccatcctgggctttgccctgtctgaggccatgggcctcttctgcctgatggtggccttcctgatcctgtttgccatgtag

SEQ ID NO: 153556 - DNA, 411 bp, Artificial Sequence
  derived and/or modified sequence
atgcagaccgccggcgccctgttcatcagccccgccctgatccggtgttgcacaagagggctgattaggccagtgtctgctagttttttgaacagtccagtgaattccagcaagcaaccctcctactcaaatttcccactgcaggtcgcgagacgggagttccaaactagcgtcgtgtccagagacatcgatacagccgccaaattcatcggggcgggcgcggcgaccgtgggtgttgctggctccggcgctggcattgggaccgtctttggatccttgatcatcgggtacgcccgtaacccctcactgaagcagcagctgttcagctatgccattctgggctttgcattatcggaagccatgggcttattctgcttgatggttgcatttcttatcttgttcgcaatgtag

SEQ ID NO: 153557 - DNA, 411 bp, Artificial Sequence
  derived and/or modified sequence
atgcagaccgccggcgccctgttcatcagccccgccctgatccggtgctgtactcgtgggttaattaggcccgtgtccgcgtctttcctaaacagtccagtaaattctagcaaacagccctcctactctaattttccactccaggttgcccgacgtgagtttcagactagcgtcgtgtcaagagacatcgataccgccgccaaattcatcggagcgggagccgccactgtgggagttgctggctccggtgcgggcatcggaaccgtcttcggctcgctgatcattggttacgctaggaaccccagtctgaaacaacagctgttttcttacgctattcttggcttcgcccttagcgaggccatgggtctcttttgtctcatggtagcctttctgatcctcttcgccatgtag

SEQ ID NO: 153558 - DNA, 411 bp, Artificial Sequence
  derived and/or modified sequence
atgcaaacagcaggcgctctgttcataagtcctgcattgattagatgctgcactcggggattgatccgaccggtctccgcctcttttttgaactcacctgtgaactctagcaagcagccatcctactctaattttccactgcaggtggcccgtagggagtttcagactagtgtggtgtctagagatatcgataccgccgcaaagtttatcggcgctggggctgcaactgtaggggtggccggttccggagccggaatcggtactgtctttggctctctgattattggttatgccaggaatccatcactgaagcagcagctgttctcttatgccattctggggttcgccctgtccgaggccatgggattattctgcctcatggtcgcattcttgattctgtttgccatgtag

SEQ ID NO: 153559 - DNA, 411 bp, Artificial Sequence
  derived and/or modified sequence
atgcaaaccgccggagctctgttcattagccccgcattaattcgttgctgtacacgtggtctcattagaccggtttcagcttcgttcctgaactctccggtgaattctagcaaacagcctagttactctaattttccgctgcaagtcgccaggcgggaattccagacctcagtggtgtcccgtgatatcgatactgctgcaaaattcatcggcgcaggagccgctactgttggtgtggccggatccggagctgggattggcacagtgtttggctcgcttatcatcgggtacgccagaaatccctccctgaagcagcaactgttcagttacgcaatccttggatttgctctctcagaggccatgggactgttttgcctcatggtcgctttccttattctgtttgcgatgtag

SEQ ID NO: 153560 - DNA, 598 bp, Artificial Sequence
  derived and/or modified sequence
ccaatgagaatggagaaggtccaggacacgtgggtgggggaagctgagcgctgagaccaagggctaaagctgggagactgaaaaaatgcagaccgccggggcattattcatttctccagctctgatccgctgttgtaccaggggtctaatcaggcctgtgtctgcctccttcttgaatagcccagtgaattcatctaaacagccttcctacagcaacttcccactccaggtggccagacgggagttccagaccagtgttgtctcccgggacattgacacagcagccaagtttattggtgctggggcagccacagttggtgtggctggttcaggggctggcattggaaccgtgtttggcagcttgatcattggctatgccaggaacccgtctctcaagcagcagctcttctcctatgccattcttggctttgccctgtctgaggccatggggcttttctgtttgatggtcgccttcctcatcctcttcgccatgtgaggctccatgggggggtcaccggcctgttgctactgcaactccacaccattcttggtgctggggtgtgttaagctttaccattaaacacaacgtttctctaaa

SEQ ID NO: 153561 - DNA, 614 bp, Artificial Sequence
  derived and/or modified sequence
gagaccaagggctaaagctgggaggtgagtctgtcaccttgagccgggcgagcgctgtgggccaagcaggggttgcagggtagtaggagtgcagactgaaaaaatgcagaccgccggggcattattcatttctccagctctgatccgctgttgtaccaggggtctaatcaggcctgtgtctgcctccttcttgaatagcccagtgaattcatctaaacagccttcctacagcaacttcccactccaggtggccagacgggagttccagaccagtgttgtctcccgggacattgacacagcagccaagtttattggtgctggggcagccacagttggtgtggctggttcaggggctggcattggaaccgtgtttggcagcttgatcattggctatgccaggaacccgtctctcaagcagcagctcttctcctatgccattcttggctttgccctgtctgaggccatggggcttttctgtttgatggtcgccttcctcatcctcttcgccatgtgaggctccatgggggggtcaccggcctgttgctactgcaactccacaccattcttggtgctggggtgtgttaagctttaccattaaacacaacgtttctcta

SEQ ID NO: 153562 - DNA, 411 bp, Artificial Sequence
  derived and/or modified sequence
atgcagaccgccggcgccctgttcatcagccccgccctgatcagatgctgcaccagaggcctgatcagacccgtgagcgccagcttcctgaacagccccgtgaacagcagcaagcagcccagctacagcaacttccccctgcaggtggccagaagagagttccagaccagcgtggtgagcagagacatcgacaccgccgccaagttcatcggcgccggcgccgccaccgtgggcgtggccggcagcggcgccggcatcggcaccgtgttcggcagcctgatcatcggctacgccagaaaccccagcctgaagcagcagctgttcagctacgccatcctgggcttcgccctgagcgaggccatgggcctgttctgcctgatggtggccttcctgatcctgttcgccatgtag

SEQ ID NO: 153563 - protein, 198 aa, Artificial Sequence
  derived and/or modified sequence
MPELILYVAITLSVAERLVGPGHACAEPSFRSSRCSAPLCLLCSGSSSPATAPHPLKMFACSKFVSTPSLVKSTSQLLSRPLSAVVLKRPEILTDESLSSLAVSCPLTSLVSSRSFQTSAISRDIDTAAKFIGAGAATVGVAGSGAGIGTVFGSLIIGYARNPSLKQQLFSYAILGFALSEAMGLFCLMVAFLILFAM

SEQ ID NO: 153564 - DNA, 597 bp, Artificial Sequence
  derived and/or modified sequence
atgcctgaattaattttatatgtggcaatcactctgtccgtcgccgaacgacttgtcggacccgggcacgcttgtgccgaacctagctttagatccagccggtgcagcgcgcctctgtgcctgctctgctctggctcgagttcccccgccacagccccccaccctctcaaaatgtttgcctgctctaagtttgtgtcgaccccctctctcgtgaagtcgacgagccagctgctgtctaggccccttagcgccgtggttctgaagaggcctgaaatcctgacagacgaatctctgtccagtttggctgtctcatgtcccctcacaagcctggtgtcgagcaggtcattccagaccagcgctatctcccgggacatcgataccgcagccaagtttatcggggctggcgctgccacagtcggagtggcaggctcaggagcaggcattggaaccgtgttcggctcgttaattattggctacgcacgtaatccctctctcaagcagcagttattcagttatgctattctgggattcgccttgagcgaggcgatgggattattttgtctgatggtcgcattcttgattctcttcgctatgtag

SEQ ID NO: 153565 - DNA, 597 bp, Artificial Sequence
  derived and/or modified sequence
atgcctgagctgatcctgtatgtggccatcaccctgtctgtggccgagcggctggtgggccctggccacgcctgtgccgagcccagcttccgcagcagccgctgcagcgcccccctgtgcctgctgtgcagcggcagcagcagccctgccacagccccccaccccctgaagatgtttgcctgcagcaagtttgtgtccacccccagcctggtgaagagcaccagccagctgctgagccggcccctgtctgctgtggtgctgaagaggcctgagatcctgacagatgagagcctgagcagcctggccgtgtcctgccccctgaccagcctggtgagcagccgctccttccagaccagcgccatcagccgggacatcgacacagctgccaagttcatcggggccggggccgccaccgtgggcgtggccggcagcggggccggcatcggcaccgtgtttggcagcctcatcatcggctacgccaggaaccccagcctgaagcagcagctgttctcctatgccatcctgggctttgccctgtctgaggccatgggcctcttctgcctgatggtggccttcctgatcctgtttgccatgtag

SEQ ID NO: 153566 - DNA, 597 bp, Artificial Sequence
  derived and/or modified sequence
atgcccgagctgatcctgtacgtggccatcaccctgagcgtggccgagcggctggtggggcctgggcacgcttgtgcggaacctagctttagaagcagccgctgcagcgctcccctctgccttctgtgcagcggctcctcgagtccggcgactgctccacatcccttaaagatgtttgcctgtagcaagtttgtgagcaccccttcccttgtgaagtccacaagccaattgctgagtcgccccttatccgctgtggttctcaagaggccagagattctgactgacgaatccctgtccagcttggcagtgagctgccctcttacatccctggtgagtagccgctcatttcaaacaagtgccatctcccgggacatcgacactgcagccaaattcatcggggccggggcagctaccgtgggcgttgccgggtctggggccggaatcgggacagtgtttggatctctcatcataggttatgcgcgcaacccttcgcttaaacagcagcttttctcctatgccattctcggctttgccttgtccgaagccatgggacttttttgtctgatggtcgcctttttgattctgttcgctatgtag

SEQ ID NO: 153567 - DNA, 597 bp, Artificial Sequence
  derived and/or modified sequence
atgcccgaattgatcctgtacgtggcaatcacactatccgtagcagaacgactcgtggggccagggcacgcctgcgcagaaccaagctttcggagttccaggtgttccgcacccctttgccttctgtgtagtggtagttcctctcccgctactgcccctcaccccctcaagatgttcgcatgttctaagttcgtatcaactccctctcttgttaaatcaactagccaacttttgagccgtcccctgtcagcagtggtcctcaaaagacctgagatcctcacagatgagtctctgagctcattagccgtctcatgtcccctgacctctctagtaagtagtcggagctttcagacctcggccatttcccgagatatcgacacagctgctaaatttatcggggcaggagccgctaccgtcggcgtggccggatctggagccggaattggtaccgtgtttggctccctgattatcggatatgctcgcaatccatcactgaagcagcagctgttctcctacgccatcctggggtttgctctctccgaggctatggggctgttttgcctcatggtggcatttctgatcctgttcgctatgtag

SEQ ID NO: 153568 - DNA, 878 bp, Artificial Sequence
  derived and/or modified sequence
ccacgttacggatcggcttactccgcggagttggcctcatttctgcagtcggcgctccctgtagtttctcctctcgaacgccaggtggagcaaccggccggataccgccacagccctggcaggcggcgctgtgatgcctgagctgatcctgtatgttgcaatcactctatccgtggctgagcgactcgttggcccgggtcacgcatgcgctgagccttcctttcgctcttcccgctgctccgcccctctctgtcttctctgcagtgggagcagctctcctgccacagctcctcaccccctgaaaatgttcgcctgctccaagtttgtctccactccctccttggtcaagagcacctcacagctgctgagccgtccgctatctgcagtggtgctgaaacgaccggagatactgacagatgagagcctcagcagcttggcagtctcatgtccccttacctcacttgtctctagccgcagcttccaaaccagcgccatttcaagggacatcgacacagcagccaagttcattggagctggggctgccacagttggggtggctggttctggggctgggattggaactgtgtttgggagcctcatcattggttatgccaggaacccttctctgaagcaacagctcttctcctacgccattctgggctttgccctctcggaggccatggggctcttttgtctgatggtagcctttctcatcctctttgccatgtgaaggagccgtctccacctcccatagttctcccgcgtctggttggccccgtgtgttccttttcctatacctccccaggcagcctggggaacgtggttggctcagggtttgacagagaaaagacaaataaatactgtattaataagatgtt

SEQ ID NO: 153569 - DNA, 745 bp, Artificial Sequence
  derived and/or modified sequence
tgtgacgactgcgcatgctcggaaaggggacgcaagtccgagatcccaaacgcggtacagaccaaaccgcagtccacgttacggatcggcttactccgcggagttggcctcatttctgcagtcggcgctccctgtagtttctcctctcgaacgccagctctcctgccacagctcctcaccccctgaaaatgttcgcctgctccaagtttgtctccactccctccttggtcaagagcacctcacagctgctgagccgtccgctatctgcagtggtgctgaaacgaccggagatactgacagatgagagcctcagcagcttggcagtctcatgtccccttacctcacttgtctctagccgcagcttccaaaccagcgccatttcaagggacatcgacacagcagccaagttcattggagctggggctgccacagttggggtggctggttctggggctgggattggaactgtgtttgggagcctcatcattggttatgccaggaacccttctctgaagcaacagctcttctcctacgccattctgggctttgccctctcggaggccatggggctcttttgtctgatggtagcctttctcatcctctttgccatgtgaaggagccgtctccacctcccatagttctcccgcgtctggttggccccgtgtgttccttttcctatacctccccaggcagcctggggaacgtggttggctcagggtttgacagagaaaagacaaataaatac

SEQ ID NO: 153570 - DNA, 597 bp, Artificial Sequence
  derived and/or modified sequence
atgcccgagctgatcctgtacgtggccatcaccctgagcgtggccgagagactggtgggccccggccacgcctgcgccgagcccagcttcagaagcagcagatgcagcgcccccctgtgcctgctgtgcagcggcagcagcagccccgccaccgccccccaccccctgaagatgttcgcctgcagcaagttcgtgagcacccccagcctggtgaagagcaccagccagctgctgagcagacccctgagcgccgtggtgctgaagagacccgagatcctgaccgacgagagcctgagcagcctggccgtgagctgccccctgaccagcctggtgagcagcagaagcttccagaccagcgccatcagcagagacatcgacaccgccgccaagttcatcggcgccggcgccgccaccgtgggcgtggccggcagcggcgccggcatcggcaccgtgttcggcagcctgatcatcggctacgccagaaaccccagcctgaagcagcagctgttcagctacgccatcctgggcttcgccctgagcgaggccatgggcctgttctgcctgatggtggccttcctgatcctgttcgccatgtag

SEQ ID NO: 153571 - protein, 831 aa, Artificial Sequence
  derived and/or modified sequence
MGELFRSEEMTLAQLFLQSEAAYCCVSELGELGKVQFRDLNPDVNVFQRKFVNEVRRCEEMDRKLRFVEKEIRKANIPIMDTGENPEVPFPRDMIDLEANFEKIENELKEINTNQEALKRNFLELTELKFILRKTQQFFDEMADPDLLEESSSLLEPSEMGRGTPLRLGFVAGVINRERIPTFERMLWRVCRGNVFLRQAEIENPLEDPVTGDYVHKSVFIIFFQGDQLKNRVKKICEGFRASLYPCPETPQERKEMASGVNTRIDDLQMVLNQTEDHRQRVLQAAAKNIRVWFIKVRKMKAIYHTLNLCNIDVTQKCLIAEVWCPVTDLDSIQFALRRGTEHSGSTVPSILNRMQTNQTPPTYNKTNKFTYGFQNIVDAYGIGTYREINPAPYTIITFPFLFAVMFGDFGHGILMTLFAVWMVLRESRILSQKNENEMFSTVFSGRYIILLMGVFSMYTGLIYNDCFSKSLNIFGSSWSVRPMFTYNWTEETLRGNPVLQLNPALPGVFGGPYPFGIDPIWNIATNKLTFLNSFKMKMSVILGIIHMLFGVSLSLFNHIYFKKPLNIYFGFIPEIIFMTSLFGYLVILIFYKWTAYDAHTSENAPSLLIHFINMFLFSYPESGYSMLYSGQKGIQCFLVVVALLCVPWMLLFKPLVLRRQYLRRKHLGTLNFGGIRVGNGPTEEDAEIIQHDQLSTHSEDADEFDFGDTMVHQAIHTIEYCLGCISNTASYLRLWALSLAHAQLSEVLWTMVIHIGLSVKSLAGGLVLFFFFTAFATLTVAILLIMEGLSAFLHALRLHWVEFQNKFYSGTGFKFLPFSFEHIREGKFEE

SEQ ID NO: 153572 - protein, 788 aa, Artificial Sequence
  derived and/or modified sequence
MGELFRSEEMTLAQLFLQSEAAYCCVSELGELGKVQFRDLNPDVNVFQRKFVNEVRRCEEMDRKLRFVEKEIRKANIPIMDTGENPEVPFPRDMIDLEMADPDLLEESSSLLEPSEMGRGTPLRLGFVAGVINRERIPTFERMLWRVCRGNVFLRQAEIENPLEDPVTGDYVHKSVFIIFFQGDQLKNRVKKICEGFRASLYPCPETPQERKEMASGVNTRIDDLQMVLNQTEDHRQRVLQAAAKNIRVWFIKVRKMKAIYHTLNLCNIDVTQKCLIAEVWCPVTDLDSIQFALRRGTEHSGSTVPSILNRMQTNQTPPTYNKTNKFTYGFQNIVDAYGIGTYREINPAPYTIITFPFLFAVMFGDFGHGILMTLFAVWMVLRESRILSQKNENEMFSTVFSGRYIILLMGVFSMYTGLIYNDCFSKSLNIFGSSWSVRPMFTYNWTEETLRGNPVLQLNPALPGVFGGPYPFGIDPIWNIATNKLTFLNSFKMKMSVILGIIHMLFGVSLSLFNHIYFKKPLNIYFGFIPEIIFMTSLFGYLVILIFYKWTAYDAHTSENAPSLLIHFINMFLFSYPESGYSMLYSGQKGIQCFLVVVALLCVPWMLLFKPLVLRRQYLRRKHLGTLNFGGIRVGNGPTEEDAEIIQHDQLSTHSEDADEFDFGDTMVHQAIHTIEYCLGCISNTASYLRLWALSLAHAQLSEVLWTMVIHIGLSVKSLAGGLVLFFFFTAFATLTVAILLIMEGLSAFLHALRLHWVEFQNKFYSGTGFKFLPFSFEHIREGKFEE

SEQ ID NO: 153573 - DNA, 2496 bp, Artificial Sequence
  derived and/or modified sequence
atgggcgaattgtttaggtctgaggaaatgaccctcgcacagctctttcttcagtccgaggcagcctactgttgtgtgagcgagctgggggaactggggaaggtgcagttcagagacttgaatcctgacgttaacgtttttcagaggaaatttgtcaacgaggtcaggagatgtgaggagatggaccggaagctaagattcgtggagaaggagattcgcaaagctaacatccctatcatggataccggggaaaacccagaagttcctttccctcgagatatgatcgatctcgaagccaatttcgagaaaatcgagaacgagctgaaggaaatcaacaccaaccaggaagcactgaagaggaatttcctggagctcaccgaattgaagttcattcttcgcaaaacacagcaattcttcgatgagatggccgaccccgacctgctcgaagagagctccagtctgctagagccttccgaaatggggcggggtaccccactacggctgggcttcgttgctggggtgatcaatcgagagaggatccccacgttcgagagaatgctatggagggtatgccgcggcaacgtcttcctgagacaggctgagatcgaaaacccgttagaagacccagtcactggcgactatgttcataaatctgtatttattatcttctttcagggagatcaactgaaaaatagagtcaagaaaatttgcgaaggctttcgggcctctctgtacccctgccccgagactcctcaagagagaaaggagatggccagcggagtcaacactcgaattgatgatctgcagatggtgctgaatcagacagaggaccaccggcagagagtgctgcaggctgccgcaaaaaacatacgtgtgtggtttatcaaggtcagaaagatgaaagctatctaccatactcttaacctctgtaacatcgatgtaactcagaagtgtttgattgccgaagtatggtgtccggtgactgatcttgactcaatacagtttgctctgcggcggggcactgagcactctggcagtaccgtgccctccatcctaaatcgtatgcagaccaatcagacccctccaacatacaataaaacgaacaagttcacgtacggcttccagaacatagtggacgcttatggtatcggcacctacagagaaatcaatccagcgccctacacaatcattacttttccctttctgtttgccgttatgtttggcgactttggccacggcatactaatgaccctgttcgccgtatggatggtgctgagggaatctcgtattctcagtcaaaaaaatgaaaatgagatgttttctactgtcttctcaggaaggtacataatcctccttatgggagtttttagcatgtacacaggattgatatataacgactgtttttccaagtcactcaatatttttgggagtagctggtccgttaggcctatgttcacctacaactggacagaagagacattaaggggaaatccagtgttgcagctgaatcctgcgttgcctggggtcttcggaggaccttaccctttcggtatagaccctatctggaatatagccacaaacaaactcacttttcttaactctttcaaaatgaagatgagcgtgatcctgggtattattcatatgttgttcggtgtgagtctgagtctgttcaatcacatctactttaagaagccactgaacatctatttcggctttattccagaaatcatattcatgacctcactcttcggatatctggtcattctgatcttctacaagtggacagcctatgatgcccacacatccgaaaatgcaccctccctgcttatccactttattaacatgtttctgttctcatatccggaaagcggctactcaatgctgtactctggccagaagggaattcaatgctttcttgtggtggttgccctgttgtgcgttccatggatgcttttattcaagcctctcgtcctgcgtcgtcagtatctgcgcaggaagcacttggggacccttaacttcggcggaattagggtgggcaacggccctacagaggaggatgccgaaataatccagcatgatcagctatctactcatagtgaggatgcagacgaattcgactttggggatactatggttcaccaggctatccacaccatcgagtactgtctcggttgtatcagcaacaccgcctcctacctcagactgtgggctctctccttagcccacgcccagctgtccgaagtcttatggacaatggtgatccatattggtctgtccgtcaaatccctagccggcggccttgtcctgttcttcttctttacggccttcgctaccctgacggtggccatcctgctgatcatggagggcctctcggcatttctgcacgcccttcgactgcactgggttgaattccagaataaattttacagtgggaccggattcaagtttctacccttctcatttgaacacatcagagagggcaagttcgaggagtag

SEQ ID NO: 153574 - DNA, 2367 bp, Artificial Sequence
  derived and/or modified sequence
atgggagagctgtttcggtccgaggaaatgaccctcgcacagctcttcctgcaaagcgaagctgcttattgctgtgtgagtgagctgggggagctgggtaaggtgcaatttcgagatttaaatcctgacgttaatgtgtttcaaaggaagtttgtcaatgaggtccggaggtgtgaagaaatggataggaagcttagatttgtcgagaaagagatccggaaagctaatattccaatcatggacactggcgaaaaccccgaggttccatttccgcgagacatgatcgacctagagatggccgatcctgatctcctagaggagtcatcatctctcctcgagccctcagaaatgggcagagggacgcctttacgcctcggcttcgtcgcaggggtcatcaaccgggagaggataccaacttttgagagaatgctgtggcgggtttgccgcggaaacgtcttcttaaggcaagctgagattgaaaaccctctagaggaccccgtgacaggcgattatgtccacaagagcgtttttattatcttctttcagggggatcagctgaaaaacagagttaaaaaaatctgtgaagggttcagagccagcttatatccttgccccgagaccccacaggaacgcaaggagatggcatctggtgtgaatacaaggatcgatgatctccaaatggttctgaatcagactgaagatcacaggcaacgggttctgcaggcggcggccaagaatattcgagtgtggttcatcaaagtgcggaagatgaaggctatctatcacacactcaatctatgtaatatcgatgtgacacagaaatgccttatcgcggaagtatggtgccctgtgactgacctcgatagcatccaattcgcgcttcgtcggggaaccgaacatagtggatctacagtcccttcaatcctgaaccggatgcagacgaaccaaaccccacccacttacaataaaacaaacaaatttacctatggcttccaaaacatagtagacgcctatggcataggaacatatcgggagatcaatccagccccatacacgatcattacattccctttcctctttgcagtcatgtttggcgattttggccacggtatcctcatgacgctgtttgccgtttggatggtccttcgagagtccagaatcctgtcccagaagaacgaaaatgagatgtttagtaccgtttttagtggccgttacattatcttactcatgggcgtcttcagtatgtatactggactcatatacaacgactgcttctcgaagagtctgaacatttttggaagttcatggagcgttagaccaatgttcacttataactggaccgaagagacacttcgaggtaaccccgtgctccaactgaatccggcccttccgggcgtttttggcggtccctaccccttcggaatagatccaatttggaacattgcaaccaataaactgacatttttgaatagcttcaagatgaagatgagtgtgattctcgggataatccacatgttgttcggggtgtccctctctctttttaaccacatctacttcaagaagcccctcaatatttactttggcttcatccccgagatcatctttatgacgtctctgtttggttatttggtgatcctcattttttataaatggaccgcttatgacgcccacaccagtgaaaatgcgcctagcctcctgatccactttataaatatgttcctgttcagttacccggaaagcgggtactctatgctttatagtggacaaaagggcatccagtgtttcttagtggtggtagctctgctgtgcgtcccctggatgctcttgttcaagccccttgttcttcgtaggcagtacttgcggaggaagcatcttggcacactcaatttcggcggcatacgggttggcaacggccctactgaggaggatgcggagataattcagcatgatcaactctccacccacagtgaggacgccgacgagtttgacttcggtgacacaatggtgcaccaagccatccacaccatagagtactgcctgggctgcatttcgaacactgcttcataccttaggctctgggctctgagcctcgctcatgcacaactgtccgaggtgctctggaccatggtgattcatatcggcttgagcgtgaagtcgctagccgggggccttgtgctgtttttttttttcactgctttcgcaaccctgaccgttgctattctgctgattatggagggattaagcgccttcctgcacgcgcttcgtctgcattgggtggagtttcagaacaagttttatagtgggacgggctttaagttcctcccttttagtttcgagcacattcgcgagggtaagttcgaagaatag

SEQ ID NO: 153575 - DNA, 2496 bp, Artificial Sequence
  derived and/or modified sequence
atgggagagctgttccgctctgaggagatgaccctggcccagctgttcctgcagagcgaggccgcctactgctgcgtgtctgagctgggggagctgggcaaggtgcagttccgggacctgaacccagatgtgaatgtgttccagaggaagtttgtgaatgaggtgcggcgctgtgaggagatggacaggaagctgcgctttgtggagaaggagatcaggaaggccaacatccccatcatggacaccggggagaaccctgaggtgcccttcccccgggacatgattgacctggaggccaactttgagaagattgaaaatgagctgaaggagatcaacaccaaccaggaggccctgaagaggaacttcctggagctgacagagctgaagttcatcctgaggaagacccagcagttctttgatgagatggctgaccctgacctgctggaggagagcagcagcctgctggagcccagcgagatgggccggggcacccccctgcggctgggctttgtggccggggtcatcaaccgggagcgcatccccacctttgagaggatgctgtggagggtgtgcagaggaaatgtgttcctgcggcaggccgagattgagaaccccctggaggaccctgtgactggagactatgtgcacaagagcgtcttcatcatcttcttccagggcgaccagctgaagaacagagtgaagaagatctgtgagggcttccgggccagcctgtacccctgcccagagaccccccaggagaggaaggagatggccagcggcgtgaacaccagaattgatgacctgcagatggtgctgaaccagacagaggaccaccggcagagggtgctgcaggccgccgccaagaacatccgggtgtggttcatcaaggtgaggaagatgaaggccatctaccacaccctgaacctgtgcaacattgatgtgacccagaagtgcctgattgctgaggtgtggtgccctgtgacagacctggacagcatccagtttgccctgcggcggggcacagagcacagcggcagcacagtgcccagcatcctgaacaggatgcagaccaaccagaccccacccacctacaacaagaccaacaagttcacctacggcttccagaacatcgtggatgcctatggaattggcacctaccgggagatcaacccagccccctacaccatcatcaccttccccttcctgtttgctgtgatgtttggagactttggccacggcatcctgatgaccctgtttgctgtgtggatggtgctgcgggagagccgcatcctgagccagaagaatgaaaatgagatgttcagcaccgtcttcagcggccgctacatcatcctgctgatgggcgtcttctccatgtacacaggcctcatctacaatgactgcttcagcaagagcctgaacatcttcggcagctcctggagcgtgcggcccatgttcacctacaactggacagaggagaccctgcggggcaaccctgtgctgcagctgaacccagccctgcccggggtgtttggaggcccctaccccttcggcatcgaccccatctggaacatcgccaccaacaagctgaccttcctgaacagcttcaagatgaagatgtctgtcatcctgggcatcatccacatgctgtttggagtgtccctgagcctcttcaaccacatctacttcaagaagcccctgaacatctacttcggcttcatccctgagatcatcttcatgaccagcctgtttggctacctggtgatcctgatcttctacaagtggacagcctatgatgcccacaccagtgaaaatgcccccagcctgctgatccacttcatcaacatgttcctgttctcctacccagagagcggctacagcatgctgtacagcggccagaagggcatccagtgcttcctggtggtggtggccctgctgtgtgtgccctggatgctgctcttcaagcccctggtgctgcggcggcagtacctgcggaggaagcacctgggcaccctgaactttggaggcatccgggtgggcaatggccccacagaagaagatgctgagatcatccagcacgaccagctgagcacccacagtgaagatgctgatgaatttgattttggagacaccatggtgcaccaggccatccacaccatcgagtactgcctgggctgcatcagcaacacagccagctacctgcggctgtgggccctgagcctggcccacgcccagctgtctgaggtgctgtggaccatggtgatccacatcggcctgtctgtgaagagcctggccggcggcctggtgctcttcttcttcttcaccgcctttgccaccctgactgtggccatcctgctgatcatggagggcctgagcgccttcctgcacgccctgcggctgcactgggtggagttccagaacaagttctacagcggcaccggcttcaagttcctgcccttctcctttgagcacatccgggagggcaagtttgaggagtag

SEQ ID NO: 153576 - DNA, 2367 bp, Artificial Sequence
  derived and/or modified sequence
atgggagagctgttccgctctgaggagatgaccctggcccagctgttcctgcagagcgaggccgcctactgctgcgtgtctgagctgggggagctgggcaaggtgcagttccgggacctgaacccagatgtgaatgtgttccagaggaagtttgtgaatgaggtgcggcgctgtgaggagatggacaggaagctgcgctttgtggagaaggagatcaggaaggccaacatccccatcatggacaccggggagaaccctgaggtgcccttcccccgggacatgattgacctggagatggctgaccctgacctgctggaggagagcagcagcctgctggagcccagcgagatgggccggggcacccccctgcggctgggctttgtggccggggtcatcaaccgggagcgcatccccacctttgagaggatgctgtggagggtgtgcagaggaaatgtgttcctgcggcaggccgagattgagaaccccctggaggaccctgtgactggagactatgtgcacaagtctgtgttcatcatcttcttccagggcgaccagctgaagaacagagtgaagaagatctgtgagggcttccgggccagcctgtacccctgcccagagaccccccaggagaggaaggagatggccagcggcgtgaacaccagaattgatgacctgcagatggtgctgaaccagacagaggaccaccggcagagggtgctgcaggccgccgccaagaacatccgggtgtggttcatcaaggtgaggaagatgaaggccatctaccacaccctgaacctgtgcaacattgatgtgacccagaagtgcctgattgctgaggtgtggtgccctgtgacagacctggacagcatccagtttgccctgcggcggggcacagagcacagcggcagcacagtgcccagcatcctgaacaggatgcagaccaaccagaccccacccacctacaacaagaccaacaagttcacctacggcttccagaacatcgtggatgcctacggcatcggcacctaccgggagatcaacccagccccctacaccatcatcaccttccccttcctgtttgctgtgatgtttggagactttggacatggcatcctgatgaccctgtttgctgtgtggatggtgctgcgggagagccgcatcctgagccagaagaatgaaaatgagatgttcagcacagtgttcagcggccgctacatcatcctgctgatgggcgtcttctccatgtacacaggcctcatctacaatgactgcttcagcaagagcctgaacatcttcggcagctcctggagcgtgcggcccatgttcacctacaactggacagaggagaccctgcggggcaaccctgtgctgcagctgaacccagccctgcccggggtgtttggaggcccctacccctttggaattgaccccatctggaacatcgccaccaacaagctgaccttcctgaacagcttcaagatgaagatgtctgtcatcctgggcatcatccacatgctgtttggagtgtccctgagcctcttcaaccacatctacttcaagaagcccctgaacatctacttcggcttcatccctgagatcatcttcatgaccagcctgtttggctacctggtgatcctgatcttctacaagtggacagcctatgatgcccacaccagtgaaaatgcccccagcctgctgatccacttcatcaacatgttcctgttctcctacccagagagcggctacagcatgctgtacagcggccagaagggcatccagtgcttcctggtggtggtggccctgctgtgtgtgccctggatgctgctcttcaagcccctggtgctgcggcggcagtacctgcggaggaagcacctgggcaccctgaactttggaggcatccgggtgggcaatggccccacagaggaggatgctgagatcatccagcacgaccagctgagcacccacagtgaagatgctgatgaatttgattttggagacaccatggtgcaccaggccatccacaccatcgagtactgcctgggctgcatcagcaacacagccagctacctgcggctgtgggccctgagcctggcccacgcccagctgtctgaggtgctgtggaccatggtgatccacatcggcctgtctgtgaagagcctggccggcggcctggtgctcttcttcttcttcaccgcctttgccaccctgactgtggccatcctgctgatcatggagggcctgagcgccttcctgcacgccctgcggctgcactgggtggagttccagaacaagttctacagcggcaccggcttcaagttcctgcccttctcctttgagcacatccgggagggcaagtttgaggagtag

SEQ ID NO: 153577 - DNA, 2496 bp, Artificial Sequence
  derived and/or modified sequence
atgggcgagctgttccggagcgaggagatgaccctggcccagctgttcctccaaagtgaagccgcatactgctgtgtttctgagcttggagaactgggaaaagttcaatttagagatctgaatcccgatgtcaatgtatttcagcggaaattcgtgaatgaagtgcgaaggtgcgaagaaatggatcgaaagctgaggttcgtcgagaaggagattcggaaagccaacattcctataatggacacaggggaaaaccccgaagtgccttttccaagggatatgattgaccttgaggctaactttgaaaaaatagagaacgagttgaaggaaattaacactaaccaggaggcactcaaaagaaacttcctggaactgacagaactaaagtttatcctgcggaagactcagcaattctttgatgagatggccgaccccgatcttttggaggaaagcagctcgctgctcgaaccctctgagatgggacggggaacaccactgaggctgggattcgtggcgggcgtgattaatcgcgagaggatccccaccttcgagagaatgctgtggagggtgtgccggggtaacgtgtttctcaggcaggctgagattgagaaccctctcgaagaccctgtgacaggagactatgtgcataaatccgtttttatcattttttttcagggtgatcagctaaaaaaccgtgtcaagaaaatctgtgagggatttcgagcatccctctacccttgtcccgaaactccccaagaacgcaaggaaatggcctccggcgttaatacacgaatcgacgatttgcaaatggttttaaatcagaccgaggaccacagacaaagagtccttcaagcagccgccaaaaatatccgtgtatggttcatcaaagtgcgtaaaatgaaggcaatataccacacccttaatctgtgcaatatagatgttacacagaagtgtctgattgccgaagtatggtgtcccgtcactgaccttgacagcattcaatttgcgctgcggcgggggacagaacattccggcagcacggtgccctcaatcctgaacaggatgcagacaaaccagacccctcctacttacaacaagaccaacaagttcacgtacggcttccagaatattgtggacgcttatgggattggtacatatcgcgagatcaatcccgccccatacacaatcatcactttccccttccttttcgcagtgatgttcggcgactttgggcacggaattcttatgaccttgttcgccgtgtggatggtccttagagagtcccgcattctttcccaaaagaacgagaatgagatgttctccaccgttttctcagggagatatattattctgctaatgggagtctttagcatgtatacaggcctgatttacaacgactgttttagtaagagccttaatatcttcggttcatcttggtccgtacgacccatgttcacctacaactggactgaggagacactgagaggcaatccagtgctgcagcttaaccctgccctgccaggagtctttggaggcccttacccgttcggcattgaccccatctggaatatagcaactaataagcttacattcctcaacagcttcaagatgaagatgtcagtgattttaggaattatccatatgttatttggcgtttcgttgtccctttttaatcatatctacttcaagaaacccctgaacatctacttcggcttcattcccgaaattatttttatgacatccctgtttgggtatctggtgatcctcatattctataaatggactgcctacgacgcccacacttctgagaatgcaccctctctgctaatccatttcatcaacatgttcttattctcttaccctgaatctgggtatagtatgctgtattccggacaaaagggaattcagtgcttcctggtcgtggtcgccctgttatgcgtgccctggatgctcctgtttaagcctctggttttacggagacagtacctgaggcggaaacacctgggaacactgaatttcggaggcatccgcgttggcaacgggccgacagaggaggacgctgaaataatacagcacgatcaactgagtacccacagcgaggatgctgatgaattcgacttcggggacactatggttcaccaagctatacataccatcgaatactgcctgggctgtatatcgaacaccgccagttatcttagactctgggccctgtctctggcacatgcccagctgagtgaagtgttatggactatggtgattcacatcgggctgtccgtgaagtccctggcaggcggcctcgtgttatttttcttcttcacagcattcgctactctaaccgtggctatcctgctgataatggagggactgagcgccttcctgcacgctctgagattgcattgggtagagttccaaaataaattttatagcggaactgggtttaagtttctcccctttagctttgaacacattagagaaggcaaattcgaggaatag

SEQ ID NO: 153578 - DNA, 2367 bp, Artificial Sequence
  derived and/or modified sequence
atgggcgagctgttccggagcgaggagatgaccctggcccagctgttcctgcagtcagaggccgcttactgctgcgtgagtgaattaggcgaactgggcaaggtccagtttagggacttaaacccagatgtcaacgttttccaacggaagtttgtgaatgaggtgaggaggtgcgaagaaatggatcgcaagctgcggttcgtcgaaaaagagatacgtaaagccaatatcccaatcatggataccggtgagaatccggaagtgccatttcctagagacatgatcgacctggagatggcagacccagacctgcttgaggaatcaagcagcctgttggaacctagtgaaatggggcggggaactccactgaggctggggtttgtcgccggggtcatcaacagagagcgcatccccacctttgagcgaatgctatggcgcgtttgccgcggcaatgtgttcctgcgccaagctgagattgaaaatcctctcgaagatcctgtcacaggagactatgtgcataagagtgtgtttatcatctttttccaaggagatcaactcaagaaccgggtcaaaaaaatctgcgaggggttccgcgccagtctctacccctgtccagagacgccacaagagcgaaaggaaatggcctcaggagtgaacaccaggattgatgatcttcagatggttctgaaccagacagaggaccacagacagcgtgttcttcaggcggccgccaagaacatccgcgtatggtttattaaggttcgaaaaatgaaagccatttaccacacactcaatctgtgtaatattgacgtgacacagaagtgcttgattgccgaagtgtggtgccctgtgaccgacttggattcaatacagtttgcactcaggcgaggtaccgagcacagcgggagtactgtgccttcaatccttaaccgaatgcagactaaccagactcctcctacttataataaaactaataagttcacctatggcttccaaaacatcgtggatgcctacgggatcggcacctaccgggaaatcaacccagcgccctataccatcattacttttccatttttgttcgccgtgatgtttggcgacttcgggcatggtattttgatgaccctgttcgcggtctggatggtattacgtgaatcaagaatcctgagccagaagaacgaaaacgagatgttctcgacagtgttctctggccggtacatcatcctgctaatgggcgtattttctatgtatactggactgatttataacgattgcttttcaaagtcgctgaacatctttggtagtagctggtcagtccgccccatgtttacttataactggacggaagagaccctgagaggcaatccagtcttacagctgaatccagcactccctggtgtgtttggcggcccttacccctttggtatagatcctatttggaatatcgcgactaataagttgactttcttaaattccttcaaaatgaagatgtcggttattcttggaataatccacatgctgtttggtgttagccttagcctttttaaccacatttattttaaaaagccccttaatatctattttggcttcatccccgagataatcttcatgacatccctttttgggtacctggttattctcattttctataaatggacagcctatgacgctcacacatctgagaacgcccctagcctgctcattcacttcattaatatgttcttgttcagctatccagaatctggctactccatgctgtacagcggccagaagggcatccagtgtttcctcgtggtggtggctctgctgtgcgtgccctggatgctgctcttcaagcctctggtgttgaggaggcagtatcttaggaggaaacacctcgggacactgaactttggaggcatcagagtgggaaacggccccaccgaggaagacgcagagattatccagcatgaccagctgtccacccactccgaagacgctgatgagtttgatttcggcgatacgatggtccatcaggctattcacaccatcgaatattgccttgggtgtatttccaacactgcctcttacctgcggctgtgggcgctgagtcttgcccacgcacaattgagcgaagtgctttggacgatggtgatccacatcggtttgagcgtgaagtccctggccggagggctggttctgttcttcttttttacagctttcgctactctcaccgtggcgatcctgctgattatggagggccttagcgccttcttgcatgcccttagactccattgggtcgagttccagaataagttctattcagggaccggattcaaatttttacccttctctttcgaacacatacgcgaaggtaagtttgaagagtag

SEQ ID NO: 153579 - DNA, 2496 bp, Artificial Sequence
  derived and/or modified sequence
atgggcgagctgttccgctctgaagagatgacccttgcccagctgtttttgcagtcagaggcagcatactgctgcgtgagcgagttgggtgaattggggaaagtgcagtttagggaccttaatcctgacgtgaatgtgttccaacgtaaatttgtgaacgaggtacgcaggtgcgaagaaatggatcgcaagctgagattcgtggagaaggaaatccggaaggctaatatcccaatcatggataccggggagaatccagaagtacctttccccagagacatgattgatctcgaagcgaactttgagaaaatcgagaatgagttgaaggagattaatactaaccaggaggctcttaagcggaatttccttgaactcaccgaattaaagttcatcttaagaaaaactcagcagttcttcgatgagatggctgaccccgatctcctagaagagagctcatctctgctggagccatccgaaatgggcagagggacgcctttgaggttggggttcgtggccggtgtgatcaaccgagagaggatacctaccttcgagagaatgttgtggagggtgtgccgagggaatgtgtttctgagacaggctgaaattgagaatcctctcgaggaccccgtcaccggagactacgttcataaatctgtgtttatcattttcttccagggcgaccagttgaagaatcgcgtgaagaaaatctgcgaaggctttcgcgcaagcctgtatccatgtcctgagacgccgcaggaaaggaaagagatggcatcaggggtgaatacaagaattgacgacctgcagatggttttgaaccagacggaagatcaccgtcagagagtcttgcaggctgccgcaaaaaacattagggtctggttcattaaggtgcgcaaaatgaaggccatctatcacacactgaacctttgtaacatcgatgttactcagaaatgtctcattgcagaggtctggtgccccgtgacggatctggattccatccaatttgcgctgagaagggggaccgagcatagcgggagtactgtgcccagcatcctgaacaggatgcagaccaatcagacgcctccaacttataacaagacgaataaattcacttatggctttcagaacatcgtcgacgcttacggaatcgggacttaccgcgaaataaacccagccccttacacaatcattacttttcctttcttgttcgccgtgatgttcggcgattttggccacggtatactcatgaccctcttcgcggtctggatggttctgcgagaaagcagaattcttagccagaagaatgagaacgagatgttctcaacagtcttttctggtagatacattatcctcctgatgggagtcttttcaatgtacaccggactgatttataacgattgttttagtaagtcactcaacatcttcgggtcaagctggagcgtgcgaccaatgttcacctataattggactgaggagactctgcgcggaaaccccgtcttacagctgaacccagcgctaccgggtgtatttgggggaccttacccctttggtattgacccaatctggaacattgcaaccaataagcttacgttcctgaacagtttcaaaatgaagatgtctgtgatcctgggcattattcacatgttgtttggggtgtcactgtctctttttaaccacatttactttaagaagcccctgaatatctatttcggcttcattcccgagatcatttttatgaccagtcttttcggctacttggttatactgattttttacaagtggaccgcctacgatgctcacacaagtgaaaatgccccatccctacttatccatttcataaacatgttcctgttctcatatcctgaaagcggctatagcatgctatattcaggacagaaagggatacagtgttttctcgttgtggtggcactgctgtgcgttccttggatgctcctctttaaaccactggtcctgcgtcggcaatatttaaggcgtaaacatctgggcactctcaatttcggaggaattcgtgtgggcaacggacctactgaagaggatgccgaaatcatccagcacgaccaactgtccacccactctgaggacgccgatgagtttgactttggcgatacgatggtgcaccaggccatccacactatcgaatactgccttggatgcatcagcaatactgccagttatcttagattgtgggccctgtcattagcacatgcccagcttagcgaagtgttgtggaccatggtgattcatattgggcttagcgtcaaatcgctggcagggggattagttctcttttttttcttcacggcctttgcaaccttgacagtggcaatactgttgattatggaagggctgtctgctttcttacacgccttgaggttacactgggttgaattccaaaataaattttacagcggaactggtttcaagtttctgcccttctcatttgaacatatcagagagggcaagttcgaagagtag

SEQ ID NO: 153580 - DNA, 2367 bp, Artificial Sequence
  derived and/or modified sequence
atgggggaactttttagaagcgaagagatgactctggctcaactgttccttcagagcgaagccgcttactgctgtgtgtccgagctgggcgagctcggcaaagtacagttccgagacctaaacccagatgtaaatgtcttccaaaggaagttcgtgaacgaggtgaggagatgcgaggagatggaccggaaattgaggtttgtggaaaaggagatccggaaggctaatattcccatcatggataccggagagaatcctgaggttccatttccacgcgatatgatcgatctcgagatggcagatcccgacctgctggaagaatcaagctctctgctagaacccagcgagatgggcagaggtactcccctgcgcctcggttttgtggcaggggtcattaacagagaaagaattccgacctttgagaggatgttgtggagagtgtgcagaggcaacgtgtttctcagacaagctgagatcgagaatcccctagaagaccctgtcacaggtgattacgttcataaatccgtattcattatattttttcagggcgatcagttgaagaaccgggtgaagaaaatttgcgaaggtttccgcgcatctctttatccttgccctgaaacaccccaggagcgcaaggagatggcttccggagtaaacacgcgcattgatgacctgcagatggtattaaaccagactgaggatcatcggcagcgggtgctccaggccgcagccaaaaacatcagggtttggtttatcaaagtgaggaaaatgaaggctatataccacactttaaatttgtgtaacatagacgtgactcagaaatgtctgatagccgaggtctggtgcccagtgactgatcttgactccattcaatttgcactccgcagggggaccgagcatagcggcagcacagttccatctattttaaaccgcatgcagaccaaccagacaccacccacctataacaagaccaataagttcacatatgggtttcagaatatagtcgacgcgtacggaattggcacttatagggagatcaatcccgcaccttatacaattattacattccccttcctcttcgcagttatgttcggcgattttggtcacgggatattgatgacccttttcgcagtctggatggtcctgagagagtctcggatattatctcagaaaaatgagaacgaaatgttctctactgttttttctgggaggtacataatcctgcttatgggcgttttttctatgtatactgggttaatatacaatgattgcttctcgaagagcctgaacatttttgggagctcttggagcgtccggccaatgtttacatacaactggacagaagaaacgctccgtggaaacccagtactgcaactgaatccagctttgcccggagtgtttgggggaccctatccgttcggcattgaccctatctggaatatcgctactaataagttgacctttctgaactcctttaagatgaaaatgtctgtgattctcggaattatacatatgctgtttggcgtaagtctatcactgttcaatcacatttatttcaagaagccgctgaatatatactttgggtttatccccgagattatatttatgacatcactcttcgggtacctggtgatcctgattttttacaagtggactgcttacgatgctcacacgtccgaaaacgcacccagcctgctcatacattttataaacatgtttttgttttcttaccctgagtccggatacagcatgctatactcggggcagaaaggtattcaatgttttctggtggttgtggccctgctgtgcgtgccctggatgctgctcttcaagcccttagtcctgaggcgccagtaccttagaagaaaacacctgggaacactgaattttggtggtattcgggtgggaaatggccctactgaggaagacgcagagatcatccagcacgaccagcttagtacccacagcgaggacgctgatgaattcgattttggcgacactatggtccaccaggctatccacacaatcgagtactgtctcggatgcatctccaacaccgcaagctacttgcgcctgtgggctctttcattggcacatgcccagctgtctgaggtgctgtggactatggtgatccacattgggctcagcgtaaaatccctcgccggaggcttggtgctatttttttttttcactgcgtttgccaccctgaccgtcgccatcttactcattatggaaggcctgagtgccttccttcatgctcttaggctgcactgggtggaattccagaataagttctatagcggcacaggtttcaagtttcttcccttcagcttcgagcacataagggaagggaagtttgaagagtag

SEQ ID NO: 153581 - DNA, 3028 bp, Artificial Sequence
  derived and/or modified sequence
ggcggcgcaggggcggggctttacggacgcaagcacgtcgaagcgctgctcctggagccgcggagggtgcgggtttggctgcggtggtttctgtggcggttgctgtggcggagtttggaggttggagagaaatccaggtactcactagactggtaccttctgccaccatgggggagcttttccggagtgaagaaatgacactggcccagctttttctacagtcagaggctgcttattgttgtgtcagtgaattaggagaacttggaaaggttcagtttcgtgacttaaatccagatgtgaatgttttccaacggaaatttgtgaatgaagttagaagatgtgaagaaatggatcgaaagcttcgatttgttgagaaagagataagaaaagctaacattccgattatggacaccggtgaaaacccagaggttcccttcccccgggacatgattgacttagaggccaattttgagaagattgaaaatgaactgaaggaaatcaacacaaaccaggaagctctgaagagaaacttcctggaactgaccgaattaaaatttatacttcgcaaaactcagcaattttttgatgagatggcggatccagacttgttggaagagtcctcatccctcttggagccaagtgagatgggaagaggcactcctttaagacttggcttcgtggctggtgtcattaaccgggagcgcatccctacttttgagcgcatgctttggcgggtatgccggggaaatgtgttcctgcgacaggctgaaatcgagaaccccctggaggatcctgtgactggcgactacgtgcacaagtctgtgtttatcattttcttccaaggcgatcagctgaaaaacagagtcaagaaaatctgtgaagggttccgagcctcactctatccctgtcctgagacaccacaggagaggaaggaaatggcttctggagtgaataccaggattgatgatctccaaatggttctgaatcaaacggaggatcaccgccagagggttctgcaggcagctgctaagaacatccgtgtctggttcatcaaagtgcggaagatgaaggccatctatcacaccctgaacctgtgcaacatagatgtgactcagaaatgcttgattgcagaggtctggtgccctgtcaccgaccttgactccatccagtttgcactcagaaggggcacggaacacagtggttccactgtaccttccattttgaacaggatgcagacaaaccagactcccccaacctataacaaaaccaacaagtttacctatggctttcagaacatagtagatgcttatggaattggaacttaccgagagataaatccagctccgtatactattatcacgttcccttttctatttgctgtgatgtttggagacttcggtcatggcattttaatgaccctttttgctgtgtggatggtactgagggagagccggatcctttcccagaagaatgagaatgagatgtttagcactgtgttcagtggtcgatacattattttattgatgggtgtgttctccatgtacactggcctcatctacaatgattgcttttccaagtctcttaatatctttgggtcatcctggagtgtacggccgatgtttacttataattggactgaagagacgcttcgggggaaccctgttctacagctgaacccagccctccctggagtgtttggtggaccatacccttttggcattgatccaatttggaacattgctaccaataaactgacgttcttgaactcctttaagatgaagatgtctgttatccttggtatcatccatatgctgtttggagtcagcctgagtctgttcaaccatatctatttcaagaagcccctgaatatctactttggatttattcctgaaataatcttcatgacctctttgtttggctatttggttatccttattttttacaagtggacggcctatgatgctcatacctctgagaatgcaccaagccttctgatccatttcataaacatgttcctcttttcctacccagagtctggttattcaatgttgtattctggacagaaaggaattcagtgtttcctggtagtggttgcactactgtgtgtaccttggatgctgctgtttaaaccattggtccttcgccgtcagtatttgaggagaaagcatttgggaactctcaactttggtgggatcagggtgggcaacggaccgacagaggaggatgctgagattattcagcatgaccagctctccacccactcagaggacgcagacgagtttgactttggggacaccatggtccaccaggccatccacaccatcgagtactgcctgggctgcatctccaacactgcctcctacttgcggctctgggccctcagcctcgctcatgcgcagctgtctgaggtgctttggaccatggtgatccacatcggcctgagcgtgaagagcttggcgggaggtttggtgctgttcttcttcttcactgcctttgccaccctgaccgtggccatcctcctgatcatggagggcctctcggcctttctccacgcactgcgcttacactgggttgagttccagaataaattctacagcgggaccggtttcaagttcttacccttctccttcgagcatattcgggaagggaagtttgaagagtgagtccctgtgagggccgtgtgccccatgctaccctccccgcctccctccacagtgatcagctgtgcctctctgcctgttggttgtgatctgtgggcaccagctcattcgtgtcaccctgtctgtgagtcatttagatagaatagtcctccttgggtctcccaccacccctagctttgtgtgtagtgtagtgattttctggctgtcactcatactcactgggcaccagccttgccctcttagcctccatccatccagacagcccttcccacctcctggtggtgagccagtctgcattcccacgccatcccaaagccctttcatcttccccgtgcattgtagatggaaggagcacccatgccattcac

SEQ ID NO: 153582 - DNA, 2774 bp, Artificial Sequence
  derived and/or modified sequence
acgtcgaagcgctgctcctggagccgcggagggtgcgggtttggctgcggtggtttctgtggcggttgctgtggcggagtttggaggttggagagaaatccaggtactcactagactggtaccttctgccaccatgggggagcttttccggagtgaagaaatgacactggcccagctttttctacagtcagaggctgcttattgttgtgtcagtgaattaggagaacttggaaaggttcagtttcgtgacttaaatccagatgtgaatgttttccaacggaaatttgtgaatgaagttagaagatgtgaagaaatggatcgaaagcttcgatttgttgagaaagagataagaaaagctaacattccgattatggacaccggtgaaaacccagaggttcccttcccccgggacatgattgacttagagatggcggatccagacttgttggaagagtcctcatccctcttggagccaagtgagatgggaagaggcactcctttaagacttggcttcgtggctggtgtcattaaccgggagcgcatccctacttttgagcgcatgctttggcgggtatgccggggaaatgtgttcctgcgacaggctgaaatcgagaaccccctggaggatcctgtgactggcgactacgtgcacaagtctgtgtttatcattttcttccaaggcgatcagctgaaaaacagagtcaagaaaatctgtgaagggttccgagcctcactctatccctgtcctgagacaccacaggagaggaaggaaatggcttctggagtgaataccaggattgatgatctccaaatggttctgaatcaaacggaggatcaccgccagagggttctgcaggcagctgctaagaacatccgtgtctggttcatcaaagtgcggaagatgaaggccatctatcacaccctgaacctgtgcaacatagatgtgactcagaaatgcttgattgcagaggtctggtgccctgtcaccgaccttgactccatccagtttgcactcagaaggggcacggaacacagtggttccactgtaccttccattttgaacaggatgcagacaaaccagactcccccaacctataacaaaaccaacaagtttacctatggctttcagaacatagtagatgcttatggaattggaacttaccgagagataaatccagctccgtatactattatcacgttcccttttctatttgctgtgatgtttggagacttcggtcatggcattttaatgaccctttttgctgtgtggatggtactgagggagagccggatcctttcccagaagaatgagaatgagatgtttagcactgtgttcagtggtcgatacattattttattgatgggtgtgttctccatgtacactggcctcatctacaatgattgcttttccaagtctcttaatatctttgggtcatcctggagtgtacggccgatgtttacttataattggactgaagagacgcttcgggggaaccctgttctacagctgaacccagccctccctggagtgtttggtggaccatacccttttggcattgatccaatttggaacattgctaccaataaactgacgttcttgaactcctttaagatgaagatgtctgttatccttggtatcatccatatgctgtttggagtcagcctgagtctgttcaaccatatctatttcaagaagcccctgaatatctactttggatttattcctgaaataatcttcatgacctctttgtttggctatttggttatccttattttttacaagtggacggcctatgatgctcatacctctgagaatgcaccaagccttctgatccatttcataaacatgttcctcttttcctacccagagtctggttattcaatgttgtattctggacagaaaggaattcagtgtttcctggtagtggttgcactactgtgtgtaccttggatgctgctgtttaaaccattggtccttcgccgtcagtatttgaggagaaagcatttgggaactctcaactttggtgggatcagggtgggcaacggaccgacagaggaggatgctgagattattcagcatgaccagctctccacccactcagaggacgcagacgagtttgactttggggacaccatggtccaccaggccatccacaccatcgagtactgcctgggctgcatctccaacactgcctcctacttgcggctctgggccctcagcctcgctcatgcgcagctgtctgaggtgctttggaccatggtgatccacatcggcctgagcgtgaagagcttggcgggaggtttggtgctgttcttcttcttcactgcctttgccaccctgaccgtggccatcctcctgatcatggagggcctctcggcctttctccacgcactgcgcttacactgggttgagttccagaataaattctacagcgggaccggtttcaagttcttacccttctccttcgagcatattcgggaagggaagtttgaagagtgagtccctgtgagggccgtgtgccccatgctaccctccccgcctccctccacagtgatcagctgtgcctctctgcctgttggttgtgatctgtgggcaccagctcattcgtgtcaccctgtctgtgagtcatttagatagaatagtcctccttgggtctcccaccacccctagctttgtgtgtagtgtagtgattttctggctgtcactcatactcactgggcaccagccttgccctcttagcctccatccatccagacagcccttcccacctcct

SEQ ID NO: 153583 - DNA, 2496 bp, Artificial Sequence
  derived and/or modified sequence
atgggcgagctgttcagaagcgaggagatgaccctggcccagctgttcctgcagagcgaggccgcctactgctgcgtgagcgagctgggcgagctgggcaaggtgcagttcagagacctgaaccccgacgtgaacgtgttccagagaaagttcgtgaacgaggtgagaagatgcgaggagatggacagaaagctgagattcgtggagaaggagatcagaaaggccaacatccccatcatggacaccggcgagaaccccgaggtgcccttccccagagacatgatcgacctggaggccaacttcgagaagatcgagaacgagctgaaggagatcaacaccaaccaggaggccctgaagagaaacttcctggagctgaccgagctgaagttcatcctgagaaagacccagcagttcttcgacgagatggccgaccccgacctgctggaggagagcagcagcctgctggagcccagcgagatgggcagaggcacccccctgagactgggcttcgtggccggcgtgatcaacagagagagaatccccaccttcgagagaatgctgtggagagtgtgcagaggcaacgtgttcctgagacaggccgagatcgagaaccccctggaggaccccgtgaccggcgactacgtgcacaagagcgtgttcatcatcttcttccagggcgaccagctgaagaacagagtgaagaagatctgcgagggcttcagagccagcctgtacccctgccccgagaccccccaggagagaaaggagatggccagcggcgtgaacaccagaatcgacgacctgcagatggtgctgaaccagaccgaggaccacagacagagagtgctgcaggccgccgccaagaacatcagagtgtggttcatcaaggtgagaaagatgaaggccatctaccacaccctgaacctgtgcaacatcgacgtgacccagaagtgcctgatcgccgaggtgtggtgccccgtgaccgacctggacagcatccagttcgccctgagaagaggcaccgagcacagcggcagcaccgtgcccagcatcctgaacagaatgcagaccaaccagaccccccccacctacaacaagaccaacaagttcacctacggcttccagaacatcgtggacgcctacggcatcggcacctacagagagatcaaccccgccccctacaccatcatcaccttccccttcctgttcgccgtgatgttcggcgacttcggccacggcatcctgatgaccctgttcgccgtgtggatggtgctgagagagagcagaatcctgagccagaagaacgagaacgagatgttcagcaccgtgttcagcggcagatacatcatcctgctgatgggcgtgttcagcatgtacaccggcctgatctacaacgactgcttcagcaagagcctgaacatcttcggcagcagctggagcgtgagacccatgttcacctacaactggaccgaggagaccctgagaggcaaccccgtgctgcagctgaaccccgccctgcccggcgtgttcggcggcccctaccccttcggcatcgaccccatctggaacatcgccaccaacaagctgaccttcctgaacagcttcaagatgaagatgagcgtgatcctgggcatcatccacatgctgttcggcgtgagcctgagcctgttcaaccacatctacttcaagaagcccctgaacatctacttcggcttcatccccgagatcatcttcatgaccagcctgttcggctacctggtgatcctgatcttctacaagtggaccgcctacgacgcccacaccagcgagaacgcccccagcctgctgatccacttcatcaacatgttcctgttcagctaccccgagagcggctacagcatgctgtacagcggccagaagggcatccagtgcttcctggtggtggtggccctgctgtgcgtgccctggatgctgctgttcaagcccctggtgctgagaagacagtacctgagaagaaagcacctgggcaccctgaacttcggcggcatcagagtgggcaacggccccaccgaggaggacgccgagatcatccagcacgaccagctgagcacccacagcgaggacgccgacgagttcgacttcggcgacaccatggtgcaccaggccatccacaccatcgagtactgcctgggctgcatcagcaacaccgccagctacctgagactgtgggccctgagcctggcccacgcccagctgagcgaggtgctgtggaccatggtgatccacatcggcctgagcgtgaagagcctggccggcggcctggtgctgttcttcttcttcaccgccttcgccaccctgaccgtggccatcctgctgatcatggagggcctgagcgccttcctgcacgccctgagactgcactgggtggagttccagaacaagttctacagcggcaccggcttcaagttcctgcccttcagcttcgagcacatcagagagggcaagttcgaggagtag

SEQ ID NO: 153584 - DNA, 2367 bp, Artificial Sequence
  derived and/or modified sequence
atgggcgagctgttcagaagcgaggagatgaccctggcccagctgttcctgcagagcgaggccgcctactgctgcgtgagcgagctgggcgagctgggcaaggtgcagttcagagacctgaaccccgacgtgaacgtgttccagagaaagttcgtgaacgaggtgagaagatgcgaggagatggacagaaagctgagattcgtggagaaggagatcagaaaggccaacatccccatcatggacaccggcgagaaccccgaggtgcccttccccagagacatgatcgacctggagatggccgaccccgacctgctggaggagagcagcagcctgctggagcccagcgagatgggcagaggcacccccctgagactgggcttcgtggccggcgtgatcaacagagagagaatccccaccttcgagagaatgctgtggagagtgtgcagaggcaacgtgttcctgagacaggccgagatcgagaaccccctggaggaccccgtgaccggcgactacgtgcacaagagcgtgttcatcatcttcttccagggcgaccagctgaagaacagagtgaagaagatctgcgagggcttcagagccagcctgtacccctgccccgagaccccccaggagagaaaggagatggccagcggcgtgaacaccagaatcgacgacctgcagatggtgctgaaccagaccgaggaccacagacagagagtgctgcaggccgccgccaagaacatcagagtgtggttcatcaaggtgagaaagatgaaggccatctaccacaccctgaacctgtgcaacatcgacgtgacccagaagtgcctgatcgccgaggtgtggtgccccgtgaccgacctggacagcatccagttcgccctgagaagaggcaccgagcacagcggcagcaccgtgcccagcatcctgaacagaatgcagaccaaccagaccccccccacctacaacaagaccaacaagttcacctacggcttccagaacatcgtggacgcctacggcatcggcacctacagagagatcaaccccgccccctacaccatcatcaccttccccttcctgttcgccgtgatgttcggcgacttcggccacggcatcctgatgaccctgttcgccgtgtggatggtgctgagagagagcagaatcctgagccagaagaacgagaacgagatgttcagcaccgtgttcagcggcagatacatcatcctgctgatgggcgtgttcagcatgtacaccggcctgatctacaacgactgcttcagcaagagcctgaacatcttcggcagcagctggagcgtgagacccatgttcacctacaactggaccgaggagaccctgagaggcaaccccgtgctgcagctgaaccccgccctgcccggcgtgttcggcggcccctaccccttcggcatcgaccccatctggaacatcgccaccaacaagctgaccttcctgaacagcttcaagatgaagatgagcgtgatcctgggcatcatccacatgctgttcggcgtgagcctgagcctgttcaaccacatctacttcaagaagcccctgaacatctacttcggcttcatccccgagatcatcttcatgaccagcctgttcggctacctggtgatcctgatcttctacaagtggaccgcctacgacgcccacaccagcgagaacgcccccagcctgctgatccacttcatcaacatgttcctgttcagctaccccgagagcggctacagcatgctgtacagcggccagaagggcatccagtgcttcctggtggtggtggccctgctgtgcgtgccctggatgctgctgttcaagcccctggtgctgagaagacagtacctgagaagaaagcacctgggcaccctgaacttcggcggcatcagagtgggcaacggccccaccgaggaggacgccgagatcatccagcacgaccagctgagcacccacagcgaggacgccgacgagttcgacttcggcgacaccatggtgcaccaggccatccacaccatcgagtactgcctgggctgcatcagcaacaccgccagctacctgagactgtgggccctgagcctggcccacgcccagctgagcgaggtgctgtggaccatggtgatccacatcggcctgagcgtgaagagcctggccggcggcctggtgctgttcttcttcttcaccgccttcgccaccctgaccgtggccatcctgctgatcatggagggcctgagcgccttcctgcacgccctgagactgcactgggtggagttccagaacaagttctacagcggcaccggcttcaagttcctgcccttcagcttcgagcacatcagagagggcaagttcgaggagtag

SEQ ID NO: 153585 - DNA, 981 bp, Artificial Sequence
  derived and/or modified sequence
atgcaccgaaccacaaggatcaaaatcacagagctgaaccctcatctgatgtgtgtactgtgtggaggttacttcatcgatgcgacaacgattatcgagtgtctacactccttctgtaaaacgtgcattgttagataccttgaaacatcaaagtactgccctatctgcgatgtgcaagtgcacaagactagacctttattaaatattcggtctgacaaaaccctgcaggatatcgtgtacaaattggttcctgggctatttaagaatgaaatgaagaggcgccgggacttttacgccgcacatccatctgccgacgccgccaacggctcaaacgaggacaggggggaggtcgcagatgaggataaaagaataatcaccgatgacgagatcatcagccttagcattgagttcttcgaccaaaatcgactggatagaaaggtgaataaagataaagagaaatcaaaagaagaagtgaacgacaagcggtacctgcgctgccccgccgccatgactgtcatgcacctaagaaagttcctgcgatccaagatggatattcccaataccttccaaatcgacgtaatgtacgaggaagagcctctgaaggattactataccctgatggacatcgcatacatctacacctggagacgcaatggtcctttacccctcaagtatcgcgtgaggccaacctgtaaacggatgaagatttcccatcaaagggacggactaaccaacgctggtgaattggaatctgattccggaagcgacaaggccaactcaccagccggtggtattccctccacttccagctgcctgccctcccctagtacccccgtacagtccccacaccctcagttccctcatatcagctcgactatgaacggcacaagcaattccccatcgggtaatcatcagtcaagttttgccaaccgccctagaaaaagcagcgtcaatggctcctccgccacctcctctggatag

SEQ ID NO: 153586 - DNA, 717 bp, Artificial Sequence
  derived and/or modified sequence
atgtgcgtcctgtgtggtggatactttattgacgccacaacaataattgaatgcctgcattccttttgcaagacctgcatcgtgagatatctggagacctcaaagtactgcccaatctgtgacgtccaggtccataaaacccggccactgttgaatattagactggatcggaaggtgaataaggataaggagaaatccaaagaggaagtaaacgacaagcgatacctacggtgtcctgcggccatgaccgtcatgcaccttagaaagttcctcaggtccaaaatggacattccaaacacttttcagattgatgtcatgtatgaagaagaaccattgaaagattattacacactgatggatattgcttacatctatacctggcggcgtaatggcccgctccctctgaaatacagggttaggcccacgtgcaagcgaatgaagatctcccaccagcgagacggcctgaccaacgccggagaattagagagtgatagtggttctgacaaggccaattcgccagccggcggcatacccagtacatctagctgtctgcccagccccagcaccccagtccagtctccacaccctcagtttccacacatttctagtactatgaacgggaccagcaattcaccttctggcaatcatcagtcctcgttcgccaaccgaccacgtaagtcttccgtcaacggaagttcggccaccagctccggctag

SEQ ID NO: 153587 - DNA, 318 bp, Artificial Sequence
  derived and/or modified sequence
atgcaccggaccacccggattaagataaccgaactgaatcctcatctgatgtgtgtgctgtgcggcgggtacttcatagacgctactacaatcattgagtgcctccatagtttctgcaaaacatgcatcgtacgctatctcgaaacgtcaaaatactgcccgatctgcgatgtccaagtgcacaaaacacgccccctcctgaatatcagatccgacaagaccttgcaagacatagtgtataagcttgttccaggcttattcaagaatgagatgaagcggaggcgagacttttacgccgcccatccttccgccgactag

SEQ ID NO: 153588 - DNA, 624 bp, Artificial Sequence
  derived and/or modified sequence
atgcacagaaccacaagaattaagatcacagagcttaatccgcaccttatgtgtgtgctgtgtggagggtactttattgacgccactacaattatcgagtgcctacattctttttgtaagacttgtatcgtgagatatctggaaacttcgaagtactgccccatctgtgatgttcaggtgcacaagactcggcccctcctgaacatccgatccgacaaaacactacaggatatcgtgtacaagctagtaccaggactgtttaagaacgagatgaagcgccggcgtgatttttacgccgcccacccctccgccgacgccgcaaacggcagcaacgaggaccgcggggaggttgctgatgaagacaagcgaattataactgacgatgagatcatctccctgtccatcgagttttttgaccagaaccgcctggacagaaaagtgaataaggataaggagaagtctaaggaggaagtaaacgataaacggtatcttaggtgccccgctgctatgacagttatgcacctgagaaagttcctaaggtcaaaaatggatatccctaacacctttcagatagacgtgatgtatgaggaagagccactgaaagactattacactctgatgtag

SEQ ID NO: 153589 - DNA, 453 bp, Artificial Sequence
  derived and/or modified sequence
atgcataggaccacacgaattaaaatcacagaactaaacccccatctgatgtgtgttttatgcggcggatactttatcgacgcaacgacaattattgagtgccttcacagtttctgcaagacttgtattgtgcgctatctagaaacttccaaatactgtcccatctgtgacgtgcaggtgcacaagacaagaccacttctcaatatacggtcagacaaaaccctccaggacatcgtgtataagctggttccaggactgttcaagaacgagatgaaacgccggagagacttctatgccgcccacccgtctgccgacgcagctaacggttccaacgaggacaggggcgaggttgctgatgaagacaagagaataatcactgacgacgagatcatttccctcagcatcgaattctttgaccagaaccggttggacaggaaggtaaacaaagactag

SEQ ID NO: 153590 - DNA, 555 bp, Artificial Sequence
  derived and/or modified sequence
tatttcatcgatgctactaccattattgagtgcctccattccttttgcaaaacctgtatcgtccgctatctggaaacctcgaaatactgccctatttgcgacgtacaggtgcacaagaccaggccgcttcttaacattcggttagataggaaggttaacaaggataaagaaaaatccaaggaggaggttaacgacaaaagatacctgaggtgccctgctgccatgacggtgatgcacctgcgaaagtttctcaggtccaaaatggatatcccaaatacatttcagatagatgtaatgtatgaagaggagcctctgaaggactactacacactgatggatatcgcctacatctacacatggcgacgtaacggccccctgcctctcaaatatagagtgcggccaacgtgtaagcgcatgaagatctcacaccagcgggacggcctcactaatgcaggcgagttggaatctgattcaggctctgacaaagcaaattctccagccggaggaatcccctcgactagtagttgcctccccagcccttccacccctgtttag

SEQ ID NO: 153591 - DNA, 279 bp, Artificial Sequence
  derived and/or modified sequence
atgcataggaccactcgaattaagatcacagagctgaatcctcacttgatgtgtgtcctgtgtggcggatatttcatcgatgcgacaaccattatcgagtgcttgcattcattttgtaaaacctgcatagtccgctacctggaaacttcaaaatactgccccatttgcgacgtgcaagtgcacaagacccgaccactattgaacatccgatccgacaagactctccaggatatcgtatacaagttagttcctggtctgtttacagcgaacggatcttag

SEQ ID NO: 153592 - DNA, 981 bp, Artificial Sequence
  derived and/or modified sequence
atgcacaggaccacccgcatcaagatcacagagctgaacccccacctgatgtgtgtgctgtgtggcggctacttcattgatgccaccaccatcattgaatgtctgcacagcttctgcaagacctgcatcgtgcgctacctggagaccagcaagtactgccccatctgtgatgtgcaggtgcacaagacccggcccctgctgaacatccgcagtgacaagaccctgcaggacatcgtgtacaagctggtgcccggcctcttcaagaatgagatgaagagaagaagagacttctatgctgcccaccccagcgcagatgctgccaacggcagcaatgaagatagaggagaggtggctgatgaggacaagaggatcatcacagatgatgagatcatcagcctgagcattgagttctttgaccagaaccggctggacaggaaggtgaacaaggacaaggagaagagcaaggaggaggtgaatgacaagcgctacctgcgctgcccagctgccatgacagtgatgcacctgaggaagttcctgcggagcaagatggacatccccaacaccttccagattgatgtgatgtatgaggaggagcccctgaaggactactacaccctgatggacatcgcctacatctacacctggaggagaaatggccccctgcccctgaagtacagagtgcggcccacctgcaagaggatgaagatcagccaccagagagatggcctgaccaatgctggggagctggagagtgacagcggcagtgacaaggccaacagccctgctgggggcatccccagcaccagcagctgcctgcccagccccagcacccctgtgcagagcccccacccccagttcccccacatcagcagcaccatgaatggcaccagcaacagccccagcggcaaccaccagagcagctttgccaaccggcccaggaagagctctgtgaatggcagcagcgccaccagcagtggatag

SEQ ID NO: 153593 - DNA, 717 bp, Artificial Sequence
  derived and/or modified sequence
atgtgtgtgctgtgtggcggctacttcattgatgccaccaccatcattgaatgtctgcacagcttctgcaagacctgcatcgtgcgctacctggagaccagcaagtactgccccatctgtgatgtgcaggtgcacaagacccggcccctgctgaacatccggctggacaggaaggtgaacaaggacaaggagaagagcaaggaggaggtgaatgacaagcgctacctgcgctgcccagctgccatgacagtgatgcacctgaggaagttcctgcggagcaagatggacatccccaacaccttccagattgatgtgatgtatgaggaggagcccctgaaggactactacaccctgatggacatcgcctacatctacacctggaggagaaatggccccctgcccctgaagtacagagtgcggcccacctgcaagaggatgaagatcagccaccagagagatggcctgaccaatgctggggagctggagagtgacagcggcagtgacaaggccaacagccctgctgggggcatccccagcaccagcagctgcctgcccagccccagcacccctgtgcagagcccccacccccagttcccccacatcagcagcaccatgaatggcaccagcaacagccccagcggcaaccaccagagcagctttgccaaccggcccaggaagagctctgtgaatggcagcagcgccaccagcagtggatag

SEQ ID NO: 153594 - DNA, 318 bp, Artificial Sequence
  derived and/or modified sequence
atgcacaggaccacccgcatcaagatcacagagctgaacccccacctgatgtgtgtgctgtgtggcggctacttcattgatgccaccaccatcattgaatgtctgcacagcttctgcaagacctgcatcgtgcgctacctggagaccagcaagtactgccccatctgtgatgtgcaggtgcacaagacccggcccctgctgaacatccgcagtgacaagaccctgcaggacatcgtgtacaagctggtgcccggcctcttcaagaatgagatgaagagaagaagagacttctatgctgcccaccccagcgctgactag

SEQ ID NO: 153595 - DNA, 624 bp, Artificial Sequence
  derived and/or modified sequence
atgcacaggaccacccgcatcaagatcacagagctgaacccccacctgatgtgtgtgctgtgtggcggctacttcattgatgccaccaccatcattgaatgtctgcacagcttctgcaagacctgcatcgtgcgctacctggagaccagcaagtactgccccatctgtgatgtgcaggtgcacaagacccggcccctgctgaacatccgcagtgacaagaccctgcaggacatcgtgtacaagctggtgcccggcctcttcaagaatgagatgaagagaagaagagacttctatgctgcccaccccagcgcagatgctgccaacggcagcaatgaagatagaggagaggtggctgatgaggacaagaggatcatcacagatgatgagatcatcagcctgagcattgagttctttgaccagaaccggctggacaggaaggtgaacaaggacaaggagaagagcaaggaggaggtgaatgacaagcgctacctgcgctgcccagctgccatgacagtgatgcacctgaggaagttcctgcggagcaagatggacatccccaacaccttccagattgatgtgatgtatgaggaggagcccctgaaggactactacaccctgatgtag

SEQ ID NO: 153596 - DNA, 453 bp, Artificial Sequence
  derived and/or modified sequence
atgcacaggaccacccgcatcaagatcacagagctgaacccccacctgatgtgtgtgctgtgtggcggctacttcattgatgccaccaccatcattgaatgtctgcacagcttctgcaagacctgcatcgtgcgctacctggagaccagcaagtactgccccatctgtgatgtgcaggtgcacaagacccggcccctgctgaacatccgcagtgacaagaccctgcaggacatcgtgtacaagctggtgcccggcctcttcaagaatgagatgaagagaagaagagacttctatgctgcccaccccagcgcagatgctgccaacggcagcaatgaagatagaggagaggtggctgatgaggacaagaggatcatcacagatgatgagatcatcagcctgagcattgagttctttgaccagaaccggctggacaggaaggtgaacaaggactag

SEQ ID NO: 153597 - DNA, 555 bp, Artificial Sequence
  derived and/or modified sequence
tacttcattgatgccaccaccatcatcgagtgcctgcacagcttctgcaagacctgcatcgtgcgctacctggagaccagcaagtactgccccatctgtgatgtgcaggtgcacaagacccggcccctgctgaacatccggctggacaggaaggtgaacaaggacaaggagaagagcaaggaggaggtgaatgacaagcgctacctgcgctgcccagctgccatgacagtgatgcacctgaggaagttcctgcggagcaagatggacatccccaacaccttccagattgatgtgatgtatgaggaggagcccctgaaggactactacaccctgatggacatcgcctacatctacacctggaggagaaatggccccctgcccctgaagtacagagtgcggcccacctgcaagaggatgaagatcagccaccagagagatggcctgaccaatgctggggagctggagagtgacagcggcagtgacaaggccaacagccctgctgggggcatccccagcaccagcagctgcctgcccagccccagcacccctgtgtag

SEQ ID NO: 153598 - DNA, 279 bp, Artificial Sequence
  derived and/or modified sequence
atgcacaggaccacccgcatcaagatcacagagctgaacccccacctgatgtgtgtgctgtgtggcggctacttcattgatgccaccaccatcattgaatgtctgcacagcttctgcaagacctgcatcgtgcgctacctggagaccagcaagtactgccccatctgtgatgtgcaggtgcacaagacccggcccctgctgaacatccgcagtgacaagaccctgcaggacatcgtgtacaagctggtgcccggcctcttcaccgccaacggcagctag

SEQ ID NO: 153599 - DNA, 981 bp, Artificial Sequence
  derived and/or modified sequence
atgcaccggaccacccggatcaagatcaccgagctgaacccccacctcatgtgcgtgctctgcggggggtactttatagacgccactaccatcatcgaatgcctacactcattctgtaagacatgcatcgtgcggtacttggaaacaagcaaatattgccccatatgcgatgtccaggtccataagacaagaccattgctgaatatacgcagtgacaaaacactccaggatatagtgtacaagctggtgcctgggcttttcaaaaatgagatgaagagacggcgtgatttttacgcagcacatccttcagccgatgcagctaatgggtctaatgaggatagaggcgaagtggccgacgaagacaagagaatcataaccgacgacgagatcatcagcctcagcattgaattcttcgatcagaatcggctggatcggaaggtgaacaaagacaaagagaaatccaaggaagaagtaaatgacaagcgatacctgcggtgccctgctgctatgaccgtcatgcatctgcggaaatttcttcgatccaaaatggacattccgaataccttccagatcgatgtgatgtacgaggaggaacctctcaaagactactatacgctcatggacattgcctacatatacacctggagacgtaacgggccccttcccctcaagtatagagtgcgacccacatgtaagcggatgaaaatcagccaccagagggatggtctgactaacgccggagaattggaatctgattctgggagtgacaaggccaattcccctgcgggcgggatcccaagcacctctagctgtctcccttcacctagcacccccgttcagtctccacacccacagttcccgcatatttcatcgacgatgaacggcacctcaaatagcccttcggggaatcaccaatcttcctttgcaaatcggccccgtaagagcagtgtaaatggttcttctgctacttcctctgggtag

SEQ ID NO: 153600 - DNA, 717 bp, Artificial Sequence
  derived and/or modified sequence
atgtgcgtgctgtgcggcggctacttcatcgacgccaccaccatcatcgaatgccttcactccttctgcaaaacttgtattgttagatatcttgaaaccagcaaatattgccctatttgtgatgtgcaggtgcacaagactagacctttgctcaatatccgcctggaccggaaggttaacaaggacaaggagaaaagcaaggaagaagtaaacgataagaggtacctgcggtgtcctgctgctatgacggtgatgcacctcaggaagtttctccgttccaagatggatattcccaatacgttccaaattgatgtcatgtacgaggaggaaccacttaaggactactatacgctgatggatatagcatacatctacacttggaggagaaatggtcccctcccactgaaataccgagtgaggcctacatgcaagagaatgaaaatcagtcatcagcgcgacggactgacaaacgctggtgaactggagtctgacagcggaagcgacaaggcaaacagtcctgcaggggggatacctagcacaagttcctgtcttccctccccctccacccccgtgcagtccccacatccacagtttccgcacatatcctcaactatgaacggaaccagtaactccccctcaggtaaccaccagagcagtttcgctaatagacctaggaaaagtagtgtcaatggctcttccgcgactagcagcggttag

SEQ ID NO: 153601 - DNA, 318 bp, Artificial Sequence
  derived and/or modified sequence
atgcaccggaccacccggatcaagatcaccgagctgaacccccacctaatgtgtgtgctttgcggcggatacttcattgatgctacaacaatcattgaatgcttgcattcattctgtaagacttgtatcgttcggtatctggaaacctcaaagtactgccccatttgtgatgtacaggtgcacaaaactaggcccctgctcaatattcgtagcgacaaaaccttgcaggacatcgtttacaaactggtccccggtctgttcaagaatgagatgaaaaggcgccgcgacttctacgcagcacacccttctgctgactag

SEQ ID NO: 153602 - DNA, 624 bp, Artificial Sequence
  derived and/or modified sequence
atgcaccggaccacccggatcaagatcaccgagctgaacccccacctgatgtgtgtgctgtgcggcggatacttcattgatgccactacaataattgagtgcctgcattctttctgcaagacatgtatagtgaggtacctggagacttcaaaatattgccccatctgtgatgttcaggtacacaaaacacggccactgctcaatattaggtccgacaaaaccctgcaagacattgtctacaaattagtcccgggcctatttaagaatgagatgaagcgtcggcgggatttttacgctgcgcacccttcagctgacgccgcaaacgggagcaatgaagaccgcggggaagtggcagatgaagataagagaatcattacagacgacgagattatcagcctgtctatagaattcttcgaccagaatcggttggacaggaaggtgaacaaggacaaggaaaaatccaaagaggaagtcaacgataagcgatatctgcgctgtcccgctgccatgactgtgatgcacctgaggaagttcctacggtccaagatggacattccaaatacgtttcagatagatgtcatgtacgaagaggagccccttaaggactactacaccctgatgtag

SEQ ID NO: 153603 - DNA, 453 bp, Artificial Sequence
  derived and/or modified sequence
atgcaccggaccacccggatcaagatcaccgagctgaacccccacctcatgtgtgtattatgtggaggctactttattgacgccaccaccattatcgagtgtctgcactctttttgtaagacgtgtattgtgcgctacctcgaaacttcaaaatactgccccatctgtgacgtgcaagtgcataaaacacgtcctttgctgaacattcggtcagacaagactctccaggacatcgtgtataaactggtccccggtctgtttaaaaacgaaatgaaaagaagaagagacttctatgccgcccatccaagcgccgatgcagccaatgggtctaatgaagatcggggggaggttgctgacgaagacaaacgcattatcacagacgatgaaatcattagcttgtcaattgagtttttcgaccagaataggcttgatcgcaaggtgaataaagactag

SEQ ID NO: 153604 - DNA, 555 bp, Artificial Sequence
  derived and/or modified sequence
tacttcatcgacgccaccaccatcatcgagtgcctgcacagcttctgtaaaacttgcattgtaagatatctggagacctctaagtattgtccgatttgcgacgtacaggttcataaaactcggcccctgctcaacattcggctggacagaaaagtgaacaaggataaggagaaaagtaaagaagaggtgaacgacaagaggtatctgcggtgtccagcagccatgactgtgatgcaccttaggaaatttctgcgctcaaaaatggatatacccaacacatttcagatcgacgtcatgtacgaagaggagcctttgaaggactactacacactgatggacattgcatacatctacacctggcgcaggaatggacccctgcccttgaagtaccgggtgcggcccacctgtaaaaggatgaaaatttcgcatcagcgggatggcttgacaaacgcgggtgaacttgagagcgactctggctccgacaaggccaatagtcctgccggaggtatccccagcacaagcagttgcctgccgtcccccagtacccccgtgtag

SEQ ID NO: 153605 - DNA, 279 bp, Artificial Sequence
  derived and/or modified sequence
atgcaccggaccacccggatcaagatcaccgagctgaacccccacctgatgtgtgttctctgtggtgggtattttattgatgcaaccacaattatcgagtgccttcatagcttttgtaaaacttgtattgttcggtatctcgagacctcaaaatattgccccatctgtgacgtgcaggtccacaaaacccgccctttgctgaatattaggagcgataagacactccaggacatcgtgtacaagctcgtccctggactgttcaccgcaaatggctcttag

SEQ ID NO: 153606 - DNA, 981 bp, Artificial Sequence
  derived and/or modified sequence
atgcaccggaccacccgcattaaaatcaccgaattaaacccacacctgatgtgtgtgctttgcggaggctatttcattgacgcgactacgattatcgagtgtctgcactccttttgcaaaacttgtattgtacggtatcttgaaaccagcaagtactgccctatttgcgacgtgcaggtgcacaagactcgtcccttattgaatatccgctcagacaagacgctccaagatatagtgtacaaattagtgcctggcctcttcaagaatgaaatgaaacggcgacgcgacttctatgccgcacatccttccgcggatgctgcaaatggctccaacgaggacagaggagaggtggccgatgaggataaaaggatcatcaccgatgacgaaattatttccctcagcatcgaattctttgatcagaacagactggatcggaaggtgaacaaggataaagaaaagtctaaagaagaggtcaacgacaagagatacctgagatgtccggcagccatgaccgtcatgcatctgaggaagttcctccggagcaaaatggacatcccgaacacattccagatcgatgtcatgtatgaggaggagccattgaaggattactatacactgatggacatcgcatatatatacacatggagaagaaatggaccattaccactcaaatatagggtgcgccctacttgcaagcgaatgaagatctcacaccagcgggatggtctaactaacgccggtgagcttgaaagcgattctggaagcgataaggcaaacagtccagcaggcggtatccccagtacctctagttgcctgccaagcccatcaactcctgtacaatcccctcacccacagttcccccatattagctctacaatgaatggcacatccaactctccttctgggaaccatcagtcttctttcgccaacagaccgaggaagtcatctgtgaacgggtcaagcgcaacatcgagtggctag

SEQ ID NO: 153607 - DNA, 717 bp, Artificial Sequence
  derived and/or modified sequence
atgtgtgtgctctgtgggggatattttattgacgctactaccatcatcgaatgtcttcacagtttttgtaaaacctgtatagttcgatacctagagacttccaagtattgtccgatctgcgatgttcaggtgcacaaaactagacccttacttaacatccgtctagacaggaaagtgaacaaagacaaagagaagtcgaaagaagaggtgaatgataaacggtatctaaggtgcccagccgctatgaccgtcatgcacttgcgcaagtttctgaggagtaagatggatatacccaacacatttcagattgatgttatgtatgaggaggagcctctgaaggattactacacactcatggacattgcgtatatctatacctggcgtaggaacgggcctctcccattaaagtaccgtgtcagacctacatgcaagcggatgaagatttctcaccagcgggatggcctgactaacgctggggaactcgagtcagattcaggctctgacaaggcgaactcccctgctgggggtatcccatctacctcatcatgtctcccgtcaccctcaacacctgtgcagtcaccacacccacagttcccccatatatcctcgactatgaatggaactagtaacagtccttcgggcaaccaccaatcatcctttgccaaccgtccacggaaaagctcagtgaacggctctagcgctactagcagtggttag

SEQ ID NO: 153608 - DNA, 318 bp, Artificial Sequence
  derived and/or modified sequence
atgcatcgtaccacacggatcaagatcactgaattgaaccctcacctcatgtgcgtgctctgcgggggttatttcattgatgccactactatcattgaatgtttgcactccttctgcaaaacgtgcatcgtgagatatctggaaactagcaaatattgccccatttgcgacgtgcaggtgcacaagacgagaccccttttaaacatacgaagtgataagacacttcaggatatagtgtataagctggtcccagggctgttcaagaacgagatgaagcgacgcagagacttttacgccgcacacccgtccgcagactag

SEQ ID NO: 153609 - DNA, 624 bp, Artificial Sequence
  derived and/or modified sequence
atgcacagaaccacacggattaaaatcaccgagcttaatccgcacctgatgtgtgttctgtgcggcggttattttattgatgccacgacgattatcgagtgtttgcatagtttttgcaaaacatgtattgtcagatatcttgagaccagcaagtactgcccgatctgtgatgtccaggtgcacaagacacgcccactgctcaacattaggagcgataagactctgcaagacatcgtgtataagctggtgccgggactttttaaaaatgagatgaagaggcgtagagatttttacgctgcccacccttcggccgacgctgctaatggatctaacgaggataggggggaagtggccgatgaggacaaaaggatcatcaccgatgatgaaatcatcagcctgtcgatagagtttttcgatcagaataggctggatcgtaaggtgaacaaagataaggaaaagtcgaaggaggaagttaatgacaagagatatctcagatgccctgcagccatgacggtgatgcacctgcgtaaattcctgaggagcaagatggacattcccaatacttttcagattgatgttatgtatgaggaggagccacttaaggattattacaccttgatgtag

SEQ ID NO: 153610 - DNA, 453 bp, Artificial Sequence
  derived and/or modified sequence
atgcaccgcaccactcggatcaaaatcacggagctaaaccctcacctaatgtgcgtgctctgtggagggtattttatcgacgccacaacaattattgagtgtcttcattcgttttgcaaaacctgcatagtgaggtacctggagacgtccaaatattgccctatctgcgacgttcaggtgcacaagaccagacccctgttgaacattcgcagcgataaaacgttacaagacatcgtttacaagctcgtgcccggactattcaagaatgagatgaagcgcaggagagacttttatgccgctcacccaagcgcggacgccgctaatggatccaacgaagaccggggagaagtcgcggacgaagataagaggattatcaccgatgacgagattataagcctttccattgagttttttgaccaaaaccgccttgaccggaaagtgaataaggactag

SEQ ID NO: 153611 - DNA, 555 bp, Artificial Sequence
  derived and/or modified sequence
tacttcattgatgccacaaccataatcgagtgcctgcacagcttctgtaaaacatgtatcgtgcggtatctagagacaagtaaatactgtccaatctgcgatgttcaggttcataaaaccagaccgttgctgaatatacgcctggaccgcaaggtgaataaagacaaggagaagtcaaaggaagaggtgaacgataagagatatttacgctgtcctgctgctatgaccgtgatgcacctgcgaaagtttctgcgcagtaaaatggatattcccaatacatttcagatcgatgtcatgtacgaagaagaacctctgaaggactactacacattaatggatatcgcctatatctatacatggaggaggaacggcccactgccccttaagtaccgtgtaagacccacgtgcaaacgcatgaagatctcgcaccagagggatggattgactaacgccggagaactcgaaagtgattctggaagcgacaaggccaatagccccgcaggaggcatacctagtaccagctcatgcctaccctcccccagcacgccagtttag

SEQ ID NO: 153612 - DNA, 279 bp, Artificial Sequence
  derived and/or modified sequence
atgcatagaacaacaagaataaagatcaccgaacttaatccgcatcttatgtgcgtgttgtgtgggggatactttatcgacgctaccaccattatcgaatgtctgcatagcttttgcaagacatgtatcgtcagatatctggaaaccagcaagtattgtcccatttgtgacgtccaagttcacaaaacccgacccttgctgaatatcagatcagacaagaccctccaggatatcgtgtataagctggttcccggactgtttaccgctaacggatcttag

SEQ ID NO: 153613 - DNA, 3344 bp, Artificial Sequence
  derived and/or modified sequence
gagccattttggagccggtgtcagtttccactctgccttcagcggtgcatttttttccaccctcccctccccctcctcccctccccccgctcgcacgcacacacacggcgccccccgcccgcccgcctcccccacagcaactatgaaataatcgtagtatgagaggcagagatcggggcgagacaatggggatgtgggcgcgggagccccgttccggcttagcagcacctcccagccccgcagaataaaaccgatcgcgccccctccgcgcgcgccctcccccgagtgcggagcgggaggaggcggcggcggccgaggaggaggaggaggaggccccggaggaggaggcgttggaggtcgaggcggaggcggaggaggaggaggccgaggcgccggaggaggccgaggcgccggagcaggaggaggccggccggaggcggcatgagacgagcgtggcggccgcggctgctcggggccgcgctggttgcccattgacagcggcgtctgcagctcgcttcaagatggccgcttggctcgcattcattttctgctgaacgacttttaactttcattgtcttttccgcccgcttcgatcgcctcgcgccggctgctctttccgggattttttatcaagcagaaatgcatcgaacaacgagaatcaagatcactgagctaaatccccacctgatgtgtgtgctttgtggagggtacttcattgatgccacaaccataatagaatgtctacattccttctgtaaaacgtgtattgttcgttacctggagaccagcaagtattgtcctatttgtgatgtccaagttcacaagaccagaccactactgaatataagattggatcggaaagtaaacaaagacaaagagaaatctaaggaggaggtgaatgataaaagatacttacgatgcccagcagcaatgactgtgatgcacttaagaaagtttctcagaagtaaaatggacatacctaatactttccagattgatgtcatgtatgaggaggaacctttaaaggattattatacactaatggatattgcctacatttatacctggagaaggaatggtccacttccattgaaatacagagttcgacctacttgtaaaagaatgaagatcagtcaccagagagatggactgacaaatgctggagaactggaaagtgactctgggagtgacaaggccaacagcccagcaggaggtattccctccacctcttcttgtttgcctagccccagtactccagtgcagtctcctcatccacagtttcctcacatttccagtactatgaatggaaccagcaacagccccagcggtaaccaccaatcttcttttgccaatagacctcgaaaatcatcagtaaatgggtcatcagcaacttcttctggttgatacctgagactgttaaggaaaaaaattttaaacccctgatttatatagatatcttcatgccattacagctttctagatgctaatacatgtgactatcgtccaatttgctttcttttgtagtgacattaaatttggctataaaagatggactacatgtgatactcctatggacgttaattgaaaagaaagattgttgttataaagaattggtttcttggaaagcaggcaagactttttctctgtgttaggaaagatgggaaatggtttctgtaaccattgtttggatttggaagtactctgcagtggacataagcattgggccatagtttgttaatctcaactaacgcctacattacattctccttgatcgttcttgttattacgctgttttgtgaacctgtagaaaacaagtgctttttatcttgaaattcaaccaacggaaagaatatgcatagaataatgcattctatgtagccatgtcactgtgaataacgatttcttgcatatttagccattttgattcctgtttgatttatacttctctgttgctacgcaaaaccgatcaaagaaaagtgaacttcagttttacaatctgtatgcctaaaagcgggtactaccgtttattttactgacttgtttaaatgattcgcttttgtaagaatcagatggcattatgcttgttgtacaatgccatattggtatatgacataacaggaaacagtattgtatgatatatttataaatgctataaagaaatattgtgtttcatgcattcagaaatgattgttaaaattctcccaactggttcgacctttgcagatacccataacctatgttgagccttgcttaccagcaaagaatatttttaatgtggatatctaattctaaagtctgttccattagaagcaattggcacatctttctatactttatatacttttctccagtaatacatgtttactttaaagattgttgcagtgaagaaaaacctttaactgagaaatatggaaaccgtcttaattttccattggctatgatggaattaatattgtattttaaaaatgcatattgatcactataattctaaaacaattttttaaataaaccagcaggttgctaaaagaaggcattttatctaaagttattttaataggtggtatagcagtaattttaaatttaagagttgcttttacagttaacaatggaatatgccttctctgctatgtctgaaaatagaagctatttattatgagcttctacaggtatttttaaatagagcaagcatgttgaatttaaaatatgaataaccccacccaacaattttcagtttattttttgctttggtcgaacttggtgtgtgttcatcacccatcagttatttgtgagggtgtttattctatatgaatattgtttcatgtttgtatgggaaaattgtagctaaacatttcattgtccccagtctgcaaaagaagcacaattctattgctttgtcttgcttatagtcattaaatcattacttttacatatattgctgttacttctgctttctttaaaaatatagtaaaggatgttttatgaagtcacaagatacatatatttttattttgacctaaatttgtacagtcccattgtaagtgttgtttctaattatagatgtaaaatgaaatttcatttgtaattggaaaaaatccaataaaaaggatattcatttagaaaatagctaagatctttaataaaaatttgatatgaaaagcacaatgtgcagaagttatggaaaacctatagaggattacaacaggtaaacgttaaagagaatacattgctgacttatagtgatgtggctaagaagtacatgctttgttgtaaaattgcttgaaagcccattgaaagatgtatctgtttatttacagtctttgaagtaaaagttaccaatgtttgcc

SEQ ID NO: 153614 - DNA, 552 bp, Artificial Sequence
  derived and/or modified sequence
tacttcattgatgccacaaccataatagaatgtctacattccttctgtaaaacgtgtattgttcgttacctggagaccagcaagtattgtcctatttgtgatgtccaagttcacaagaccagaccactactgaatataagattggatcggaaagtaaacaaagacaaagagaaatctaaggaggaggtgaatgataaaagatacttacgatgcccagcagcaatgactgtgatgcacttaagaaagtttctcagaagtaaaatggacatacctaatactttccagattgatgtcatgtatgaggaggaacctttaaaggattattatacactaatggatattgcctacatttatacctggagaaggaatggtccacttccattgaaatacagagttcgacctacttgtaaaagaatgaagatcagtcaccagagagatggactgacaaatgctggagaactggaaagtgactctgggagtgacaaggccaacagcccagcaggaggtattccctccacctcttcttgtttgcctagccccagtactccagtg

SEQ ID NO: 153615 - DNA, 981 bp, Artificial Sequence
  derived and/or modified sequence
atgcacagaaccaccagaatcaagatcaccgagctgaacccccacctgatgtgcgtgctgtgcggcggctacttcatcgacgccaccaccatcatcgagtgcctgcacagcttctgcaagacctgcatcgtgagatacctggagaccagcaagtactgccccatctgcgacgtgcaggtgcacaagaccagacccctgctgaacatcagaagcgacaagaccctgcaggacatcgtgtacaagctggtgcccggcctgttcaagaacgagatgaagagaagaagagacttctacgccgcccaccccagcgccgacgccgccaacggcagcaacgaggacagaggcgaggtggccgacgaggacaagagaatcatcaccgacgacgagatcatcagcctgagcatcgagttcttcgaccagaacagactggacagaaaggtgaacaaggacaaggagaagagcaaggaggaggtgaacgacaagagatacctgagatgccccgccgccatgaccgtgatgcacctgagaaagttcctgagaagcaagatggacatccccaacaccttccagatcgacgtgatgtacgaggaggagcccctgaaggactactacaccctgatggacatcgcctacatctacacctggagaagaaacggccccctgcccctgaagtacagagtgagacccacctgcaagagaatgaagatcagccaccagagagacggcctgaccaacgccggcgagctggagagcgacagcggcagcgacaaggccaacagccccgccggcggcatccccagcaccagcagctgcctgcccagccccagcacccccgtgcagagcccccacccccagttcccccacatcagcagcaccatgaacggcaccagcaacagccccagcggcaaccaccagagcagcttcgccaacagacccagaaagagcagcgtgaacggcagcagcgccaccagcagcggctag

SEQ ID NO: 153616 - DNA, 717 bp, Artificial Sequence
  derived and/or modified sequence
atgtgcgtgctgtgcggcggctacttcatcgacgccaccaccatcatcgagtgcctgcacagcttctgcaagacctgcatcgtgagatacctggagaccagcaagtactgccccatctgcgacgtgcaggtgcacaagaccagacccctgctgaacatcagactggacagaaaggtgaacaaggacaaggagaagagcaaggaggaggtgaacgacaagagatacctgagatgccccgccgccatgaccgtgatgcacctgagaaagttcctgagaagcaagatggacatccccaacaccttccagatcgacgtgatgtacgaggaggagcccctgaaggactactacaccctgatggacatcgcctacatctacacctggagaagaaacggccccctgcccctgaagtacagagtgagacccacctgcaagagaatgaagatcagccaccagagagacggcctgaccaacgccggcgagctggagagcgacagcggcagcgacaaggccaacagccccgccggcggcatccccagcaccagcagctgcctgcccagccccagcacccccgtgcagagcccccacccccagttcccccacatcagcagcaccatgaacggcaccagcaacagccccagcggcaaccaccagagcagcttcgccaacagacccagaaagagcagcgtgaacggcagcagcgccaccagcagcggctag

SEQ ID NO: 153617 - DNA, 318 bp, Artificial Sequence
  derived and/or modified sequence
atgcacagaaccaccagaatcaagatcaccgagctgaacccccacctgatgtgcgtgctgtgcggcggctacttcatcgacgccaccaccatcatcgagtgcctgcacagcttctgcaagacctgcatcgtgagatacctggagaccagcaagtactgccccatctgcgacgtgcaggtgcacaagaccagacccctgctgaacatcagaagcgacaagaccctgcaggacatcgtgtacaagctggtgcccggcctgttcaagaacgagatgaagagaagaagagacttctacgccgcccaccccagcgccgactag

SEQ ID NO: 153618 - DNA, 624 bp, Artificial Sequence
  derived and/or modified sequence
atgcacagaaccaccagaatcaagatcaccgagctgaacccccacctgatgtgcgtgctgtgcggcggctacttcatcgacgccaccaccatcatcgagtgcctgcacagcttctgcaagacctgcatcgtgagatacctggagaccagcaagtactgccccatctgcgacgtgcaggtgcacaagaccagacccctgctgaacatcagaagcgacaagaccctgcaggacatcgtgtacaagctggtgcccggcctgttcaagaacgagatgaagagaagaagagacttctacgccgcccaccccagcgccgacgccgccaacggcagcaacgaggacagaggcgaggtggccgacgaggacaagagaatcatcaccgacgacgagatcatcagcctgagcatcgagttcttcgaccagaacagactggacagaaaggtgaacaaggacaaggagaagagcaaggaggaggtgaacgacaagagatacctgagatgccccgccgccatgaccgtgatgcacctgagaaagttcctgagaagcaagatggacatccccaacaccttccagatcgacgtgatgtacgaggaggagcccctgaaggactactacaccctgatgtag

SEQ ID NO: 153619 - DNA, 453 bp, Artificial Sequence
  derived and/or modified sequence
atgcacagaaccaccagaatcaagatcaccgagctgaacccccacctgatgtgcgtgctgtgcggcggctacttcatcgacgccaccaccatcatcgagtgcctgcacagcttctgcaagacctgcatcgtgagatacctggagaccagcaagtactgccccatctgcgacgtgcaggtgcacaagaccagacccctgctgaacatcagaagcgacaagaccctgcaggacatcgtgtacaagctggtgcccggcctgttcaagaacgagatgaagagaagaagagacttctacgccgcccaccccagcgccgacgccgccaacggcagcaacgaggacagaggcgaggtggccgacgaggacaagagaatcatcaccgacgacgagatcatcagcctgagcatcgagttcttcgaccagaacagactggacagaaaggtgaacaaggactag

SEQ ID NO: 153620 - DNA, 555 bp, Artificial Sequence
  derived and/or modified sequence
tacttcatcgacgccaccaccatcatcgagtgcctgcacagcttctgcaagacctgcatcgtgagatacctggagaccagcaagtactgccccatctgcgacgtgcaggtgcacaagaccagacccctgctgaacatcagactggacagaaaggtgaacaaggacaaggagaagagcaaggaggaggtgaacgacaagagatacctgagatgccccgccgccatgaccgtgatgcacctgagaaagttcctgagaagcaagatggacatccccaacaccttccagatcgacgtgatgtacgaggaggagcccctgaaggactactacaccctgatggacatcgcctacatctacacctggagaagaaacggccccctgcccctgaagtacagagtgagacccacctgcaagagaatgaagatcagccaccagagagacggcctgaccaacgccggcgagctggagagcgacagcggcagcgacaaggccaacagccccgccggcggcatccccagcaccagcagctgcctgcccagccccagcacccccgtgtag

SEQ ID NO: 153621 - DNA, 279 bp, Artificial Sequence
  derived and/or modified sequence
atgcacagaaccaccagaatcaagatcaccgagctgaacccccacctgatgtgcgtgctgtgcggcggctacttcatcgacgccaccaccatcatcgagtgcctgcacagcttctgcaagacctgcatcgtgagatacctggagaccagcaagtactgccccatctgcgacgtgcaggtgcacaagaccagacccctgctgaacatcagaagcgacaagaccctgcaggacatcgtgtacaagctggtgcccggcctgttcaccgccaacggcagctag

SEQ ID NO: 153622 - protein, 260 aa, Artificial Sequence
  derived and/or modified sequence
MAKEWGYASHNGPDHWHELFPNAKGENQSPVELHTKDIRHDPSLQPWSVSYDGGSAKTILNNGKTCRVVFDDTYDRSMLRGGPLPGPYRLRQFHLHWGSSDDHGSEHTVDGVKYAAELHLVHWNPKYNTFKEALKQRDGIAVIGIFLKIGHENGEFQIFLDALDKIKTKGKEAPFTKFDPSCLFPACRDYWTYQGSFTTPPCEECIVWLLLKEPMTVSSDQMAKLRSLLSSAENEPPVPLVSNWRPPQPINNRVVRASFK

SEQ ID NO: 153623 - protein, 244 aa, Artificial Sequence
  derived and/or modified sequence
MAKEWGYASHNGPDHWHELFPNAKGENQSPWSVSYDGGSAKTILNNGKTCRVVFDDTYDRSMLRGGPLPGPYRLRQFHLHWGSSDDHGSEHTVDGVKYAAELHLVHWNPKYNTFKEALKQRDGIAVIGIFLKIGHENGEFQIFLDALDKIKTKGKEAPFTKFDPSCLFPACRDYWTYQGSFTTPPCEECIVWLLLKEPMTVSSDQMAKLRSLLSSAENEPPVPLVSNWRPPQPINNRVVRASFK

SEQ ID NO: 153624 - DNA, 783 bp, Artificial Sequence
  derived and/or modified sequence
atggccaaggaatggggctacgcatcccataacggtcctgaccactggcacgaactctttccgaatgcgaaaggggaaaatcagagccctgttgaattacacaccaaggacattaggcatgatccaagtctgcaaccctggagtgtttcctatgacggcgggtctgcaaagacgatcctcaacaatggcaagacttgccgggtggtgttcgatgacacatacgaccggagcatgctgcgggggggacccctacctggaccatatcgactgagacagtttcatttgcactggggctcctcagacgatcacggaagtgaacacaccgtcgatggggtaaagtatgctgcagaactgcacttagtgcactggaacccaaagtacaacaccttcaaagaggccctcaaacaacgagatgggatagcagtcattggcattttcctgaaaattggacatgagaatggggaattccagatcttcctcgacgctctagataaaattaaaacaaaggggaaagaggctccctttacaaagtttgacccatcctgcctcttccctgcctgtagggattattggacataccaaggctctttcaccacccccccatgcgaggagtgtatcgtctggttgctgttgaaggagccaatgaccgtatccagcgatcagatggccaaactgcgcagcctgttgagtagcgcagagaacgagcctcccgtacctttggttagtaactggcgacctccacagccaattaataatagggtcgtccgggcctccttcaaatag

SEQ ID NO: 153625 - DNA, 735 bp, Artificial Sequence
  derived and/or modified sequence
atggctaaagagtggggctacgcatcacacaacggcccggaccactggcatgaacttttccctaatgctaagggggagaatcaatcaccatggagcgtgtcatatgacggcggcagcgcaaagactatactaaacaatgggaagacttgtagggtcgtgtttgatgatacatatgatagatctatgctgagaggcggtcctctccctggtccgtaccgactgaggcaattccatttgcattggggcagctccgacgatcacggtagcgaacacactgtggacggcgttaagtatgccgctgagctccatcttgtgcactggaatcctaaatacaacaccttcaaggaagccttgaaacagagggacggaatcgctgttattggaatatttctcaaaatcgggcacgaaaatggcgagtttcaaattttcctcgacgctctggacaaaatcaagaccaaaggtaaagaagctccttttacaaagttcgatccatcttgcctctttccagcttgtcgtgattactggacatatcaaggcagttttaccacccctccctgtgaggagtgtattgtttggctactccttaaggaacccatgaccgtatcttccgaccaaatggctaaacttcgtagcttgctttcaagcgccgagaacgagccacctgtgcccttagtatccaactggcgaccgccacagcccattaacaatagagtggtgagagcatccttcaaatag

SEQ ID NO: 153626 - DNA, 783 bp, Artificial Sequence
  derived and/or modified sequence
atggccaaggagtggggctacgccagccacaatggaccagaccactggcatgagctgttccccaatgccaagggggagaaccagagccctgtggagctgcacaccaaggacatcagacatgaccccagcctgcagccctggagcgtgtcctatgatggcggcagcgccaagaccatcctgaacaacgggaagacctgccgggtggtgtttgatgacacctatgaccgctccatgctgcggggcggccccctgcccggcccctaccgcctgcggcagttccacctgcactggggcagcagtgatgaccacggcagcgagcacacagtggatggagtgaagtatgctgctgagctgcacctggtgcactggaaccccaagtacaacaccttcaaggaggccctgaagcagagagatggcattgctgtgattggcatcttcctgaagattggacatgaaaatggagagttccagatcttcctggatgccctggacaagatcaagaccaagggcaaggaggcccccttcaccaagtttgaccccagctgcctcttccctgcctgccgggactactggacctaccagggcagcttcaccaccccaccctgtgaggagtgcatcgtgtggctgctgctgaaggagcccatgacagtgtccagtgaccagatggccaagctgcggagcctgctgagcagcgcagaaaatgagccccctgtgcccctggtgagcaactggaggcctccccagcccatcaacaacagagtggtgcgggccagcttcaagtag

SEQ ID NO: 153627 - DNA, 735 bp, Artificial Sequence
  derived and/or modified sequence
atggccaaggagtggggctacgccagccacaatggaccagaccactggcatgagctgttccccaatgccaagggggagaaccagagcccctggagcgtgtcctatgatggcggcagcgccaagaccatcctgaacaacgggaagacctgccgggtggtgtttgatgacacctatgaccgctccatgctgcggggcggccccctgcccggcccctaccgcctgcggcagttccacctgcactggggcagcagtgatgaccacggcagcgagcacacagtggatggagtgaagtatgctgctgagctgcacctggtgcactggaaccccaagtacaacaccttcaaggaggccctgaagcagagagatggcattgctgtgattggcatcttcctgaagattggacatgaaaatggagagttccagatcttcctggatgccctggacaagatcaagaccaagggcaaggaggcccccttcaccaagtttgaccccagctgcctcttccctgcctgccgggactactggacctaccagggcagcttcaccaccccaccctgtgaggagtgcatcgtgtggctgctgctgaaggagcccatgacagtgtccagtgaccagatggccaagctgcggagcctgctgagcagcgcagaaaatgagccccctgtgcccctggtgagcaactggaggcctccccagcccatcaacaacagagtggtgcgggccagcttcaagtag

SEQ ID NO: 153628 - DNA, 783 bp, Artificial Sequence
  derived and/or modified sequence
atggccaaggagtggggctacgccagccacaacggccccgaccactggcatgagctgttccctaacgccaagggggagaaccagtcacccgtagagctccacaccaaggatatacgacatgacccctcgctgcagccatggtccgtgtcctatgacggcggatctgctaaaactattctgaacaatgggaagacctgcagggtagtgttcgatgacacatatgaccggtcaatgctacgagggggaccactgccaggcccttatcggctgcggcagttccacctacactggggatcgagcgacgatcatgggagcgagcacaccgtggatggagtgaagtacgccgcagagctgcaccttgtgcattggaaccccaagtataacactttcaaggaagcactcaagcagcgggacggcatagctgttatcggcatcttcctcaaaatcgggcacgagaacggggagttccagatctttcttgatgcccttgataaaattaagacaaagggtaaagaagctcctttcaccaagttcgacccgtcctgcctttttccagcatgtagagattattggacttatcaaggctctttcaccaccccaccctgtgaggagtgcattgtttggttgctactgaaggagccaatgacagttagttctgaccaaatggctaaattacgttcacttctctcttcagccgagaacgaaccccctgtgcctctcgtatcaaactggcgccctcctcagcccatcaacaacagggtggtacgagcctctttcaaatag

SEQ ID NO: 153629 - DNA, 735 bp, Artificial Sequence
  derived and/or modified sequence
atggccaaggagtggggctacgccagccacaacggccccgaccactggcacgagctgttccccaatgctaagggtgaaaaccagtcaccatggtccgttagctacgacggagggagcgcaaagaccattctcaacaatgggaaaacctgccgggtagtcttcgacgacacctacgaccgttccatgctgcgcggaggtccactccccgggccgtatcgcctgcgtcagttccaccttcactgggggagctctgatgatcatggctcagaacacactgttgatggcgtgaaatacgcagctgagcttcacctggtacattggaacccaaaatataacacctttaaggaggctctcaaacagcgtgatggcattgccgtcatcggaatcttcctcaagatcggccatgaaaacggagagttccagatctttctggacgccctggataaaatcaagacaaaaggaaaagaggctccgtttacgaaatttgacccctcctgtctctttccagcatgccgtgactactggacgtaccagggctcctttaccactcctccttgcgaagagtgtatcgtctggttgcttctgaaagagcctatgaccgtgagttccgatcagatggcgaaattaaggagtcttctaagcagtgccgaaaacgagcccccggtacctctggtttcaaattggagacccccccagcccattaacaacagggtggtccgagcttcttttaagtag

SEQ ID NO: 153630 - DNA, 783 bp, Artificial Sequence
  derived and/or modified sequence
atggccaaagagtgggggtatgccagccataatgggccagaccattggcatgagctgtttcccaatgctaagggagaaaatcaaagccctgtggaattgcataccaaggatattcgacatgatccttctctgcagccctggagtgtttcatatgatggcggatccgccaagactatcttgaataacggtaaaacatgccgcgtggtgttcgatgatacttacgatagatcgatgctcaggggaggtccactacccggaccatacagactcagacagtttcaccttcactggggttcctctgatgaccatggcagcgagcacaccgtggatggcgtaaagtatgctgctgaactccatcttgtacactggaacccaaaatataacacctttaaagaagcccttaagcagagagacggcatcgcagttattggaatcttccttaaaatcgggcacgaaaacggggagtttcagatctttttggacgctctcgacaaaatcaaaacgaaaggtaaggaggcaccatttacaaaatttgaccccagctgtctctttcctgcttgtagagactactggacctatcaggggagtttcactaccccaccatgtgaagaatgtatagtgtggctcctgctgaaggaaccaatgacggtgtccagcgaccagatggctaagctgaggtccctgctgtcgtccgctgagaacgagccgcctgtgcctttggtgtccaattggagacctccccaacccatcaataacagggttgtacgtgcctcctttaaatag

SEQ ID NO: 153631 - DNA, 735 bp, Artificial Sequence
  derived and/or modified sequence
atggcaaaagaatggggttatgcatcccacaacggtccagatcattggcatgaactatttccaaatgccaagggcgagaaccagtctccatggtctgtgtcttatgacgggggatctgccaaaacaatcttgaacaacggaaaaacctgtagggtcgtgtttgacgacacatatgatcggtctatgttgagaggaggcccactacctggcccatataggctgcgccagttccacctgcactggggatcctccgacgaccatggttcggagcataccgttgacggcgtcaaatacgccgctgagcttcacttggtacactggaatccaaaatacaatacctttaaagaagctctgaagcagcgcgacggcattgccgtcatcgggatctttttaaagatcgggcacgagaatggtgagtttcaaatttttctcgatgcattagacaaaattaagacgaagggaaaagaagcacccttcaccaaatttgacccatcttgcctatttcctgcctgtcgcgattactggacatatcagggtagctttactactcccccatgcgaagaatgtattgtgtggctgctgctgaaggagccaatgaccgtgtcctccgaccagatggccaagcttcgatccctgttgtcatccgctgagaatgaacctcccgtgcccttagtgtctaactggagacctccccagcctataaataacagggtagtaagagctagctttaagtag

SEQ ID NO: 153632 - DNA, 1753 bp, Artificial Sequence
  derived and/or modified sequence
acataaaagcgcgggctcgcggcgactctgcaccacgcaggggaagagaaagcaggagccgtccagcacggaggaaggcgaccatggccaaggagtggggctacgccagtcacaacggtcctgaccactggcatgaacttttcccaaatgccaagggggaaaaccagtcgcccgttgagctgcatactaaagacatcaggcatgacccttctctgcagccatggtctgtgtcttatgatggtggctctgccaagaccatcctgaataatgggaagacctgccgagttgtatttgatgatacttatgataggtcaatgctgagagggggtcctctccctggaccctaccgacttcgccagtttcatcttcactggggctcttcggatgatcatggctctgagcacaccgtggatggagtcaagtatgcagcggagcttcatttggttcactggaacccgaagtataacacttttaaagaagccctgaagcagcgcgatgggatcgctgtgattggcatttttctgaagataggacatgagaatggcgagttccagattttccttgatgcattggacaagattaagacaaagggcaaggaggcgcccttcacaaagtttgacccatcctgcctgttcccggcatgccgggactactggacctaccagggctcattcaccacgccgccctgcgaggaatgcattgtgtggctgctgctgaaggagcccatgaccgtgagctctgaccagatggccaagctgcggagcctcctctccagtgctgagaacgagcccccagtgcctcttgtgagcaactggcgacctccacagcctatcaataacagggtggtgagagcttccttcaaatgaggctgctggatcttgccctcttcaggaaaggaaacctaccattggagagcttggttccttgcctccttctggtgctccttactccaagtctatttcatttttccacactgagcaatgaatgtgagagatgtggtcaccaagatctaagttacttgttgaaagaaagttactttcgacaagatctaatatgaaagcatagatttcacatttgatctctgtaataatcatctttcctataaaagtagcatttttggtaaagtttcaaagaagaagaaacagagatggaagagtaaagatatttttaaaatggctagctattgggcaccagtttttctgttatctaaaatttcacacaacttcattgtttttatttttatattatgagttgtccatcttaaagaaatatgagtaattctacatgtagtagaggtgtatgaagatcatataacaattaaacataagccagaaattaaaatgactatagacagcaagaattgagctaataatatgttttaactcttaacaccagcaagaagtcagtcatttattgaagttttagctactaagattacttggttttgattaccagtgaaaagaaaacacaatacaatcaggagttttcaaatttttgattcagtatttgaatttcttcttcataaatgtagttgaatttatcctagtatttttctttacctgaaggagggccatttatttttaatttcactacatttttctttgcatgattattaaaataaaaactgcctctgttgtgtttctcactggaggctggaatgaatgatcactagaacacaaaagagtgaatgatgacacttgaagtcaaagcagttgtactgatcaccagaaccaataaagacataaatggaaaa

SEQ ID NO: 153633 - DNA, 1151 bp, Artificial Sequence
  derived and/or modified sequence
accacgcaggggaagagaaagcaggagccgtccagcacggaggaaggcgaccatggccaaggagtggggctacgccagtcacaacggtcctgaccactggcatgaacttttcccaaatgccaagggggaaaaccagtcgccatggtctgtgtcttatgatggtggctctgccaagaccatcctgaataatgggaagacctgccgagttgtatttgatgatacttatgataggtcaatgctgagagggggtcctctccctggaccctaccgacttcgccagtttcatcttcactggggctcttcggatgatcatggctctgagcacaccgtggatggagtcaagtatgcagcggagcttcatttggttcactggaacccgaagtataacacttttaaagaagccctgaagcagcgcgatgggatcgctgtgattggcatttttctgaagataggacatgagaatggcgagttccagattttccttgatgcattggacaagattaagacaaagggcaaggaggcgcccttcacaaagtttgacccatcctgcctgttcccggcatgccgggactactggacctaccagggctcattcaccacgccgccctgcgaggaatgcattgtgtggctgctgctgaaggagcccatgaccgtgagctctgaccagatggccaagctgcggagcctcctctccagtgctgagaacgagcccccagtgcctcttgtgagcaactggcgacctccacagcctatcaataacagggtggtgagagcttccttcaaatgaggctgctggatcttgccctcttcaggaaaggaaacctaccattggagagcttggttccttgcctccttctggtgctccttactccaagtctatttcatttttccacactgagcaatgaatgtgagagatgtggtcaccaagatctaagttacttgttgaaagaaagttactttcgacaagatctaatatgaaagcatagatttcacatttgatctctgtaataatcatctttcctataaaagtagcatttttggtaaagtttcaaagaagaagaaacagagatggaagagtaaagatatttttaaaatggctagctattgggcaccagtttttctgttatctaaaatttcacacaacttcattg

SEQ ID NO: 153634 - DNA, 783 bp, Artificial Sequence
  derived and/or modified sequence
atggccaaggagtggggctacgccagccacaacggccccgaccactggcacgagctgttccccaacgccaagggcgagaaccagagccccgtggagctgcacaccaaggacatcagacacgaccccagcctgcagccctggagcgtgagctacgacggcggcagcgccaagaccatcctgaacaacggcaagacctgcagagtggtgttcgacgacacctacgacagaagcatgctgagaggcggccccctgcccggcccctacagactgagacagttccacctgcactggggcagcagcgacgaccacggcagcgagcacaccgtggacggcgtgaagtacgccgccgagctgcacctggtgcactggaaccccaagtacaacaccttcaaggaggccctgaagcagagagacggcatcgccgtgatcggcatcttcctgaagatcggccacgagaacggcgagttccagatcttcctggacgccctggacaagatcaagaccaagggcaaggaggcccccttcaccaagttcgaccccagctgcctgttccccgcctgcagagactactggacctaccagggcagcttcaccacccccccctgcgaggagtgcatcgtgtggctgctgctgaaggagcccatgaccgtgagcagcgaccagatggccaagctgagaagcctgctgagcagcgccgagaacgagccccccgtgcccctggtgagcaactggagacccccccagcccatcaacaacagagtggtgagagccagcttcaagtag

SEQ ID NO: 153635 - DNA, 735 bp, Artificial Sequence
  derived and/or modified sequence
atggccaaggagtggggctacgccagccacaacggccccgaccactggcacgagctgttccccaacgccaagggcgagaaccagagcccctggagcgtgagctacgacggcggcagcgccaagaccatcctgaacaacggcaagacctgcagagtggtgttcgacgacacctacgacagaagcatgctgagaggcggccccctgcccggcccctacagactgagacagttccacctgcactggggcagcagcgacgaccacggcagcgagcacaccgtggacggcgtgaagtacgccgccgagctgcacctggtgcactggaaccccaagtacaacaccttcaaggaggccctgaagcagagagacggcatcgccgtgatcggcatcttcctgaagatcggccacgagaacggcgagttccagatcttcctggacgccctggacaagatcaagaccaagggcaaggaggcccccttcaccaagttcgaccccagctgcctgttccccgcctgcagagactactggacctaccagggcagcttcaccacccccccctgcgaggagtgcatcgtgtggctgctgctgaaggagcccatgaccgtgagcagcgaccagatggccaagctgagaagcctgctgagcagcgccgagaacgagccccccgtgcccctggtgagcaactggagacccccccagcccatcaacaacagagtggtgagagccagcttcaagtag

SEQ ID NO: 153636 - protein, 1977 aa, Artificial Sequence
  derived and/or modified sequence
MSESEGGKDTTPEPSPANGAGPGPEWGLCPGPPAVEGESSGASGLGTPKRRNQHSKHKTVAVASAQRSPRALFCLTLANPLRRSCISIVEWKPFDILILLTIFANCVALGVYIPFPEDDSNTANHNLEQVEYVFLVIFTVETVLKIVAYGLVLHPSAYIRNGWNLLDFIIVVVGLFSVLLEQGPGRPGDAPHTGGKPGGFDVKALRAFRVLRPLRLVSGVPSLHIVLNSIMKALVPLLHIALLVLFVIIIYAIIGLELFLGRMHKTCYFLGSDMEAEEDPSPCASSGSGRACTLNQTECRGRWPGPNGGITNFDNFFFAMLTVFQCVTMEGWTDVLYWMQDAMGYELPWVYFVSLVIFGSFFVLNLVLGVLSGEFSKEREKAKARGDFQKQREKQQMEEDLRGYLDWITQAEELDMEDPSADDNLGSMAEEGRAGHRPQLAELTNRRRGRLRWFSHSTRSTHSTSSHASLPASDTGSMTETQGDEDEEEGALASCTRCLNKIMKTRVCRRLRRANRVLRARCRRAVKSNACYWAVLLLVFLNTLTIASEHHGQPVWLTQIQEYANKVLLCLFTVEMLLKLYGLGPSAYVSSFFNRFDCFVVCGGILETTLVEVGAMQPLGISVLRCVRLLRIFKVTRHWASLSNLVASLLNSMKSIASLLLLLFLFIIIFSLLGMQLFGGKFNFDQTHTKRSTFDTFPQALLTVFQILTGEDWNVVMYDGIMAYGGPFFPGMLVCIYFIILFICGNYILLNVFLAIAVDNLASGDAGTAKDKGGEKSNEKDLPQENEGLVPGVEKEEEEGARREGADMEEEEEEEEEEEEEEEEEGAGGVELLQEVVPKEKVVPIPEGSAFFCLSQTNPLRKGCHTLIHHHVFTNLILVFIILSSVSLAAEDPIRAHSFRNHILGYFDYAFTSIFTVEILLKMTVFGAFLHRGSFCRSWFNMLDLLVVSVSLISFGIHSSAISVVKILRVLRVLRPLRAINRAKGLKHVVQCVFVAIRTIGNIMIVTTLLQFMFACIGVQLFKGKFYTCTDEAKHTPQECKGSFLVYPDGDVSRPLVRERLWVNSDFNFDNVLSAMMALFTVSTFEGWPALLYKAIDAYAEDHGPIYNYRVEISVFFIVYIIIIAFFMMNIFVGFVIITFRAQGEQEYQNCELDKNQRQCVEYALKAQPLRRYIPKNPHQYRVWATVNSAAFEYLMFLLILLNTVALAMQHYEQTAPFNYAMDILNMVFTGLFTIEMVLKIIAFKPKHYFTDAWNTFDALIVVGSIVDIAVTEVNNGGHLGESSEDSSRISITFFRLFRVMRLVKLLSKGEGIRTLLWTFIKSFQALPYVALLIAMIFFIYAVIGMQMFGKVALQDGTQINRNNNFQTFPQAVLLLFRCATGEAWQEIMLASLPGNRCDPESDFGPGEEFTCGSNFAIAYFISFFMLCAFLIINLFVAVIMDNFDYLTRDWSILGPHHLDEFKRIWSEYDPGAKGRIKHLDVVALLRRIQPPLGFGKLCPHRVACKRLVAMNMPLNSDGTVTFNATLFALVRTSLKIKTEGNLEQANQELRIVIKKIWKRMKQKLLDEVIPPPDEEEVTVGKFYATFLIQDYFRKFRRRKEKGLLGNDAAPSTSSALQAGLRSLQDLGPEMRQALTCDTEEEEEEGQEGVEEEDEKDLETNKATMVSQPSARRGSGISVSLPVGDRLPDSLSFGPSDDDRGTPTSSQPSVPQAGSNTHRRGSGALIFTIPEEGNSQPKGTKGQNKQDEDEEVPDRLSYLDEQAGTPPCSVLLPPHRAQRYMDGHLVPRRRLLPPTPAGRKPSFTIQCLQRQGSCEDLPIPGTYHRGRNSGPNRAQGSWATPPQRGRLLYAPLLLVEEGAAGEGYLGRSSGPLRTFTCLHVPGTHSDPSHGKRGSADSLVEAVLISEGLGLFARDPRFVALAKQEIADACRLTLDEMDNAASDLLAQGTSSLYSDEESILSRFDEEDLGDEMACVHAL

SEQ ID NO: 153637 - DNA, 5934 bp, Artificial Sequence
  derived and/or modified sequence
atgtctgaatcagagggcgggaaagataccacacctgaacccagccccgctaacggcgctggccccggaccagagtggggcctatgccccggcccccccgcagtggaaggagaaagcagcggggcttccggattaggaacacctaaacgaaggaaccagcattccaagcacaagacagttgcggtggcctccgctcagagaagtcctcgagccctgttctgcctcactctcgcaaatccactgagacggtcatgtatttctatcgttgaatggaagccctttgacattctaattctgctgactatcttcgcaaactgtgttgcacttggcgtgtacatccccttcccagaggatgacagtaataccgcgaatcacaacctagaacaagtggagtatgtatttctcgttatattcactgttgagacggtcctcaaaatcgtagcttacggcttggtgttacatcccagtgcatacatcagaaacggctggaatctattagattttattattgtcgtggtcggactgttctccgtcttgctggagcaagggcctgggaggcccggagatgctccccacaccggtgggaaacctggtggcttcgatgtgaaagctttacgtgcgttcagggtgctgcgacctctgcgactcgttagtggcgtgcctagcctccatatcgtgctgaacagcatcatgaaggcgctggttcccctgctgcacatcgcgctgctggtcctctttgtgataattatctatgctataatcggactcgaactcttcctgggcaggatgcacaagacctgctatttcctaggcagcgatatggaggctgaagaggatcctagcccttgtgcgagtagtggcagtggacgggcatgtaccctgaaccaaacagaatgtcgggggagatggccagggcctaacggaggaataaccaacttcgacaacttcttcttcgctatgctcacagtgttccaatgcgtgaccatggaaggttggacggacgtgctgtactggatgcaggacgcgatgggatatgagcttccttgggtgtattttgtgagtctggtcattttcggctcttttttcgtgctgaacctcgtgctcggggtgttgtccggggagttctctaaagaacgcgagaaagcaaaggcccggggcgatttccagaagcagagggaaaagcagcagatggaggaagacctacggggctatctcgactggataactcaagctgaagaactagacatggaggacccctccgccgatgacaatctggggagtatggcggaggaaggaagggccgggcatcgcccccagctcgccgagctcaccaacagacgcaggggaaggttgcgatggttctcacattcgactcgtagtacacatagtacaagtagccacgcgtcactgcccgcatctgacacaggcagcatgaccgagacacagggcgacgaggacgaggaggaaggcgcgctggccagctgcacaagatgcctgaataagatcatgaagactagggtgtgccgtcgtctgagacgggctaaccgggtgctacgcgcccggtgtcgcagggccgtgaagagtaatgcttgttactgggcagtgctgctccttgtattcctcaacaccttgactatcgcatcagagcaccacggccagccggtctggctaacccagatacaggagtatgccaataaagtgctcctttgcttgttcacagtagaaatgctgctgaagttgtacgggctagggccctctgcatatgtgagctccttcttcaatcggttcgactgctttgttgtgtgcggcgggatcctggagacaacactcgtagaagtcggggctatgcagccattgggcatttccgtattacgatgtgtgaggctgctgcggatctttaaagtaacacgtcactgggctagcctgtcaaacttagtggccagcctgctgaatagtatgaaatccatagcctccctcctcttgctcttgtttttgttcatcattattttcagtttactcgggatgcaactgtttggggggaaattcaactttgatcaaacacacactaaacgaagtacatttgataccttccctcaggcactgctcaccgtgtttcagattttgactggagaggactggaatgtggtcatgtacgatggaattatggcatacggcgggccgttttttccgggtatgctggtgtgcatctatttcattatactatttatatgtgggaactacattcttcttaacgttttcttggctatagccgttgataatctcgctagcggggatgcgggcaccgctaaagataaaggaggtgaaaaaagcaatgagaaggacttgcctcaggaaaatgaaggcctcgtcccgggtgtggagaaggaagaagaagagggggctaggcgggaaggggcggacatggaggaggaggaagaggaggaggaggaggaagaggaagaggaagaggaggagggagccgggggggtcgaactgttgcaggaagtcgttccaaaagagaaggttgtacccattcctgaagggagtgcttttttctgtctgagccagaccaatccactgcggaagggctgtcataccttaattcaccaccacgtgttcaccaacctcattctggtgtttataatactgtccagcgtgtctctcgctgcagaagaccccataagggctcatagcttccgcaatcacatccttggttactttgattacgcctttacctcaatcttcacggtcgagatccttctgaagatgactgtgttcggggcctttctgcacagaggatccttttgcagaagctggttcaacatgttggacttattagtggtcagtgtctcgctaataagctttgggatccactcctcagctatttctgtagtgaaaatcctgcgcgttttgcgggtgctgagacctcttcgcgccatcaatcgcgccaagggccttaagcacgtggtgcagtgcgtattcgtcgccattaggacaatcggtaacataatgattgttacaacactgctgcagtttatgtttgcttgtatcggtgtgcagctgttcaagggaaagttctatacttgtaccgacgaagcgaagcatactccccaagaatgcaaaggcagcttcctcgtataccccgacggcgacgtcagtcggcccctggtgagggagaggctctgggtgaactccgacttcaacttcgacaatgtcctaagcgcaatgatggccctttttaccgtgtccacatttgagggctggcctgctctcctatataaggcaattgacgcgtacgccgaggatcatgggccaatatacaattaccgtgtagaaatcagtgtgtttttcattgtttacatcataattatcgcattctttatgatgaacatctttgttggatttgtgatcattacctttcgggcccaaggggagcaggaatatcagaattgtgagctggataagaaccagcggcagtgtgttgagtatgcgttgaaagctcagccattgcgccggtatattcctaagaatccccatcagtacagagtgtgggctacagtcaactcagcggctttcgaatatctgatgttcctgctgattctgttgaatacagttgccctagcgatgcaacattacgaacagacagcaccgttcaattacgccatggatatcctcaacatggttttcaccggactattcacaatagagatggtgctgaaaatcattgcctttaagcctaagcactacttcacagacgcttggaacacttttgacgcactcattgtggtgggatcgatcgtcgatattgcggtgaccgaggtgaacaacggcggccatcttggcgaaagcagtgaagatagcagtcggatttctataacattttttcgcctctttagagtgatgaggctggtgaagcttttgagcaaaggggaagggatccgtacactgctctggactttcattaagtctttccaagctttgccctacgtcgcattactgatcgctatgatcttcttcatctatgcggtgataggaatgcaaatgttcggaaaagttgcccttcaggacggaacccagatcaaccggaacaacaattttcagacatttccgcaggccgttctactgctgttccgttgtgcgaccggtgaagcatggcaagagatcatgctcgcctccctccctggaaacagatgcgaccctgagtctgactttgggcctggagaagagtttacctgtggttcaaactttgccattgcctactttattagcttttttatgctttgcgccttccttattattaatctttttgtcgccgttattatggataacttcgactacttgacacgggactggagcatcctcggacctcaccacttagatgaattcaaacgaatatggtccgagtatgatcccggcgctaagggacgcattaagcacctcgacgtggttgctctgttaaggcggatccagccacccctgggattcggaaagttgtgcccacaccgcgtagcctgtaaacgcctggttgcaatgaacatgcccctgaatagtgacgggaccgtgacctttaacgccactctgtttgcattggtccggactagtctgaaaataaaaacggaggggaaccttgagcaggccaatcaggagttgcgcatagtcattaagaagatttggaagcgcatgaaacaaaagctgttagacgaggtgattcccccgccagatgaggaggaagttacggtgggaaaattttacgctacttttctcattcaggactattttaggaaattccggcgccggaaggagaagggactcctaggtaacgatgctgccccctcaacatcaagcgctctgcaggcaggtcttcgcagcctgcaggatctggggcctgaaatgaggcaggcactcacgtgcgacacagaggaggaagaagaggagggacaggagggcgtggaggaagaagacgaaaaagatcttgaaactaataaggcaactatggtgtctcagccctctgccagacgcggcagcggtattagcgtgtccctacccgtcggagatagactgcctgactcactgagcttcggtccttctgacgatgaccgcggcacccctacaagtagccagccgagtgtccctcaagctggctccaacactcaccgcagagggagcggagccctcatcttcactattccagaggaggggaacagccaaccaaaagggactaagggacagaataagcaggatgaggatgaggaagtaccagataggctaagttacctggatgaacaggcaggcacacccccctgctctgtgctcctcccaccccatcgcgctcagaggtatatggacggacacctggtaccgagacggaggctattaccccctactccggcaggacgcaaaccatcctttaccatccagtgcctgcagcgacaggggtcatgtgaagatctgcctatccctggaacgtaccataggggccggaacagtgggccgaatcgggcccagggttcttgggccacccccccacagcgcgggcgcctgctctacgcaccgctgctgctcgtcgaggagggagccgccggagaggggtaccttggtcgaagcagcgggcccctacggacattcacttgcctccacgtgccaggcactcactcagatccttctcacgggaagaggggaagcgccgactccctagtggaggctgttctcattagtgagggcctggggctttttgcaagagaccctaggtttgtagccctggctaagcaggaaatcgccgacgcctgtcgccttaccctggacgagatggataacgctgccagtgatctgctggcccagggcactagctcactgtattcagacgaggagtccatcttaagtaggttcgacgaggaagatctcggagatgaaatggcttgtgtgcacgccctgtag

SEQ ID NO: 153638 - DNA, 5934 bp, Artificial Sequence
  derived and/or modified sequence
atgtctgagagcgagggcggcaaggacaccaccccagagcccagccctgccaacggggccggccctggccctgagtggggcctgtgccccggccccccagctgtggagggggagagcagcggggccagcggcctgggcacccccaagagaagaaaccagcacagcaagcacaagacagtggccgtggccagcgcccagaggagcccccgggccctcttctgcctgaccctggccaaccccctgcggcgcagctgcatcagcatcgtggagtggaagccctttgacatcctgatcctgctgaccatctttgccaactgtgtggccctgggcgtgtacatccccttcccagaagatgacagcaacacagccaaccacaacctggagcaggtggagtatgtgttcctggtgatcttcaccgtggagaccgtgctgaagatcgtggcctacggcctggtgctgcaccccagcgcctacatcagaaatggctggaacctgctggacttcatcatcgtggtggtgggcctcttctctgtgctgctggagcagggccctggccggcctggagatgccccccacactggaggcaagccaggcggctttgatgtgaaggccctgcgggccttccgggtgctgcggcccctgcggctggtgtctggagtgcccagcctgcacatcgtgctgaacagcatcatgaaggccctggtgcccctgctgcacatcgccctgctggtgctcttcgtcatcatcatctatgccatcatcggcctggagctgttcctgggccgcatgcacaagacctgctacttcctgggcagtgacatggaggccgaggaggaccccagcccctgtgccagcagcggcagcggccgggcctgcaccctgaaccagacagagtgccggggccgctggccaggccccaatggaggcatcaccaactttgacaacttcttctttgccatgctgaccgtcttccagtgtgtgaccatggagggctggacagatgtgctgtactggatgcaggatgccatgggctatgagctgccctgggtgtactttgtgtccctggtgatcttcggcagcttctttgtgctgaacctggtgctgggcgtgctgagcggggagttcagcaaggagcgggagaaggccaaggcccggggggacttccagaagcagcgggagaagcagcagatggaggaggacctgcggggctacctggactggatcacccaggccgaggagctggacatggaggaccccagcgcagatgacaacctgggctccatggccgaggagggccgggccggccaccggccccagctggccgagctgaccaacagaagaagaggccgcctgcgctggttcagccacagcaccaggagcacccacagcaccagcagccacgccagcctgcctgccagtgacaccggctccatgacagagacccagggagatgaagatgaggaggagggcgccctggccagctgcacccgctgcctgaacaagatcatgaagaccagggtgtgccggcggctgcggcgggccaacagagtgctgcgggcccgctgcagaagagctgtgaagagcaatgcctgctactgggccgtgctgctgctggtgttcctgaacaccctgaccatcgccagcgagcaccacggccagcctgtgtggctgacccagatccaggagtatgccaacaaggtgctgctgtgcctcttcaccgtggagatgctgctgaagctgtatggcctgggccccagcgcctacgtgtcctccttcttcaacagatttgactgctttgtggtgtgtggcggcatcctggagaccaccctggtggaggtgggcgccatgcagcccctgggcatctctgtgctgcgctgtgtgcggctgctgcgcatcttcaaggtgaccaggcactgggccagcctgagcaacctggtggccagcctgctgaacagcatgaagagcatcgccagcctgctgctgctgctcttcctgttcatcatcatcttcagcctgctgggcatgcagctgtttggaggcaagttcaactttgaccagacccacaccaagaggagcacctttgacaccttcccccaggccctgctgactgtgttccagatcctgactggagaggactggaatgtggtgatgtatgatggcatcatggcctacggcggccccttcttccctggcatgctggtgtgcatctacttcatcatcctcttcatctgtggcaactacatcctgctgaatgtgttcctggccatcgctgtggacaacctggccagcggagatgctggaacagccaaggacaagggcggggagaagagcaatgagaaggacctgccccaggagaatgaaggcctggtgcctggggtggagaaggaggaggaggagggcgcccggcgggagggcgctgacatggaggaggaggaggaggaggaggaggaggaggaggaggaggaggaggaggagggcgctgggggcgtggagctgctgcaggaggtggtgcccaaggagaaggtggtgcccatccctgagggcagcgccttcttctgcctgagccagaccaaccccctgaggaagggctgccacaccctcatccaccaccacgtgttcaccaacctgatcctggtgttcatcatcctgagctctgtgtccctggccgctgaggaccccatccgggcccacagcttcaggaaccacatcctgggctactttgattatgccttcaccagcatcttcaccgtggagatcctgctgaagatgacagtgtttggagccttcctgcaccggggcagcttctgccgctcctggttcaacatgctggacctgctggtggtgtctgtgtccctcatcagctttggcatccacagcagcgccatctctgtggtgaagatcctgcgggtgctgcgggtgctgcggcccctgcgggccatcaacagagccaagggcctgaagcacgtggtgcagtgtgtgtttgtggccatccgcaccatcggcaacatcatgattgtgaccaccctgctgcagttcatgtttgcctgcattggagtgcagctgttcaagggcaagttctacacctgcacagatgaggccaagcacaccccccaggagtgcaagggcagcttcctggtgtacccagatggagatgtgtcccggcccctggtgcgggagcggctgtgggtgaacagcgacttcaactttgacaacgtgctgagcgccatgatggccctcttcaccgtgtccacctttgagggctggccagccctgctgtacaaggccattgatgcctatgcagaagatcatggccccatctacaactacagagtggagatcagcgtcttcttcatcgtgtacatcatcatcatcgccttcttcatgatgaacatctttgtgggctttgtgatcatcaccttccgggcccagggcgagcaggagtaccagaactgtgagctggacaagaaccagaggcagtgtgtggagtatgccctgaaggcccagcccctgcggcgctacatccccaagaacccccaccagtacagagtgtgggccaccgtgaacagcgctgcctttgagtacctgatgttcctgctgatcctgctgaacacagtggccctggccatgcagcactatgagcagacagcccccttcaactatgccatggacatcctgaacatggtgttcaccggcctcttcaccatcgagatggtgctgaagatcatcgccttcaagcccaagcactacttcacagatgcctggaacacctttgatgccctgattgtggtgggcagcatcgtggacattgctgtgacagaggtgaacaacggcggccacctgggggagagcagcgaggacagcagccgcatcagcatcaccttcttccgcctcttccgggtgatgaggctggtgaagctgctgagcaaaggagagggcatccgcaccctgctgtggaccttcatcaagagcttccaggccctgccctacgtggccctgctgattgccatgatcttcttcatctatgctgtgattggcatgcagatgtttgggaaggtggccctgcaggacggcacccagatcaacagaaacaacaacttccagaccttcccccaggccgtgctgctgctcttccgctgtgccactggagaggcctggcaggagatcatgctggccagcctgcccggcaacagatgtgaccctgagagtgactttggacctggagaggagttcacctgtggcagcaactttgccatcgcctacttcatctccttcttcatgctgtgtgccttcctgatcatcaacctgtttgtggccgtcatcatggacaactttgactacctgacccgggactggagcatcctgggcccccaccacctggatgagttcaagaggatctggagcgaatatgaccccggggccaagggccgcatcaagcacctggatgtggtggccctgctgcggcgcatccagccccccctgggctttgggaagctgtgcccccaccgggtggcctgcaagaggctggtggccatgaacatgcccctgaacagtgatggcaccgtgaccttcaatgccaccctgtttgccctggtgaggaccagcctgaagatcaagacagagggcaacctggagcaggccaaccaggagctgcgcatcgtcatcaagaagatctggaagaggatgaagcagaagctgctggatgaagtcatccccccaccagatgaggaggaggtgacagtgggcaagttctacgccaccttcctgatccaggactacttcaggaagttcagaagaaggaaggagaagggcctgctgggcaatgatgctgcccccagcaccagcagcgccctgcaggccggcctgcggagcctgcaggacctgggccctgagatgaggcaggccctgacctgtgacacagaggaggaggaggaggagggccaggagggcgtggaggaggaggatgagaaggacctggagaccaacaaggccaccatggtgtcccagcccagcgcccggcggggcagcggcatctctgtgtccctgcctgtgggggaccggctgcctgacagcctgagctttggccccagtgatgatgaccggggcacccccaccagcagccagcccagcgtgccccaggccggcagcaacacccacagaagaggcagcggggccctgatcttcaccatccctgaggagggcaacagccagcccaagggcaccaagggccagaacaagcaggatgaagatgaggaggtgcctgaccggctgagctacctggatgagcaggccggcaccccaccctgcagcgtgctgctgcccccccaccgggcccagcgctacatggatggccacctggtgccccggcggcggctgctgccccccaccccagctggcaggaagcccagcttcaccatccagtgcctgcagaggcagggcagctgtgaggacctgcccatccctggcacctaccaccggggcagaaattctggccccaacagagcccagggctcctgggccaccccaccccagaggggccgcctgctgtatgcccccctgctgctggtggaggagggcgccgccggggagggctacctgggccgcagcagcggccccctgcggaccttcacctgcctgcacgtgcccggcacccacagcgaccccagccacggcaagaggggcagcgctgacagcctggtggaggccgtgctgatcagcgagggcctgggcctgtttgcccgggaccccaggtttgtggccctggccaagcaggagattgctgatgcctgccgcctgaccctggatgagatggacaatgctgccagtgacctgctggcccagggcaccagcagcctgtacagtgatgaggagagcatcctgagcagatttgatgaggaggacctgggagatgagatggcctgtgtgcacgccctgtag

SEQ ID NO: 153639 - DNA, 5934 bp, Artificial Sequence
  derived and/or modified sequence
atgagcgagagcgagggcggcaaggacaccacccccgagcccagccctgccaacggcgcaggccccggccccgagtggggactgtgccccgggccccccgcagtggaaggagagagctctggtgcgagtggcctaggcactcctaaacgccgtaaccagcactcaaagcacaaaacagtcgctgtggcctcagcgcagcggtcaccgcgagccctgttttgcctgacactcgccaatcccttgagaagatcctgcatctccattgtcgagtggaaaccttttgatattctgatactcctgaccatctttgctaactgcgtcgccctgggggtctacattccattcccagaggacgattctaataccgcaaaccataacctggagcaggtcgagtatgttttcctggtaatttttaccgttgagactgtgttaaaaatcgtggcctatgggctcgtgctacatcctagtgcttacattaggaatgggtggaatctcctggacttcatcatcgtggtcgtggggctgttctccgtactccttgagcaagggcccggaagacccggcgatgccccacacaccggcggcaagcctggagggtttgacgtaaaggccttgagggcattcagggtgctcaggcccctgaggctggtctccggtgtgcctagcctgcacattgtcctcaatagcatcatgaaggctttggtccccctgctgcacattgccctgttggttttgttcgttataattatctacgccattataggacttgagcttttcctgggtcgaatgcacaagacgtgctactttctgggaagtgacatggaggcagaggaggacccgagtccgtgtgcctcaagcggcagcgggagagcctgtactctgaatcagacagaatgtcgggggcggtggcccggccctaatggtggaattacgaattttgacaattttttctttgctatgctcactgtttttcagtgcgtgacaatggaaggatggaccgacgtactgtattggatgcaggacgctatgggctacgaactgccgtgggtctatttcgtatctttagtgatcttcggatccttctttgtgctcaacctggtcctgggcgtcctgtctggcgaattcagtaaagaaagagaaaaagccaaggcaaggggtgactttcagaagcagagggagaagcagcaaatggaagaagacctccggggctatctggactggattacccaggctgaggaactggacatggaggatccatctgcggatgacaacctcgggtctatggccgaggagggccgcgctggacaccgtcctcagctggccgaactcactaatcggagacgcggccgtcttagatggttctcccattctacccgctctacacatagcactagttcacacgcctccttgcccgcatccgacacaggatctatgaccgagacccagggtgacgaggacgaagaggaaggcgcacttgcctcgtgcactcgctgtctcaacaaaatcatgaaaacacgggtctgtcgccgactgagacgtgctaacagggtgctccgggcacgctgccgaagggctgtgaagtccaacgcgtgctattgggcggtgctgctactggtttttctaaacaccctaactattgcttctgagcatcatggccaacctgtatggctcacacagatccaagagtatgcaaataaagtgctgctctgtttgttcacagtcgaaatgctgcttaaactttatggtttgggtccttcggcttatgtgtcctccttcttcaacaggttcgactgtttcgtggtgtgtggggggatcctggaaaccacgctcgtagaagtgggtgcaatgcagccccttggcatttccgtactgagatgcgtcaggctcctgcgcatattcaaagtaacgcgtcactgggccagcctctccaatctcgttgcatctctcctgaactctatgaaaagcatcgcctcactgctgttacttctctttctgttcataatcatcttttccttgctgggcatgcagctgtttggcggcaaatttaatttcgatcaaacacataccaagcgatccaccttcgatactttccctcaggctctgctaacagtctttcagatcctgaccggggaggactggaacgtggtaatgtatgatggtatcatggcgtatggagggccattttttccaggaatgctggtatgcatttacttcatcatcctgttcatttgtggaaattatatcctgctgaatgtgttcctcgccatcgccgtggacaacttggccagcggagatgccggcactgccaaagataaggggggtgaaaagtccaacgagaaagacctgccacaagaaaacgagggattggtgccaggtgtcgagaaagaagaagaggagggagctagaagggagggcgctgacatggaagaagaagaggaagaggaggaggaggaggaggaggaggaagaagaggagggcgctggaggggtggaattgctgcaggaggtcgtgccaaaagagaaggtggtgcctatccctgaaggcagcgcctttttctgtctcagtcagacaaatccccttcgcaaagggtgtcatacactgatccaccaccatgtgttcaccaacttaatactcgtattcattattctgtctagtgtgtctctcgcggctgaagaccctatcagggcacactcttttcggaaccacattctcggatactttgactatgcctttactagcatatttacggtggagatactgttgaagatgaccgtcttcggggctttcctgcataggggtagtttttgtagaagctggttcaatatgctggaccttctggttgtctcagtgagtctgatttcttttgggatacatagtagcgcaatcagtgtggtgaagattctgagggtgctgcgcgtgctccggccgctccgggccatcaatagagccaaggggcttaaacatgtagtgcagtgcgtgttcgtggctattagaactattgggaacataatgatcgtgacgacactgctgcagtttatgttcgcctgcataggggtgcagctgttcaagggtaagttttacacatgcaccgacgaggccaaacatactccacaggaatgtaagggtagctttttggtgtaccccgacggggatgtgagcagaccactggttcgtgaacggttgtgggtcaactctgatttcaacttcgacaacgtccttagcgcgatgatggctctgtttactgtaagcaccttcgaggggtggcccgcgctgctgtacaaggccatagatgcttacgctgaagaccacggtccaatttacaattatcgggtggaaattagcgtgttctttatcgtttacattattattatcgcgtttttcatgatgaatatctttgtcggatttgtaattataacctttcgggcccaaggtgagcaggagtaccaaaactgtgagcttgataagaaccagagacagtgcgtggagtacgcactgaaagcccagccactccgtcggtatattcccaaaaaccctcaccagtaccgcgtgtgggccactgttaactcagcagcattcgaatacttaatgtttctcttgatactgctgaatacagtagctctggcaatgcagcactatgagcaaaccgccccctttaactatgctatggatatcctcaatatggttttcactggtctgtttacgatagaaatggtgctgaagatcattgcctttaagcctaagcactattttaccgacgcatggaacacttttgacgctttgattgttgtggggagtatcgttgatattgctgtcactgaggtgaacaacgggggacatttaggagaatctagcgaggattcctcccggatttctatcacatttttccgcttgtttcgagtcatgagattggttaagctgttatcaaagggggaagggatacggacactgctgtggacatttatcaagtcatttcaggcccttccttacgtggcgttgctaattgccatgatattctttatctatgccgtgatcggtatgcagatgttcggtaaagtcgccctccaggacggcacccagatcaaccggaacaacaactttcaaacatttcctcaggccgtcttgctgctctttcggtgcgccaccggggaggcctggcaggagatcatgctggcctctttgcccggcaaccgttgcgaccctgagtccgactttggtccaggagaggagtttacgtgcggatccaatttcgccatagcctacttcataagcttcttcatgctgtgcgcttttttgatcataaatctctttgtcgccgtgatcatggataattttgattatctgactagggattggtctatattaggaccgcatcacctcgacgagttcaagcgcatttggagtgagtacgatccaggggcaaaggggcgtatcaagcatttggacgtggtggcgttattgcggagaatccagccccccctgggcttcggcaaactgtgcccgcaccgggtagcgtgtaagcgcctagtggccatgaatatgcctttaaactcagacggaacggtgacatttaatgctaccctgttcgccttggtgaggacctctttaaagatcaagacagaaggtaaccttgaacaagcaaaccaagagctgagaatcgtgataaaaaagatttggaagcgcatgaagcagaaactgctcgatgaagtcatcccacctccggacgaggaagaggttactgtggggaagttttatgcgactttcttaatccaagactactttcgtaaattccgtcgtagaaaagaaaaaggactgttagggaatgacgccgcgccaagtaccagttcagcactgcaggcagggcttcgatctctccaggacctcggaccggagatgaggcaggcgctcacctgtgacacggaggaggaggaggaggaaggtcaggaaggtgttgaggaagaagacgaaaaggacctcgaaaccaataaggccaccatggtgtcccagccttcagctcggcgaggctccggaattagcgtgagcctcccagtgggggatcgcttgcccgactccctcagctttggtccctccgacgatgacagaggcacaccaacatcatctcagccttctgtgccacaggctggatcaaacacccatcggaggggaagtggggctttgatattcaccattcctgaagaagggaatagccagcctaagggaacaaaaggccagaacaagcaggatgaagatgaggaggttcccgaccggctgagttatttagatgagcaagcgggcactcctccgtgctctgtcctgctccccccacatcgggcccagaggtacatggatggacacttggtgccgcggaggaggctcctacctcccactcctgctggtagaaaacccagtttcacaattcagtgtctgcagcgccagggctcttgtgaagacctgcccatcccagggacctaccaccgcggcaggaactccggtcccaatcgtgcacaaggatcctgggcaacaccgcctcagagagggcggctgttgtacgccccactcctgctggtggaagagggagctgccggggagggttacctgggtagatcttccgggccactaaggacatttacctgtctccacgtgccgggtactcactccgatccatcccatggcaagagaggctccgctgacagtctagtcgaagcggtcttaataagtgagggacttggattgtttgctagagacccgcgattcgtcgccctggctaaacaggagatagccgatgcatgccggctgacactggacgaaatggataacgccgccagtgacctactggctcagggcacaagcagcctctattcagacgaggaatcaatattaagtcgattcgatgaggaggacctgggagatgaaatggcctgtgtccatgctttgtag

SEQ ID NO: 153640 - DNA, 5933 bp, Artificial Sequence
  derived and/or modified sequence
atgtcagaaagcgaaggtggtaaagatacaacacctgagccttctcctgctaatggagccggaccaggccctgagtggggtctgtgccctgggcctcctgctgtggaaggtgagtctagcggtgctagtggtcttggtacacccaagcgccgaaaccagcactctaaacacaaaacagttgctgtggcctcagcccagagatccccaagagccctcttctgcctgacattagcaaaccccctgcggcgatcctgtatttcaattgttgagtggaaacctttcgatattctgatcctgcttactatttttgccaactgcgttgctcttggcgtctatattcccttccccgaagacgactcaaacacagccaatcataatctggagcaggtggaatatgtgttcctggtcatcttcacggtcgagacagtgctaaaaatagtggcttacggtctggtgctgcatccctcggcttatatccggaacggatggaatctgctggacttcataatcgtggtcgtcggtctattttccgtactccttgagcaaggccctggtcgtccgggtgacgcgcctcataccggcggaaaaccgggaggttttgatgtaaaagcccttagagccttcagggtgctgagaccgctgaggttggtgagtggggtgccctctctgcatattgtcctgaattccattatgaaagctctggtacccttgcttcacattgcactattggtcctgttcgtcataattatttacgccattatcggattggagctttttctgggtcgcatgcacaaaacttgttacttcctcggttccgacatggaagcggaagaggacccatcaccctgtgcgtcctctgggtcaggtagagcctgcaccctaaaccaaaccgaatgtcggggtcggtggccaggtccaaatggtggaatcaccaactttgacaatttttttttcgccatgctgaccgtcttccagtgtgttaccatggagggttggacagatgtgctctactggatgcaggatgcgatggggtacgagttgccatgggtgtacttcgtgtcgctagtgatctttggcagctttttcgttcttaacctagttttgggtgttctgtctggggagttttcaaaggaaagggagaaggccaaagcacgcggtgatttccagaaacaacgcgaaaaacagcagatggaagaagatctgcggggttatctggactggattacacaggcagaggagctggatatggaggacccatcagctgatgataatctgggcagcatggctgaagaggggcgtgccggacacagaccacaattggctgagttgaccaatcgaaggcggggaaggctcaggtggttctcccattccacgaggtcaacccattctacatcatctcacgccagtcttccggctagtgatactgggtccatgacagagacacagggggatgaggacgaagaggaaggcgctcttgcttcctgcaccagatgcctgaataaaatcatgaagacaagggtatgtagacgtctccgcagggcaaatcgcgtcctgcgcgcaaggtgccggagggccgtgaagtcaaatgcatgttattgggcagttctgctgctggttttcttaaatacattaaccatcgcgtcagaacaccacgggcaaccagtgtggctgacgcagatacaggagtatgccaataaggtgctgttgtgcctattcaccgtcgagatgctgcttaagctatacggtctggggccaagtgcctacgttagctccttcttcaaccggttcgattgctttgtcgtatgtggaggaatcctggaaacaacactggtagaagtcggcgctatgcagccgttgggcatctcagtgctgcgctgtgtgagacttttgagaatatttaaggtcacacgccattgggctagcctctcaaatcttgtcgcctcgctgctcaatagcatgaaatccattgcctccctactgcttctcctcttcttattcatcatcatcttcagcctgctggggatgcaattatttgggggtaaattcaatttcgaccagactcacaccaagcgaagcacattcgacaccttccctcaagccctgctgaccgtgttccagattctgacgggtgaggactggaacgttgtgatgtatgatggtattatggcatacgggggtccattctttccgggaatgttggtgtgtatttatttcattattttgtttatttgcgggaactacatcctgcttaatgtatttctggccatcgcagtggacaacctggccagcggagatgccggaaccgcaaaagataaggggggagagaaatctaacgagaaagaccttccccaggagaacgagggactggtcccgggagtggaaaaggaagaggaggagggggctcgcagggaaggggctgacatggaagaagaggaagaggaagaggaagaggaagaagaggaagaagaggaggagggcgcaggaggagttgaactgctgcaagaggtcgtccccaaggagaaggtggtacctatccctgaggggtcggcgttcttttgcctctcacagactaatccattgagaaaaggatgccacactcttattcatcaccacgtcttcacaaacctgatactggtcttcattatcttgtcgtcggtctcgctggcagctgaggaccctattcgagcgcactcctttaggaaccacatcctgggctattttgactatgccttcacgtctatcttcactgtcgagattttgcttaagatgaccgtgtttggagcttttctgcacagggggagcttctgccgaagttggtttaacatgctagatctcctggtggtaagcgtgagcctaatatcttttgggatacacagctcggccattagtgtcgtcaaaatcctccgcgtgctacgggttctcagaccccttagggccatcaaccgagccaaggggctcaagcacgttgtgcagtgtgtatttgtggctatcagaacaatcggaaacataatgattgtgactacacttctgcagtttatgtttgcttgcattggggtgcagctgtttaaaggtaagttctacacatgcacagacgaagctaagcataccccgcaggaatgcaagggaagtttcctggtgtaccccgatggtgatgtgagcagaccgctggtgcgagaacggctctgggtgaactcagatttcaattttgacaatgtcttgtcagccatgatggctctgttcaccgtgtcaacattcgaaggatggcccgcactgctgtacaaagccatcgacgcttatgcagaggaccacggaccaatctataactacagggtggagatctctgtgttcttcatcgtttacatcattatcatcgcctttttcatgatgaacattttcgtggggtttgttataatcaccttccgcgctcagggagaacaggagtaccaaaattgtgaactcgacaagaatcagcggcagtgcgtggaatacgcactgaaagcacagccgttgaggaggtatatcccaaagaatcctcatcagtatagagtgtgggcaaccgtaaatagcgccgcatttgaatacctcatgtttttactgatcctcctgaacaccgtcgcccttgcgatgcagcactatgaacagactgccccatttaactacgccatggacattcttaatatggtgttcactgggctgtttaccattgaaatggtgctgaaaatcatcgccttcaaaccaaagcactactttaccgatgcttggaacacctttgatgccctgatagtggtgggcagcatcgtggacatcgccgtgacagaggtgaacaatggaggacacctcggcgagagttcagaggactcctcccgcattagcattaccttctttagactgttccgagtgatgcgcttggtgaagctgctctcgaagggggaaggtattcgcacactgctctggacctttataaaaagctttcaggcgcttccctatgtcgctcttctgattgccatgatcttttttatttacgcagtgatcggcatgcagatgttcgggaaggttgctctgcaggacgggacccagatcaatcggaataacaatttccagaccttccctcaggccgtgttacttctgttcaggtgcgctactggggaggcctggcaggagataatgctggcaagcctcccaggaaatagatgtgatcctgagtctgatttcggccctggcgaagagttcacctgtggttctaacttcgccatagcctacttcatatcctttttcatgttatgtgcattcctgattatcaacttattcgttgcggtcatcatggataacttcgactacctcactagggattggtccattctgggcccacaccacctagatgaattcaaacgtatctggtccgagtacgacccaggggcaaaaggtcgaataaagcatctcgacgtcgtggcactactgcgccgaattcaacctccactcggcttcggaaaattgtgccctcacagagtcgcctgtaagcgcctcgttgcgatgaatatgcccctcaatagcgatggaacagttaccttcaacgctacactgttcgcccttgtgaggacgtcccttaagatcaaaactgaaggtaacctggagcaggcaaatcaggaactgcgaatagtgataaagaagatttggaagaggatgaaacaaaagctccttgatgaagtgatcccaccacctgatgaagaagaggtgacagtggggaaattttacgccaccttcctgatccaggattacttccggaaattccgccgtagaaaggaaaagggcctgctcggcaacgacgctgcacccagcaccagtagcgccctacaggccggactcagatctttgcaggacctgggtcctgagatgaggcaggccctcacttgtgacactgaggaagaggaagaggagggacaagagggcgtcgaggaagaagatgaaaaagacctggaaactaacaaggctactatggtcagccagccatcagctcgtaggggctctggcatttccgtgtcacttcctgttggggaccgcctacccgacagcctttcttttgggcctagcgacgacgacagaggcactcccacttccagtcagcccagcgtaccacaagccggttcaaacacacacagacggggttctggtgcattaatttttacaattccagaggagggcaattcccagcctaaaggaaccaaggggcagaacaagcaggacgaagatgaagaggtgcccgacagacttagctacttggatgagcaggccggaaccccgccatgttctgtgctgctgccaccacacagagcgcaacgttatatggatggccatctcgtgcccagaaggcgattgctcccaccgactccggctggccgaaagccctcattcactattcaatgtctccagcgtcagggttcttgcgaagatctgcccattcctggcacttaccacagggggagaaattccggcccaaaccgcgctcaagggtcctgggccacccctccgcagaggggccgattgctgtatgcgcctctgcttctcgtagaagaaggagccgcaggagagggttacctaggtagatcctctggcccattgaggaccttcacttgtctccatgtccccggtacacacagtgatccatcccacggaaagcgaggttccgccgactccttagtggaggcagtgctcatcagtgagggcctggggctatttgcacgggatcccagattcgtggcactagctaagcaggaaatcgcggatgcctgcaggctgacactcgacgagatggacaacgcagcaagtgatctactggcgcagggaacatcctccctgtattccgatgaagaatcgatcctcagtagattcgatgaagaggacctcggcgatgaaatggcttgcgtccatgccctcta

SEQ ID NO: 153641 - DNA, 6070 bp, Artificial Sequence
  derived and/or modified sequence
ctccaaagctgggggaagagaggggggttgtgtgcagatggcccttcaatctcgaaagaaagatgtcggaatctgaaggcgggaaagacaccaccccagagcccagtccagccaatggggcaggccctggtcccgaatgggggctgtgccccgggcccccagctgtggaaggtgaaagcagtggggcatcaggcctagggacccctaagcgaagaaaccagcacagcaagcacaagacagtggcagtggccagtgcccagcggtcacctcgggcactcttctgcctcaccctggccaatcctctgcgacggtcctgcatcagcatcgtggagtggaagcccttcgacatcctcatcctgctgaccatctttgccaactgcgtggccctgggagtttacatccccttccctgaggacgactccaacactgccaaccacaacctggagcaggtggagtacgtattcctggtgattttcactgtggagacggtgctcaagatcgtggcctacgggctggtgctccaccccagcgcctacatccgcaatggctggaacctactcgacttcatcatcgtcgtggtcgggctgttcagcgttctgctggagcagggccccggacggccaggcgacgccccgcacaccgggggaaagccaggaggcttcgatgtgaaggcattgagggcgtttcgggtgctgcggccactgaggctggtgtctggggtcccgagcctgcacatagtgctcaattccatcatgaaggctctggtgccgctgctgcacattgcactgctcgtgctcttcgtcatcatcatttatgccatcattgggctcgagctgttccttggacgaatgcacaagacgtgctacttcctgggatccgacatggaagcggaggaggacccatcgccctgtgcgtcttcgggatcagggcgtgcgtgcacgctgaaccagactgagtgccgcgggcgctggccagggcccaatggaggcatcaccaactttgacaacttcttcttcgccatgctgacagtcttccagtgtgtcaccatggaaggctggaccgatgtgctctactggatgcaagatgccatggggtatgaactgccctgggtgtactttgtgagccttgtcatctttgggtccttcttcgtcctcaaccttgtgcttggcgtcctgagtggggagttctccaaggagagagagaaagcgaaagctcgcggggacttccagaagcagcgggagaagcagcagatggaggaagacctgcggggctacctggactggatcactcaagccgaagagctggacatggaggacccctccgccgatgacaaccttggttctatggctgaagagggccgggcgggccatcggccacagctggccgagctgaccaataggaggcgtggacgtctgcgctggttcagtcattctactcgctccacacactccaccagcagccatgccagcctcccagccagtgacaccggttccatgacagagacccaaggcgatgaggatgaggaggagggggctctggccagctgtacacgctgcctaaacaagatcatgaaaaccagagtctgccgccgcctccgccgagccaaccgggtccttcgggcacgctgccgtcgggcagtgaagtccaatgcctgctactgggctgtgctgttgctcgtcttcctcaacacgttgaccatcgcctctgagcaccacgggcagcctgtgtggctcacccagatccaggagtatgccaacaaagtgttgctctgtctgttcacggtggagatgcttctcaaattgtacggtctgggcccctctgcctatgtgtcttccttcttcaaccgctttgactgctttgtggtctgtgggggcatcctagagaccaccttggtggaggtgggcgccatgcagcccttgggcatctcagtgctccgatgtgtgcgcctcctcaggatctttaaggtcaccagacactgggcttctctgagcaatctggtggcatccctgctcaattcaatgaaatccatcgcatccttgctgcttctcctcttcctcttcatcattatcttctccctgcttggcatgcagctgtttgggggcaagttcaactttgaccagacccacaccaagcgaagcacctttgacacgttcccccaggccctcctcactgtctttcagatcctgacaggtgaggactggaacgtggtcatgtatgatggtatcatggcatatggtggccccttcttcccaggaatgttggtgtgcatctatttcatcattctcttcatctgtggcaactacatcctgttgaacgtgtttcttgccattgctgtggacaacctggccagtggagatgcaggcactgccaaggacaagggcggggagaagagcaatgagaaggatctcccacaggagaatgaaggcctggtgcctggtgtggagaaagaggaagaggagggtgcaaggagggaaggagcagacatggaggaggaggaggaggaggaagaagaggaagaagaggaagaagaggaagagggtgcagggggtgtggaactcctgcaggaagttgtacccaaggagaaggtggtacccatccctgagggcagcgccttcttctgcctcagccaaaccaacccgctgaggaagggctgccacaccctcatccaccatcatgtcttcaccaatcttatcctggtgttcatcatcctcagcagtgtgtccctggccgctgaggaccccatccgagcccactccttccgcaaccatattctgggttacttcgattatgccttcacctccattttcactgtggagattctactaaagatgacagtgtttggggccttcctgcaccgcggctccttctgccgtagctggtttaatatgttggatctgctggtggtcagtgtgtccctcatctcctttggcatccactccagcgccatctcggtggtgaagattctgcgagtactccgagtactgcggcccctccgagccatcaacagggccaagggactcaagcatgtggtgcagtgtgtatttgtggccatccggaccatcggaaacatcatgattgtcaccacacttctgcaatttatgttcgcctgcatcggggtgcagctcttcaaggggaaattctacacctgcacggacgaggccaaacacacccctcaagaatgcaagggctccttcctggtatacccagatggagacgtgtcacggcccctggtccgggagcggctctgggtcaacagtgatttcaactttgacaatgtcctttcagccatgatggccctgttcactgtctccacctttgaaggctggcctgcactgctatacaaggccatcgatgcatatgcagaggaccatggccccatctataattaccgtgtggagatctcagtgttcttcattgtctacatcatcatcattgcgttcttcatgatgaacatcttcgtgggcttcgtcatcatcactttccgtgcccagggcgagcaggagtaccaaaactgtgagctggacaagaaccagcgtcaatgtgtggaatatgccctcaaggcccagccactccgccgttacatccccaagaacccgcatcagtatcgtgtgtgggccactgtgaactctgctgcctttgagtacctgatgttcctgctcatcctgctcaacacagttgccctagccatgcagcactatgagcagactgctcccttcaactatgccatggacatcctcaacatggtcttcactggcctcttcactattgagatggtgctcaaaatcatcgccttcaagcccaagcattacttcactgatgcctggaacacgtttgacgctcttattgtggtgggcagcatagtggatattgccgtcactgaagtcaataatggtggccaccttggcgagagctctgaggacagctcccgcatttccattaccttctttcgcctcttccgagttatgcggctggtcaagcttctcagtaagggtgaagggatccgcacattgctctggacattcatcaagtccttccaggccttgccctatgtggctcttctcatcgcaatgatattcttcatctatgccgtcattggcatgcagatgttcggcaaggtggctcttcaggatggcacacagataaaccgaaacaacaacttccagacctttccacaggctgtgctgcttctgttcaggtgtgccactggtgaggcatggcaggagataatgcttgccagccttcccggaaatcggtgtgatcctgagtctgacttcggccctggtgaagagtttacctgtggtagcaattttgccatcgcctatttcatcagcttcttcatgctctgtgccttcctgatcataaatctctttgtggctgtgatcatggacaactttgattatctcaccagagattggtccatcctgggcccccatcaccttgatgaattcaagaggatctggtctgaatatgaccctggggccaagggccgcatcaaacacttggatgtggttgccctgctgagacgtatccagccccctctgggatttgggaagctgtgcccacaccgagtggcctgcaagagacttgtggcaatgaacatgcccctcaactcagatgggacggtgacattcaacgccacactctttgccctggtccggacatccctgaagatcaaaacagaagggaacctggagcaagccaaccaggagctgcggattgtcatcaaaaagatctggaagcggatgaaacagaagctgctagatgaggtcatccccccaccagacgaggaggaggtcaccgtgggcaaattctacgccacatttctgatccaggactatttccgcaaattccggcggaggaaagaaaaagggctactaggcaacgacgccgcccctagcacctcttccgcccttcaggctggtctgcggagcctgcaggacttgggtcctgagatgcggcaggccctcacctgtgacacagaggaggaggaagaagaggggcaggagggagtggaggaggaagatgaaaaggacttggaaactaacaaagccacgatggtctcccagccctcagctcgccggggctccgggatttctgtgtctctgcctgtcggggacagacttccagattcactctcctttgggcccagtgatgatgacagggggactcccacctccagtcagcccagtgtgccccaggctggatccaacacccacaggagaggctctggggctctcattttcaccatcccagaagaaggaaattctcagcccaagggaaccaaagggcaaaacaagcaagatgaggatgaggaagtccctgatcggctttcctacctagatgagcaggcagggactcccccgtgctcagtccttttgccacctcacagagctcagagatacatggatgggcacctggtaccacgccgccgtctgctgccccccacacctgcaggtcggaagccctccttcaccatccagtgtctgcagcgccagggcagttgtgaggatttacccatcccaggcacctatcatcgtgggcgaaattcagggcccaatagggctcagggttcctgggcaacaccacctcagcggggtcggctcctgtatgccccgctgttgttggtggaagagggcgcagcgggggaggggtacctcggcagatccagtggcccactgcgcaccttcacctgtctgcacgtgcctggaacccactcggaccccagccatgggaagaggggcagtgccgacagcttggtggaggctgtgcttatctcagagggtctgggcctctttgctcgagacccacgtttcgtggccctggccaagcaggagattgcagatgcgtgtcgcctgacgctggatgagatggacaatgctgccagtgacctgctggcacagggaaccagctctctctatagcgacgaggagtccatcctctcccgcttcgatgaggaggacttgggagacgagatggcctgcgtccacgccctctgaattcccacccctccccaactgctcaataaacctcctgccctcccctccccagcaggaggcaggcatggaccaca

SEQ ID NO: 153642 - DNA, 5934 bp, Artificial Sequence
  derived and/or modified sequence
atgagcgagagcgagggcggcaaggacaccacccccgagcccagccccgccaacggcgccggccccggccccgagtggggcctgtgccccggcccccccgccgtggagggcgagagcagcggcgccagcggcctgggcacccccaagagaagaaaccagcacagcaagcacaagaccgtggccgtggccagcgcccagagaagccccagagccctgttctgcctgaccctggccaaccccctgagaagaagctgcatcagcatcgtggagtggaagcccttcgacatcctgatcctgctgaccatcttcgccaactgcgtggccctgggcgtgtacatccccttccccgaggacgacagcaacaccgccaaccacaacctggagcaggtggagtacgtgttcctggtgatcttcaccgtggagaccgtgctgaagatcgtggcctacggcctggtgctgcaccccagcgcctacatcagaaacggctggaacctgctggacttcatcatcgtggtggtgggcctgttcagcgtgctgctggagcagggccccggcagacccggcgacgccccccacaccggcggcaagcccggcggcttcgacgtgaaggccctgagagccttcagagtgctgagacccctgagactggtgagcggcgtgcccagcctgcacatcgtgctgaacagcatcatgaaggccctggtgcccctgctgcacatcgccctgctggtgctgttcgtgatcatcatctacgccatcatcggcctggagctgttcctgggcagaatgcacaagacctgctacttcctgggcagcgacatggaggccgaggaggaccccagcccctgcgccagcagcggcagcggcagagcctgcaccctgaaccagaccgagtgcagaggcagatggcccggccccaacggcggcatcaccaacttcgacaacttcttcttcgccatgctgaccgtgttccagtgcgtgaccatggagggctggaccgacgtgctgtactggatgcaggacgccatgggctacgagctgccctgggtgtacttcgtgagcctggtgatcttcggcagcttcttcgtgctgaacctggtgctgggcgtgctgagcggcgagttcagcaaggagagagagaaggccaaggccagaggcgacttccagaagcagagagagaagcagcagatggaggaggacctgagaggctacctggactggatcacccaggccgaggagctggacatggaggaccccagcgccgacgacaacctgggcagcatggccgaggagggcagagccggccacagaccccagctggccgagctgaccaacagaagaagaggcagactgagatggttcagccacagcaccagaagcacccacagcaccagcagccacgccagcctgcccgccagcgacaccggcagcatgaccgagacccagggcgacgaggacgaggaggagggcgccctggccagctgcaccagatgcctgaacaagatcatgaagaccagagtgtgcagaagactgagaagagccaacagagtgctgagagccagatgcagaagagccgtgaagagcaacgcctgctactgggccgtgctgctgctggtgttcctgaacaccctgaccatcgccagcgagcaccacggccagcccgtgtggctgacccagatccaggagtacgccaacaaggtgctgctgtgcctgttcaccgtggagatgctgctgaagctgtacggcctgggccccagcgcctacgtgagcagcttcttcaacagattcgactgcttcgtggtgtgcggcggcatcctggagaccaccctggtggaggtgggcgccatgcagcccctgggcatcagcgtgctgagatgcgtgagactgctgagaatcttcaaggtgaccagacactgggccagcctgagcaacctggtggccagcctgctgaacagcatgaagagcatcgccagcctgctgctgctgctgttcctgttcatcatcatcttcagcctgctgggcatgcagctgttcggcggcaagttcaacttcgaccagacccacaccaagagaagcaccttcgacaccttcccccaggccctgctgaccgtgttccagatcctgaccggcgaggactggaacgtggtgatgtacgacggcatcatggcctacggcggccccttcttccccggcatgctggtgtgcatctacttcatcatcctgttcatctgcggcaactacatcctgctgaacgtgttcctggccatcgccgtggacaacctggccagcggcgacgccggcaccgccaaggacaagggcggcgagaagagcaacgagaaggacctgccccaggagaacgagggcctggtgcccggcgtggagaaggaggaggaggagggcgccagaagagagggcgccgacatggaggaggaggaggaggaggaggaggaggaggaggaggaggaggaggaggagggcgccggcggcgtggagctgctgcaggaggtggtgcccaaggagaaggtggtgcccatccccgagggcagcgccttcttctgcctgagccagaccaaccccctgagaaagggctgccacaccctgatccaccaccacgtgttcaccaacctgatcctggtgttcatcatcctgagcagcgtgagcctggccgccgaggaccccatcagagcccacagcttcagaaaccacatcctgggctacttcgactacgccttcaccagcatcttcaccgtggagatcctgctgaagatgaccgtgttcggcgccttcctgcacagaggcagcttctgcagaagctggttcaacatgctggacctgctggtggtgagcgtgagcctgatcagcttcggcatccacagcagcgccatcagcgtggtgaagatcctgagagtgctgagagtgctgagacccctgagagccatcaacagagccaagggcctgaagcacgtggtgcagtgcgtgttcgtggccatcagaaccatcggcaacatcatgatcgtgaccaccctgctgcagttcatgttcgcctgcatcggcgtgcagctgttcaagggcaagttctacacctgcaccgacgaggccaagcacaccccccaggagtgcaagggcagcttcctggtgtaccccgacggcgacgtgagcagacccctggtgagagagagactgtgggtgaacagcgacttcaacttcgacaacgtgctgagcgccatgatggccctgttcaccgtgagcaccttcgagggctggcccgccctgctgtacaaggccatcgacgcctacgccgaggaccacggccccatctacaactacagagtggagatcagcgtgttcttcatcgtgtacatcatcatcatcgccttcttcatgatgaacatcttcgtgggcttcgtgatcatcaccttcagagcccagggcgagcaggagtaccagaactgcgagctggacaagaaccagagacagtgcgtggagtacgccctgaaggcccagcccctgagaagatacatccccaagaacccccaccagtacagagtgtgggccaccgtgaacagcgccgccttcgagtacctgatgttcctgctgatcctgctgaacaccgtggccctggccatgcagcactacgagcagaccgcccccttcaactacgccatggacatcctgaacatggtgttcaccggcctgttcaccatcgagatggtgctgaagatcatcgccttcaagcccaagcactacttcaccgacgcctggaacaccttcgacgccctgatcgtggtgggcagcatcgtggacatcgccgtgaccgaggtgaacaacggcggccacctgggcgagagcagcgaggacagcagcagaatcagcatcaccttcttcagactgttcagagtgatgagactggtgaagctgctgagcaagggcgagggcatcagaaccctgctgtggaccttcatcaagagcttccaggccctgccctacgtggccctgctgatcgccatgatcttcttcatctacgccgtgatcggcatgcagatgttcggcaaggtggccctgcaggacggcacccagatcaacagaaacaacaacttccagaccttcccccaggccgtgctgctgctgttcagatgcgccaccggcgaggcctggcaggagatcatgctggccagcctgcccggcaacagatgcgaccccgagagcgacttcggccccggcgaggagttcacctgcggcagcaacttcgccatcgcctacttcatcagcttcttcatgctgtgcgccttcctgatcatcaacctgttcgtggccgtgatcatggacaacttcgactacctgaccagagactggagcatcctgggcccccaccacctggacgagttcaagagaatctggagcgagtacgaccccggcgccaagggcagaatcaagcacctggacgtggtggccctgctgagaagaatccagccccccctgggcttcggcaagctgtgcccccacagagtggcctgcaagagactggtggccatgaacatgcccctgaacagcgacggcaccgtgaccttcaacgccaccctgttcgccctggtgagaaccagcctgaagatcaagaccgagggcaacctggagcaggccaaccaggagctgagaatcgtgatcaagaagatctggaagagaatgaagcagaagctgctggacgaggtgatccccccccccgacgaggaggaggtgaccgtgggcaagttctacgccaccttcctgatccaggactacttcagaaagttcagaagaagaaaggagaagggcctgctgggcaacgacgccgcccccagcaccagcagcgccctgcaggccggcctgagaagcctgcaggacctgggccccgagatgagacaggccctgacctgcgacaccgaggaggaggaggaggagggccaggagggcgtggaggaggaggacgagaaggacctggagaccaacaaggccaccatggtgagccagcccagcgccagaagaggcagcggcatcagcgtgagcctgcccgtgggcgacagactgcccgacagcctgagcttcggccccagcgacgacgacagaggcacccccaccagcagccagcccagcgtgccccaggccggcagcaacacccacagaagaggcagcggcgccctgatcttcaccatccccgaggagggcaacagccagcccaagggcaccaagggccagaacaagcaggacgaggacgaggaggtgcccgacagactgagctacctggacgagcaggccggcacccccccctgcagcgtgctgctgcccccccacagagcccagagatacatggacggccacctggtgcccagaagaagactgctgccccccacccccgccggcagaaagcccagcttcaccatccagtgcctgcagagacagggcagctgcgaggacctgcccatccccggcacctaccacagaggcagaaacagcggccccaacagagcccagggcagctgggccacccccccccagagaggcagactgctgtacgcccccctgctgctggtggaggagggcgccgccggcgagggctacctgggcagaagcagcggccccctgagaaccttcacctgcctgcacgtgcccggcacccacagcgaccccagccacggcaagagaggcagcgccgacagcctggtggaggccgtgctgatcagcgagggcctgggcctgttcgccagagaccccagattcgtggccctggccaagcaggagatcgccgacgcctgcagactgaccctggacgagatggacaacgccgccagcgacctgctggcccagggcaccagcagcctgtacagcgacgaggagagcatcctgagcagattcgacgaggaggacctgggcgacgagatggcctgcgtgcacgccctgtag

SEQ ID NO: 153643 - protein, 149 aa, Artificial Sequence
  derived and/or modified sequence
MADQLTEEQVTEFKEAFSLFDKDGDGCITTRELGTVMRSLGQNPTEAELRDMMSEIDRDGNGTVDFPEFLGMMARKMKDTDNEEEIREAFRVFDKDGNGFVSAAELRHVMTRLGEKLSDEEVDEMIRAADTDGDGQVNYEEFVRVLVSK

SEQ ID NO: 153644 - DNA, 450 bp, Artificial Sequence
  derived and/or modified sequence
atggctgaccagctcactgaggagcaggtcactgagtttaaagaggccttttccctttttgataaggacggcgacggatgtatcaccacacgagagctggggacagtcatgagaagtctgggacagaatccaaccgaagccgagctgagagacatgatgtccgagattgacagagatggaaacggaacagtggatttccctgagttcctgggtatgatggcgcgtaagatgaaggacaccgataatgaagaggagatcagagaggcctttcgggtctttgacaaagatggcaacggcttcgtgtccgcagccgaattgcggcacgtgatgactcgtctgggggagaagttgtccgatgaagaagtggatgagatgattcgggccgcagataccgatggcgatggtcaggtgaattatgaagaattcgtgcgtgtgctggttagcaagtag

SEQ ID NO: 153645 - DNA, 450 bp, Artificial Sequence
  derived and/or modified sequence
atggctgaccagctgacagaggagcaggtgacagagttcaaggaggccttcagcctgtttgacaaggatggagatggctgcatcaccacccgggagctgggcaccgtgatgaggagcctgggccagaaccccacagaagctgagctgcgggacatgatgtctgaaattgacagagatggaaatggaacagtggacttccctgagttcctgggcatgatggccaggaagatgaaggacacagacaatgaggaggagatccgggaggccttccgggtgtttgacaaggatggaaatggatttgtgtctgctgctgagctgcggcacgtgatgacccggctgggggagaagctgagtgatgaggaggtggatgagatgatccgggctgctgacacagatggagatggccaggtgaactatgaggagtttgtgcgggtgctggtgtccaagtag

SEQ ID NO: 153646 - DNA, 450 bp, Artificial Sequence
  derived and/or modified sequence
atggccgaccagctgaccgaggagcaggtgaccgagttcaaggaggctttttccctttttgacaaagatggagatggctgcattaccactcgggaactgggaaccgtaatgcggagcctaggacagaaccccacagaggccgagctgcgggatatgatgagtgaaatcgaccgtgatggaaatggtaccgtggattttccggagtttttaggcatgatggccagaaagatgaaggacactgataacgaggaagagatccgggaggccttccgtgtgttcgacaaggatggaaacggattcgtatcagccgcggagctgcggcatgttatgacacggcttggtgagaaattaagtgacgaagaagtcgacgagatgattagggctgctgataccgacggcgacggacaggttaactacgaggaatttgtgcgggttctggtgagtaaatag

SEQ ID NO: 153647 - DNA, 450 bp, Artificial Sequence
  derived and/or modified sequence
atggccgaccagctcaccgaagaacaggtgacagaatttaaagaggctttcagcctgttcgacaaggacggcgatggatgcattaccaccagagagcttgggacagtgatgcgtagcttaggacagaatcccactgaggccgagctgcgagatatgatgagcgaaatcgatcgtgacggcaatgggacagtggatttccccgaattcttggggatgatggcccgtaagatgaaagatacagataacgaggaggagattagggaagctttcagagtgttcgacaaagacggtaatggattcgtttcggctgccgaactgcgacatgtcatgacaaggctgggagaaaaactctccgatgaggaggtggacgaaatgatcagagcagctgacactgatggggatggccaggttaattatgaagaattcgtgcgcgtgctggtgtctaagtag

SEQ ID NO: 153648 - DNA, 1302 bp, Artificial Sequence
  derived and/or modified sequence
gagacagcccgccggccgcccggatctccacctgccaccccagagctgggacagcagccgggctgcggcactgggagggagaccccacagtggcctcttctgccacccacgcccccacccctggcatggccgaccagctgactgaggagcaggtcacagaattcaaggaggccttctccctgtttgacaaggatggggacggctgcatcaccacccgcgagctgggcacggtcatgcggtccctgggccagaaccccacggaggccgagctgcgggacatgatgagtgagatcgaccgggacggcaacggcaccgtggacttccccgagttcctgggcatgatggccaggaagatgaaggacacggacaacgaggaggagatccgcgaggccttccgcgtgttcgacaaggacggcaacggcttcgtcagcgccgccgagctgcgacacgtcatgacccggctgggggagaagctgagtgacgaggaggtggacgagatgatccgggccgcggacacggacggagacggacaggtgaactacgaggagtttgtccgtgtgctggtgtccaagtgaggccggcgcccaccatgctcctgggcgcccacgcggcccacagggcaagaacccggggcctcccgcctcctcccccatccccctgcctcccctgggcactgtggcttcctcctgcgcctggttgattcagcccacctctctgcatcccgcttcccgcgtctcttctctgcactcctgccgaccttcccacctgctcgtctgaatgacacggaacgctcccactgcaggcaaaccgtgacgccctccccactcgggagaagcagagctgaccttaggaccgagcaccagggcaggttgcgctgactctgcggccctccaggacggacaccgggtgaccccttagggcacccaggcaagatccctaagaggcacccaatgcccaggccaggggggctgcagccctcagcccccgccaggattcccgcaggctcctggactggaagctccctccgcggtcggattctggagggtgggaggcatcttggcctgcagtaagcggtgctgacggggactctggccacagaggtcaggcctcctgaaaacagcactgccttccgcgctgccccagcttgccccattccttgtccgccaacccaccgtgattcatcttctgaagctgggagtgaaactgggtcagctgtaacctgttcctattcatctggaaggagggaggcttggatgagcaggggatgagagctgcagggaaataaatgagatattcgtcctt

SEQ ID NO: 153649 - DNA, 450 bp, Artificial Sequence
  derived and/or modified sequence
atggccgaccagctgaccgaggagcaggtgaccgagttcaaggaggccttcagcctgttcgacaaggacggcgacggctgcatcaccaccagagagctgggcaccgtgatgagaagcctgggccagaaccccaccgaggccgagctgagagacatgatgagcgagatcgacagagacggcaacggcaccgtggacttccccgagttcctgggcatgatggccagaaagatgaaggacaccgacaacgaggaggagatcagagaggccttcagagtgttcgacaaggacggcaacggcttcgtgagcgccgccgagctgagacacgtgatgaccagactgggcgagaagctgagcgacgaggaggtggacgagatgatcagagccgccgacaccgacggcgacggccaggtgaactacgaggagttcgtgagagtgctggtgagcaagtag

SEQ ID NO: 153650 - protein, 653 aa, Artificial Sequence
  derived and/or modified sequence
MPASRLRDRAASSASGSTCGSMSQTHPVLESGLLASAGCSAPRGPRKGGPAPVDRKAKASAMPDSPAEVKTQPRSTPPSMPPPPPAASQGATRPPSFTPHTHREDGPATLPHGRFHGCLKWSMVCLLMNGSSHSPTAINGAPCTPNGFSNGPATSSTASLSTQHLPPACGARQLSKLKRFLTTLQQFGSDISPEIGERVRTLVLGLVNSTLTIEEFHSKLQEATNFPLRPFVIPFLKANLPLLQRELLHCARLAKQTPAQYLAQHEQLLLDASASSPIDSSELLLEVNENGKRRTPDRTKENGSDRDPLHPEHLSKRPCTLNPAQRYSPSNGPPQPTPPPHYRLEDIAMAHHFRDAYRHPDPRELRERHRPLVVPGSRQEEVIDHKLTEREWAEEWKHLNNLLNCIMDMVEKTRRSLTVLRRCQEADREELNHWARRYSDAEDTKKGPAPAAARPRSSSAGPEGPQLDVPREFLPRTLTGYVPEDIWRKAEEAVNEVKRQAMSELQKAVSDAERKAHELITTERAKMERALAEAKRQASEDALTVINQQEDSSESCWNCGRKASETCSGCNAARYCGSFCQHRDWEKHHHVCGQSLQGPTAVVADPVPGPPEAAHSLGPSLPVGAASPSEAGSAGPSRPGSPSPPGPLDTVPR

SEQ ID NO: 153651 - DNA, 4265 bp, Artificial Sequence
  derived and/or modified sequence
agggcagaggacacccagttggtggccgggagggcctcggctttccagggacagaggcccaactccaggacgccccagctggcccagcccctcctctttccctcaaggctgcaggaggtcgggaaaggcagtcctggtagaggcctgtcctgggctccaggttggcccctgagggtggccctcctcatgccggcttcaagactgagggacagggcagccagttcagcctcgggatccacctgtggctccatgtcccagacgcaccctgtgctggagagcggcctcctggcatctgccggctgctccgcaccccggggtcccaggaagggcggcccagccccagtggacaggaaagctaaggcctcagcgatgccggactccccagcggaggtgaagacgcagccccggtccacaccccccagcatgccgcccccaccgcctgccgcatcccagggggccacacgccccccctccttcacgccacacacacatcgagaggacgggcctgcgacgctgccccacggccgttttcatggctgcttaaaatggtctatggtctgtctcttgatgaacggcagcagccactcaccaacagccatcaatggtgcaccgtgcacacccaacggcttcagcaatggcccggccacctcgtccacagcctccttgtccacacagcacctgcccccagcctgcggggcccggcagctcagcaagctcaagcgcttcctcaccacactgcagcagtttggcagcgacatctccccagagattggggagcgcgtgcgcacactggtgctgggcctggtgaactcgacattgacgatcgaggagtttcattccaagcttcaggaggccaccaacttccctctgcggccgtttgtcattcccttcctgaaggcaaacctgcccttgctgcagcgggagctcctgcactgtgcacgcctggccaagcagacgcccgcccagtacttggcccagcatgagcagctcctgctggacgccagcgcctcctcccccatcgactcctcagagctgctactggaagtcaacgagaacggcaagaggaggacgcccgacaggaccaaagagaacgggtcagaccgcgacccgctgcaccccgagcacctcagcaaacggccatgcaccctgaaccctgcccagcgctacagccccagcaacgggccaccgcagcccacaccgccgccgcactaccgcctggaggacatagccatggcccaccacttccgagatgcctaccgccacccagacccccgggagctacgagagcgccatcggccgcttgtggtgcctgggtcccggcaggaagaagtgatcgaccacaagctcacagagcgtgagtgggcagaagagtggaagcacctcaacaacctcctgaactgcatcatggacatggtggagaagacgcggcgctcgctcacggtgctgcgcaggtgccaggaggccgaccgcgaggagctcaaccactgggcgcggcgctacagcgacgccgaggacacaaagaagggccccgctcccgccgcggcccggccccgcagcagctccgccggtcccgaagggcctcagctagacgtgcctcgcgagttcctgccgaggaccctcaccggctacgtgcctgaggacatctggaggaaggctgaagaggccgtgaatgaggtgaagcggcaggccatgtcggagctgcagaaagccgtgtcggacgcggagcgcaaagcgcacgagctcatcaccacggagcgtgccaagatggagcgggccctggccgaggcgaagcggcaggcctccgaggacgccctgacggtcatcaaccagcaggaggactccagcgagagctgctggaactgcgggcggaaagccagtgagacgtgcagcggctgcaacgcggcacgctactgcgggtccttctgccagcatcgggactgggagaagcatcaccacgtgtgtggccagagcctgcagggccccacagccgtggtggccgacccggtgcctggaccgcccgaagccgcccacagcctgggcccctccctgcctgtgggtgctgccagccccagcgaagccggctctgcggggccttctcgccccggctcccccagcccacctggcccactggacaccgtgccccgctgaccccactggcccctggcctgccggacacagcaccgtgccaaccccacccagctccaggcccaccggatgctgtgcctggcctccgatgcctggcctgccagacactgcgccccgcctgacctgggggagccgaccaattagtcactgctgctactgcccctctccgaaagaagacacagaaccaacaaaaccgcattcagtgcacctgcctcagctacctaatgattccgcgcggagacctcctgacaacgtctcttcaagcatcctcagaagcctcgactgagctttagacagcagagcagatgccgcaggcgcggcggctctgcccacctctcttttcctctctgtctgtctctccccctctgtcttctctatcctctctctctctatgactatcacacactttctcttcaatgaaaaaatcgaattggtggcttatattttcagcaaagaattttggggggttttgtgtgttggcaaaagagctactcagaaatggacaaagaaaacgggggggttctccccctcctgattaaaaagggagaaagaaaactgcgattttatagctggagatctgaacccagctgtgcccctcccccaggggcgtgaggctgatcagcgaagacgggaggaaagatttcgatttctgactcaagatgcatttttggtttcagatttttttttcctgtaatgttaaactctttggctttaagtaaaaatccaaaaagtttttttaaaaaagcaaaggaagcatacttgtgaactaccttgctagctagccagccaaggataccggacacacctctgctccaaaggaaatccaaaaaagcaaacacaagaaatcaaaatccaaaatttgtttgtcactgccaaagtatttttttcactgtttcacttgctcttgggtttgtttggatgtgggtctttttctcttctgttctgattttgtttgtgggtgtcgggatatttgggtgcagagggtttgtgcccagttagaagcgacttttgttctcttctgcgtaggcgttggtgcgtccgccgcgtgtgcgtggtccgtgtgccgttgctccggcctgcgtctccatatgtgtaggaaaggacacgccgtctgtcctcacgccccctgtgacttttcatatttccgttttccacttgtggaaaaaaagtgctaaagttttcttcccagagagagcataattccgaaacaaaactgtgacaatcttttgggttgattctcgactgcttttcgagcatgcggagccagcaggcctccctgaaacactgcttctcggccagcccgtcctcctctacctctctcctctccgcgccctccgacctctctcggccccctcaccccagctccgacctctctcagccccatcgccccaactccaacctctcggccccatcgccccaccgcagctactcccctttcttccaaacttttgcagaaaaaacaaaaaaactacaaacaaaagcagccctctgcctcctccccagggaagaccctgaccgtgtacatagccctggtgctcctgcccagccacccctcagatgcgttcgcctctggccctggggtgtgtctcggtgacgttttctatcagacgtgctccctcccatcctccagccctgcccaccctccctccactcctctcaactgcctcagcgatttcaagaaggaaataaagggataaagaaattcatgcttgcaccgagtacaaggacagacagcaggcacggcccgcagcctggcatctgtgcgtgtggcgtggcccgtggcttggcatctgtgtgcgtggtgtggcccgtggcctggcatctgtgtgcgtggcgtggcccgtggcctggcatctgtgtgtgtggcgtggcccgtggcctggcatctgtgcgcgtggcgtggcccgtggcctggcatctgtgtgcgtggctatcaggagttctaggaactcagtgcaatacgggagtgacccagctactgaaccagccacgaacagcccgccagaggcctgaagctgagcgtgtacgttaatgtgaatgtatatagtctttgcagaggtccaaatgatattcatgatggtaataaacgagatgtttgccaaataaaaaacagaaaccgc

SEQ ID NO: 153652 - DNA, 1962 bp, Artificial Sequence
  derived and/or modified sequence
atgcctgcctctcggctgcgagatagagctgcttcctctgcttccgggagcacatgcgggagcatgtctcagactcaccctgtgctcgagtctggcttgttagcatcggcaggctgctccgccccaaggggtccccggaaaggaggccctgcacccgtcgacaggaaagcaaaagcatctgcgatgcccgactctccagctgaggtgaaaacacagccccgaagcaccccaccatccatgccccctcccccccccgcggcgtcccaaggcgctacacgacctccctccttcacccctcacacacaccgggaggatgggccggccactctcccacatggtcggttccatggatgtttgaaatggtcaatggtgtgtctgctcatgaacggaagtagccattctcccacagctataaatggtgccccttgcacgccaaacggcttttctaacggccctgcaacatctagcaccgcatccctaagtactcagcacctgccgcctgcgtgcggtgccagacaactgtcaaaactgaagcgctttctgacaacccttcagcagtttgggagtgacatttcacctgaaataggggaacgtgtccggacgctcgtcctgggccttgtcaatagcaccttaacaattgaggaatttcacagcaagctccaggaggcaaccaatttcccgcttcgcccatttgtcatccccttcctaaaggccaatctgcccttgcttcagagggaactgcttcactgcgcgcgcctggccaagcagacaccagctcaatacctggcccagcacgaacagctgttgttggacgcctccgcctcctctcccatcgacagcagtgagttgctccttgaggttaacgaaaatggaaagagacgcacgcccgacagaacaaaagaaaatgggagcgacagagaccctttgcaccccgagcacttgtctaagagaccttgtacgctgaacccagcacagcggtactccccctctaatggaccaccccagccgaccccccccccccactaccggctcgaggatattgctatggcacaccacttccgcgacgcatatcgacaccctgacccgcgggaactgcgtgagcgtcaccgaccgctagtggtgcctggatctcgccaggaggaggttatcgatcacaaactgaccgaacgcgagtgggctgaggagtggaagcatctgaataacttattgaactgcataatggatatggtggaaaagacacgccgaagcttgacagtgctccgccgctgtcaggaggcagacagagaagaactaaaccattgggcccgccgatatagcgatgctgaagacacaaaaaaaggacctgcccccgcagccgcccggcctaggtcatcctcagcaggcccagaaggcccacaactggacgtgcctagagaattcctgccccgaaccctgacaggctatgtgcccgaggacatctggcggaaggccgaagaagccgttaatgaggtgaaaaggcaggcaatgtctgagcttcagaaagctgtgtctgatgcagagcggaaagcccacgagctgatcacaacggaacgcgccaagatggaacgggccctggctgaggccaaacgccaggcttcagaagatgcactgacggtgattaatcagcaggaggatagcagcgagtcgtgttggaactgtggacggaaagcaagtgagacctgttccggctgcaacgccgccaggtactgtggttctttttgtcagcaccgggactgggagaagcaccatcacgtgtgcggccaatccctgcagggcccaaccgcagtcgtggcagacccagtcccagggccgccggaagcagctcactctctggggccttctctgccagtgggagctgccagtccatctgaggccggctccgctgggccttctcggccggggagtccctccccgccggggccccttgacacagtgcctcggtag

SEQ ID NO: 153653 - DNA, 1962 bp, Artificial Sequence
  derived and/or modified sequence
atgcctgccagccggctgcgggaccgggccgccagcagcgccagcggcagcacctgtggctccatgagccagacccaccctgtgctggagagcggcctgctggccagcgctggctgcagcgccccccggggccccaggaaaggaggccctgcccctgtggacaggaaggccaaggccagcgccatgccagacagccctgctgaggtgaagacccagcccaggagcaccccacccagcatgcctcctcctcctcctgctgccagccagggcgccacccggccccccagcttcaccccccacacccaccgggaggatggccctgccaccctgccccacggccgcttccacggctgcctgaagtggagcatggtgtgcctgctgatgaatggcagcagccacagccccacagccatcaatggagccccctgcacccccaacggcttcagcaatggacctgccaccagcagcacagccagcctgagcacccagcacctgcccccagcctgtggggcccggcagctgagcaagctgaagcgcttcctgaccaccctgcagcagtttggaagtgacatcagccctgagattggagagcgggtgaggaccctggtgctgggcctggtgaacagcaccctgaccatcgaggagttccacagcaagctgcaggaggccaccaacttccccctgcggccctttgtgatccccttcctgaaggccaacctgcccctgctgcagcgggagctgctgcactgtgcccggctggccaagcagaccccagcccagtacctggcccagcacgagcagctgctgctggatgccagcgccagcagccccatcgacagcagcgagctgctgctggaggtgaatgaaaatggcaagaggaggaccccagacaggaccaaggaaaatggaagtgaccgggaccccctgcaccctgagcacctgagcaagaggccctgcaccctgaacccagcccagcgctacagccccagcaatggaccaccccagcccaccccaccaccccactaccgcctggaggacatcgccatggcccaccacttcagagatgcctaccgccacccagacccccgggagctgcgggagcggcaccggcccctggtggtgcccggcagccggcaggaggaggtgattgaccacaagctgacagagcgggagtgggccgaggagtggaagcacctgaacaacctgctgaactgcatcatggacatggtggagaagacccggcgcagcctgactgtgctgcggcgctgccaggaggccgaccgggaggagctgaaccactgggcccggcgctacagtgatgctgaggacaccaagaagggccctgccccagctgctgcccggcccaggagcagcagcgctggccctgagggcccccagctggatgtgccccgggagttcctgcccaggaccctgaccggctacgtgcctgaggacatctggaggaaggccgaggaggccgtgaatgaggtgaagaggcaggccatgtctgagctgcagaaggctgtgtctgatgctgagaggaaggcccacgagctgatcaccacagagcgggccaagatggagcgggccctggccgaggccaagaggcaggcctctgaagatgccctgaccgtcatcaaccagcaggaggacagcagcgagagctgctggaactgtggcaggaaggccagcgagacctgcagcggctgcaatgctgcccgctactgcggcagcttctgccagcaccgggactgggagaagcaccaccacgtgtgtggccagagcctgcagggccccacagctgtggtggccgaccctgtgcccggccccccagaggccgcccacagcctgggccccagcctgcctgtgggcgccgccagccccagcgaggccggcagcgctggccccagcaggcctggcagccccagccccccaggccccctggacacagtgcccaggtag

SEQ ID NO: 153654 - DNA, 1962 bp, Artificial Sequence
  derived and/or modified sequence
atgcccgccagccggctgcgggaccgggccgccagcagcgccagcgggagtacttgtgggagcatgagccagacccatcccgtccttgagtccggcctcttggcatctgcaggctgttcagccccccgaggacctcggaaaggcgggccagctcctgtcgaccgaaaagcgaaagcctcagccatgccggatagtcctgccgaggtaaagacacaacctagatcaacccctcctagcatgcctcccccacccccagccgcttcacagggggccactagacctccgtctttcacaccacatacacaccgggaagacggcccggccaccctgcctcacggcagattccacggttgcctgaagtggagcatggtatgtttgttaatgaatggctcttctcattcccccaccgccatcaatggtgccccctgcacccccaacggcttctccaacggcccagctaccagtagtacggcctccctcagtactcaacatctcccccctgcctgcggggcccgccagttatcaaagctgaagcggtttctgactacactgcaacagttcggatcagatattagcccggagattggagagagggtccgcacgctcgtactcggcctggtgaactctacattaactatcgaagaatttcactcaaagctccaggaggccaccaactttcctctccgcccattcgtgattccttttttaaaagccaatcttcctctgctccagagagaactcctacactgtgccaggctggccaaacagacgccagctcagtatctcgcccagcacgaacaactgctgctggatgcctccgccagttctcctatcgactcctcagaactgttgctcgaagtgaatgagaacgggaaacggcggacgcctgaccgcactaaagagaacggaagcgaccgcgatccactccacccagagcatctgagtaagcgtccgtgtacattaaatccagctcagcgctactccccatcaaacggcccgccgcaaccgacgccacctccacattatcggctcgaggacattgccatggcccaccacttccgcgatgcttaccggcatcccgatcccagagaattgcgggagcggcacaggcccttggtggtcccaggctcccgccaagaggaagtgattgatcataagctgacggaaagagagtgggcggaagaatggaagcacttgaataacctgctgaactgcataatggatatggtggagaaaacccggaggtcattgacggtactgaggagatgtcaggaggccgatcgagaagagctgaaccattgggcacggaggtacagcgacgctgaggacactaaaaagggtcccgcccctgcagctgcccgcccccgctcctcttccgccggccccgaaggcccacaacttgacgtaccgcgcgagttcctgccacggacgctcacaggttacgttcctgaggacatttggcgcaaagcggaagaggctgtcaacgaggtaaagcgccaggccatgtcagaactgcagaaggctgtcagcgacgccgagcggaaggcccacgagttaattactaccgagcgtgctaagatggaacgagcgttggctgaagccaagcgtcaagcaagtgaagacgccttgacggtcattaaccagcaagaagactcaagcgaatcctgttggaactgtggtagaaaggcgagtgaaacttgtagtggctgcaacgcagcgcgctattgtgggagtttctgtcaacatagggactgggaaaagcatcaccatgtatgtgggcagtcacttcaggggcccacggccgttgtcgccgatcccgtgccgggtcctcccgaagctgcgcattccctgggcccctcattgcctgtgggtgcagctagtcccagcgaagcaggttctgcaggaccctctaggccgggatcaccatcacccccgggacctttggatacggtgccaagatag

SEQ ID NO: 153655 - DNA, 1962 bp, Artificial Sequence
  derived and/or modified sequence
atgcccgcttcaaggttaagggatcgggctgcctcctctgcctccggtagtacatgtggatctatgtctcagacacaccctgtacttgaaagcggcctcctcgcctctgctggttgcagtgcacccaggggccctaggaaaggcggtccagctcccgttgataggaaggctaaggcaagtgcaatgcccgatagtcccgctgaagtgaagacgcagcctcgatccacaccccctagcatgcctcccccaccaccagctgcatcccagggagccacaaggcccccttccttcacgccccatacccacagggaagatggcccagcgactctcccacatggccgattccacggttgtctcaagtggagcatggtatgcctcctgatgaacggctcttcccactcccctacggctattaacggcgctccctgcacccccaatggattcagtaacggtccggcaacttcttccactgccagtctctctacccagcacctgcctcccgcttgcggcgcaaggcaactatccaaactcaaaagattcttaactacccttcagcagtttggctccgacatttcgcctgagattggcgaaagagtcaggactctcgtgttagggctcgtgaatagcaccctgactatagaagaattccattcgaaactgcaggaagcgacaaatttccctttgcgccctttcgtgattccgtttttgaaagcgaatctgcctcttttgcagagagagctgctgcactgtgcccgactcgccaaacagacacccgctcaatacttggcccaacacgagcagctgttacttgatgcctccgcctcctcccctatcgacagttctgaacttctgcttgaggtgaacgagaacgggaagcgaagaacgccagacagaacaaaggagaatgggtccgaccgcgacccattacatcctgaacatttatcaaaacgaccgtgcaccctcaaccccgctcagaggtatagcccttctaacggcccacctcaacccacacctccaccccactaccgtttggaagacatcgctatggctcaccatttcagagatgcatacagacatccagatcctagagagctcagggagcgccacagaccactggtcgtgccaggctcacgtcaggaagaagtgattgatcataagctgaccgagcgggaatgggccgaagaatggaaacacctgaacaacctgctgaactgcattatggacatggtcgagaagactaggcgtagtcttacagttctgcggcgatgtcaggaggccgatagagaagagttaaatcactgggcccgtcgctattccgacgcagaggatacgaaaaagggtcccgctcctgctgccgcacgccctaggtcttcaagtgctggaccagaaggcccacagctggatgtgcccagagagttcctgccaagaaccctgacagggtatgtgccagaggatatttggagaaaggcagaagaagcggtgaatgaggtgaagcggcaggccatgagtgagctgcagaaggcggtgtccgatgctgaacgcaaggctcatgagctcatcacaactgagcgagccaaaatggaacgggctcttgctgaggcaaaaaggcaggcaagcgaggacgccctcactgtaatcaaccaacaagaggatagctccgagagctgctggaattgtggtagaaaagcatcagaaacctgctccggttgtaacgctgccaggtactgcggttccttttgtcaacaccgggattgggaaaagcatcaccacgtgtgcgggcagtctctccagggacctacagcagtagttgccgaccccgtgcccggacccccagaagctgctcattcgctcggtcctagtctaccagtgggagccgcatccccatcagaggctggaagtgcaggtccgtctaggccgggttctccaagtcctcccggaccactggatactgtacccaggtag

SEQ ID NO: 153656 - DNA, 4238 bp, Artificial Sequence
  derived and/or modified sequence
ggagggcctcggctttccagggacagaggcccaactccaggacgccccagctggcccagcccctcctctttccctcaaggctgcaggaggtcgggaaaggcagtcctggtagaggcctgtcctgggctccaggttggcccctgagggtggccctcctcatgccggcttcaagactgagggacagggcagccagttcagcctcgggatccacctgtggctccatgtcccagacgcaccctgtgctggagagcggcctcctggcatctgccggctgctccgcaccccggggtcccaggaagggcggcccagccccagtggacaggaaagctaaggcctcagcgatgccggactccccagcggaggtgaagacgcagccccggtccacaccccccagcatgccgcccccaccgcctgccgcatcccagggggccacacgccccccctccttcacgccacacacacatcgagaggacgggcctgcgacgctgccccacggccgttttcatggctgcttaaaatggtctatggtctgtctcttgatgaacggcagcagccactcaccaacagccatcaatggtgcaccgtgcacacccaacggcttcagcaatggcccggccacctcgtccacagcctccttgtccacacagcacctgcccccagcctgcggggcccggcagctcagcaagctcaagcgcttcctcaccacactgcagcagtttggcagcgacatctccccagagattggggagcgcgtgcgcacactggtgctgggcctggtgaactcgacattgacgatcgaggagtttcattccaagcttcaggaggccaccaacttccctctgcggccgtttgtcattcccttcctgaaggcaaacctgcccttgctgcagcgggagctcctgcactgtgcacgcctggccaagcagacgcccgcccagtacttggcccagcatgagcagctcctgctggacgccagcgcctcctcccccatcgactcctcagagctgctactggaagtcaacgagaacggcaagaggaggacgcccgacaggaccaaagagaacgggtcagaccgcgacccgctgcaccccgagcacctcagcaaacggccatgcaccctgaaccctgcccagcgctacagccccagcaacgggccaccgcagcccacaccgccgccgcactaccgcctggaggacatagccatggcccaccacttccgagatgcctaccgccacccagacccccgggagctacgagagcgccatcggccgcttgtggtgcctgggtcccggcaggaagaagtgatcgaccacaagctcacagagcgtgagtgggcagaagagtggaagcacctcaacaacctcctgaactgcatcatggacatggtggagaagacgcggcgctcgctcacggtgctgcgcaggtgccaggaggccgaccgcgaggagctcaaccactgggcgcggcgctacagcgacgccgaggacacaaagaagggccccgctcccgccgcggcccggccccgcagcagctccgccggtcccgaagggcctcagctagacgtgcctcgcgagttcctgccgaggaccctcaccggctacgtgcctgaggacatctggaggaaggctgaagaggccgtgaatgaggtgaagcggcaggccatgtcggagctgcagaaagccgtgtcggacgcggagcgcaaagcgcacgagctcatcaccacggagcgtgccaagatggagcgggccctggccgaggcgaagcggcaggcctccgaggacgccctgacggtcatcaaccagcaggaggactccagcgagagctgctggaactgcgggcggaaagccagtgagacgtgcagcggctgcaacgcggcacgctactgcgggtccttctgccagcatcgggactgggagaagcatcaccacgtgtgtggccagagcctgcagggccccacagccgtggtggccgacccggtgcctggaccgcccgaagccgcccacagcctgggcccctccctgcctgtgggtgctgccagccccagcgaagccggctctgcggggccttctcgccccggctcccccagcccacctggcccactggacaccgtgccccgctgaccccactggcccctggcctgccggacacagcaccgtgccaaccccacccagctccaggcccaccggatgctgtgcctggcctccgatgcctggcctgccagacactgcgccccgcctgacctgggggagccgaccaattagtcactgctgctactgcccctctccgaaagaagacacagaaccaacaaaaccgcattcagtgcacctgcctcagctacctaatgattccgcgcggagacctcctgacaacgtctcttcaagcatcctcagaagcctcgactgagctttagacagcagagcagatgccgcaggcgcggcggctctgcccacctctcttttcctctctgtctgtctctccccctctgtcttctctatcctctctctctctatgactatcacacactttctcttcaatgaaaaaatcgaattggtggcttatattttcagcaaagaattttggggggttttgtgtgttggcaaaagagctactcagaaatggacaaagaaaacgggggggttctccccctcctgattaaaaagggagaaagaaaactgcgattttatagctggagatctgaacccagctgtgcccctcccccaggggcgtgaggctgatcagcgaagacgggaggaaagatttcgatttctgactcaagatgcatttttggtttcagatttttttttcctgtaatgttaaactctttggctttaagtaaaaatccaaaaagtttttttaaaaaagcaaaggaagcatacttgtgaactaccttgctagctagccagccaaggataccggacacacctctgctccaaaggaaatccaaaaaagcaaacacaagaaatcaaaatccaaaatttgtttgtcactgccaaagtatttttttcactgtttcacttgctcttgggtttgtttggatgtgggtctttttctcttctgttctgattttgtttgtgggtgtcgggatatttgggtgcagagggtttgtgcccagttagaagcgacttttgttctcttctgcgtaggcgttggtgcgtccgccgcgtgtgcgtggtccgtgtgccgttgctccggcctgcgtctccatatgtgtaggaaaggacacgccgtctgtcctcacgccccctgtgacttttcatatttccgttttccacttgtggaaaaaaagtgctaaagttttcttcccagagagagcataattccgaaacaaaactgtgacaatcttttgggttgattctcgactgcttttcgagcatgcggagccagcaggcctccctgaaacactgcttctcggccagcccgtcctcctctacctctctcctctccgcgccctccgacctctctcggccccctcaccccagctccgacctctctcagccccatcgccccaactccaacctctcggccccatcgccccaccgcagctactcccctttcttccaaacttttgcagaaaaaacaaaaaaactacaaacaaaagcagccctctgcctcctccccagggaagaccctgaccgtgtacatagccctggtgctcctgcccagccacccctcagatgcgttcgcctctggccctggggtgtgtctcggtgacgttttctatcagacgtgctccctcccatcctccagccctgcccaccctccctccactcctctcaactgcctcagcgatttcaagaaggaaataaagggataaagaaattcatgcttgcaccgagtacaaggacagacagcaggcacggcccgcagcctggcatctgtgcgtgtggcgtggcccgtggcttggcatctgtgtgcgtggtgtggcccgtggcctggcatctgtgtgcgtggcgtggcccgtggcctggcatctgtgtgtgtggcgtggcccgtggcctggcatctgtgcgcgtggcgtggcccgtggcctggcatctgtgtgcgtggctatcaggagttctaggaactcagtgcaatacgggagtgacccagctactgaaccagccacgaacagcccgccagaggcctgaagctgagcgtgtacgttaatgtgaatgtatatagtctttgcagaggtccaaatgatattcatgatggtaataaacgagatgtttgccaaataaaaaacagaaaccgca

SEQ ID NO: 153657 - DNA, 1962 bp, Artificial Sequence
  derived and/or modified sequence
atgcccgccagcagactgagagacagagccgccagcagcgccagcggcagcacctgcggcagcatgagccagacccaccccgtgctggagagcggcctgctggccagcgccggctgcagcgcccccagaggccccagaaagggcggccccgcccccgtggacagaaaggccaaggccagcgccatgcccgacagccccgccgaggtgaagacccagcccagaagcaccccccccagcatgcccccccccccccccgccgccagccagggcgccaccagaccccccagcttcaccccccacacccacagagaggacggccccgccaccctgccccacggcagattccacggctgcctgaagtggagcatggtgtgcctgctgatgaacggcagcagccacagccccaccgccatcaacggcgccccctgcacccccaacggcttcagcaacggccccgccaccagcagcaccgccagcctgagcacccagcacctgccccccgcctgcggcgccagacagctgagcaagctgaagagattcctgaccaccctgcagcagttcggcagcgacatcagccccgagatcggcgagagagtgagaaccctggtgctgggcctggtgaacagcaccctgaccatcgaggagttccacagcaagctgcaggaggccaccaacttccccctgagacccttcgtgatccccttcctgaaggccaacctgcccctgctgcagagagagctgctgcactgcgccagactggccaagcagacccccgcccagtacctggcccagcacgagcagctgctgctggacgccagcgccagcagccccatcgacagcagcgagctgctgctggaggtgaacgagaacggcaagagaagaacccccgacagaaccaaggagaacggcagcgacagagaccccctgcaccccgagcacctgagcaagagaccctgcaccctgaaccccgcccagagatacagccccagcaacggccccccccagcccaccccccccccccactacagactggaggacatcgccatggcccaccacttcagagacgcctacagacaccccgaccccagagagctgagagagagacacagacccctggtggtgcccggcagcagacaggaggaggtgatcgaccacaagctgaccgagagagagtgggccgaggagtggaagcacctgaacaacctgctgaactgcatcatggacatggtggagaagaccagaagaagcctgaccgtgctgagaagatgccaggaggccgacagagaggagctgaaccactgggccagaagatacagcgacgccgaggacaccaagaagggccccgcccccgccgccgccagacccagaagcagcagcgccggccccgagggcccccagctggacgtgcccagagagttcctgcccagaaccctgaccggctacgtgcccgaggacatctggagaaaggccgaggaggccgtgaacgaggtgaagagacaggccatgagcgagctgcagaaggccgtgagcgacgccgagagaaaggcccacgagctgatcaccaccgagagagccaagatggagagagccctggccgaggccaagagacaggccagcgaggacgccctgaccgtgatcaaccagcaggaggacagcagcgagagctgctggaactgcggcagaaaggccagcgagacctgcagcggctgcaacgccgccagatactgcggcagcttctgccagcacagagactgggagaagcaccaccacgtgtgcggccagagcctgcagggccccaccgccgtggtggccgaccccgtgcccggcccccccgaggccgcccacagcctgggccccagcctgcccgtgggcgccgccagccccagcgaggccggcagcgccggccccagcagacccggcagccccagcccccccggccccctggacaccgtgcccagatag

SEQ ID NO: 153658 - protein, 906 aa, Artificial Sequence
  derived and/or modified sequence
MAGNVKKSSGAGGGSGSGGSGSGGLIGLMKDAFQPHHHHHHHLSPHPPGTVDKKMVEKCWKLMDKVVRLCQNPKLALKNSPPYILDLLPDTYQHLRTILSRYEGKMETLGENEYFRVFMENLMKKTKQTISLFKEGKERMYEENSQPRRNLTKLSLIFSHMLAELKGIFPSGLFQGDTFRITKADAAEFWRKAFGEKTIVPWKSFRQALHEVHPISSGLEAMALKSTIDLTCNDYISVFEFDIFTRLFQPWSSLLRNWNSLAVTHPGYMAFLTYDEVKARLQKFIHKPGSYIFRLSCTRLGQWAIGYVTADGNILQTIPHNKPLFQALIDGFREGFYLFPDGRNQNPDLTGLCEPTPQDHIKVTQEQYELYCEMGSTFQLCKICAENDKDVKIEPCGHLMCTSCLTSWQESEGQGCPFCRCEIKGTEPIVVDPFDPRGSGSLLRQGAEGAPSPNYDDDDDERADDTLFMMKELAGAKVERPPSPFSMAPQASLPPVPPRLDLLPQRVCVPSSASALGTASKAASGSLHKDKPLPVPPTLRDLPPPPPPDRPYSVGAESRPQRRPLPCTPGDCPSRDKLPPVPSSRLGDSWLPRPIPKVPVSAPSSSDPWTGRELTNRHSLPFSLPSQMEPRPDVPRLGSTFSLDTSMSMNSSPLVGPECDHPKIKPSSSANAIYSLAARPLPVPKLPPGEQCEGEEDTEYMTPSSRPLRPLDTSQSSRACDCDQQIDSCTYEAMYNIQSQAPSITESSTFGEGNLAAAHANTGPEESENEDDGYDVPKPPVPAVLARRTLSDISNASSSFGWLSLDGDPTTNVTEGSQVPERPPKPFPRRINSERKAGSCQQGSGPAASAATASPQLSSEIENLMSQGYSYQDIQKALVIAQNNIEMAKNILREFVSISSPAHVAT

SEQ ID NO: 153659 - DNA, 2721 bp, Artificial Sequence
  derived and/or modified sequence
atggccgggaacgtgaagaaaagcagtggagctggcgggggatcgggctctggggggtccggaagtggcggcctcattggattaatgaaggatgcattccagccacaccaccatcaccaccatcatctgtcgccccatccccccgggactgtggacaaaaagatggtggagaagtgctggaagctgatggataaagtggtgcgcctttgtcagaaccccaagctggccctaaaaaattctccaccttatatactggacctgctgccagatacctaccaacacctgcgcacaattctttctcgatatgagggtaagatggagactctgggtgaaaatgagtactttcgagtctttatggaaaacctgatgaagaagactaaacagacaatttctctattcaaggaaggcaaggaacgcatgtacgaagagaactctcagccgcgaagaaacttgactaaactcagcctgatcttcagccacatgcttgctgagctgaagggaattttcccatcagggctgttccagggcgacacctttagaatcacaaaggcagacgcagccgaattttggcggaaagcattcggggaaaagactatagtaccttggaaatcatttcgtcaagcattgcatgaggtccatcccatttcctccggactagaggcgatggcccttaaatcaactatcgatctgacatgtaatgactacattagtgtttttgagttcgacatatttacaagactgtttcagccatggagtagtcttctccggaactggaatagcttagcagtgacacaccccggatacatggcttttttgacctatgatgaagttaaggcaagacttcaaaaattcatacacaaaccggggtcttacattttccgattatcctgcaccagactcgggcagtgggccatcggctatgtcacagccgacggaaatatccttcaaactatcccccataacaagccgttgtttcaggccctgatcgacggattcagagaaggattttatctgtttcccgacggcaggaaccagaatcccgacttaactgggctctgcgagcctacaccacaggatcacatcaaagtgacgcaggaacagtacgagctgtactgtgaaatggggtcaaccttccagttgtgtaagatatgcgctgagaacgacaaggacgtcaaaattgagccatgcgggcacttaatgtgtacatcatgccttacaagttggcaggaatctgagggtcagggctgccccttttgcagatgcgaaattaaagggaccgagcctattgtggtcgacccctttgatcccagaggctctggtagcttgctacgacaaggggcagagggggctccttcaccaaactacgatgatgatgacgatgaacgggccgacgacactctttttatgatgaaagagctcgccggagcgaaagtcgagcgtccaccgtcgccttttagcatggcgccacaggcctccctgcctccagtcccccctaggctggacctgctgccacagcgcgtgtgcgtaccatccagtgcatccgccctcggaaccgccagcaaagctgctagtggcagcctgcacaaggacaaaccactgcctgtcccacccacactgcgcgatctgcctcccccaccaccccctgaccgcccctactctgtgggagccgagagtcgaccacagcgacggccattgccctgcactccaggggattgccctagccgagacaaactgcctcccgtgccaagcagccggctcggagactcttggctcccccggccaattccaaaggtgcccgtgagcgcaccttcctctagcgacccctggactgggcgtgaactgaccaaccgacactccctgcctttcagcttgcccagtcagatggagcctcggccagatgtgcctaggctgggttcaacctttagcctagatacttccatgagtatgaactcttcaccactcgtggggccagaatgcgatcacccgaaaataaaacctagtagttctgccaatgcaatctactctctggccgctagacctctgccggtccccaaactgcctcccggagaacagtgtgagggcgaagaggacactgagtacatgaccccttcaagccgaccgcttaggcccctggacacatctcagtcctcccgggcctgcgattgtgaccagcaaattgacagctgcacctacgaggcaatgtacaacatccagagtcaagccccaagcatcaccgaaagcagtacctttggagagggtaaccttgctgcagctcatgcaaatactggacccgaagagagcgagaacgaagacgatggctatgatgtgcctaaaccccccgttcccgcggtcttggccagaagaaccctcagcgatattagcaatgcttccagctcctttggctggctctccctggacggtgaccccaccaccaatgtcaccgaagggtcccaggttcccgagaggccgcctaagccgttcccccgccgaataaatagtgagagaaaagcggggagctgtcagcagggatccggacccgccgcaagtgcagctacggcttctcctcaactgtctagcgagattgagaatctgatgagtcagggttatagctatcaggatattcagaaggcccttgtgattgcccagaacaacatcgaaatggctaagaatatccttcgggagtttgtctccatttcttcccctgcacatgtggccacttag

SEQ ID NO: 153660 - DNA, 2721 bp, Artificial Sequence
  derived and/or modified sequence
atggctggaaatgtgaagaagagcagtggagctgggggcggcagcggcagcggcggcagcggcagcggcggcctcatcggcctgatgaaggatgccttccagccccaccaccaccaccaccaccacctgagcccccaccccccaggcaccgtggacaagaagatggtggagaagtgctggaagctgatggacaaggtggtgcggctgtgccagaaccccaagctggccctgaagaacagccccccctacatcctggacctgctgcctgacacctaccagcacctgcggaccatcctgagccgctatgagggcaagatggagaccctgggagaaaatgagtacttccgggtcttcatggagaacctgatgaagaagaccaagcagaccatcagcctcttcaaggagggcaaggagaggatgtatgaggagaacagccagcccaggaggaacctgaccaagctgagcctcatcttcagccacatgctggccgagctgaagggcatcttccccagcggcctcttccagggcgacaccttccgcatcaccaaggcagatgctgctgagttctggaggaaggccttcggggagaagaccatcgtgccctggaagagcttccggcaggccctgcacgaggtgcaccccatcagcagcggcctggaggccatggccctgaagagcaccatcgacctgacctgcaatgactacatctctgtgtttgaatttgacatcttcaccaggctcttccagccctggagcagcctgctgaggaactggaacagcctggccgtgacccaccctggctacatggccttcctgacctatgatgaggtgaaggcccggctgcagaagttcatccacaagccaggcagctacatcttccggctgagctgcacccggctgggccagtgggccatcggctacgtgacagcagatggcaacatcctgcagaccatcccccacaacaagcccctcttccaggccctgattgatggcttccgggagggcttctacctgttcccagatggaagaaaccagaacccagacctgaccggcctgtgtgagcccaccccccaggaccacatcaaggtgacccaggagcagtatgagctgtactgtgagatgggcagcaccttccagctgtgcaagatctgtgccgagaatgacaaggatgtgaagattgagccctgtggccacctgatgtgcaccagctgcctgacctcctggcaggagagcgagggccagggctgccccttctgccgctgtgagatcaagggcacagagcccatcgtggtggacccctttgacccccggggcagcggcagcctgctgcggcagggcgctgagggcgcccccagccccaactatgatgatgatgatgatgaaagagcagatgacaccctcttcatgatgaaggagctggccggggccaaggtggagaggcctcccagccccttctccatggccccccaggccagcctgccccctgtgcccccccggctggacctgctgccccagagggtgtgtgtgcccagcagcgccagcgccctgggcacagccagcaaggccgccagcggcagcctgcacaaggacaagcccctgcctgtgccccccaccctgcgggacctgcccccacctcctcctccagaccggccctacagcgtgggcgctgagagccggccccagaggcggcccctgccctgcacccctggggactgccccagccgggacaagctgccccctgtgcccagcagccggctgggggacagctggctgccccggcccatccccaaggtgcctgtgtctgcccccagcagcagtgacccctggacaggccgggagctgaccaacagacacagcctgcccttcagcctgcccagccagatggagcccaggccagatgtgccccggctgggcagcaccttcagcctggacacctccatgtccatgaacagcagccccctggtgggcccagaatgtgaccaccccaagatcaagcccagcagcagcgccaatgccatctacagcctggccgcccggcccctgcctgtgcccaagctgcccccaggagagcagtgtgagggggaggaggacacagagtacatgacccccagcagccggcccctgcggcccctggacaccagccagagcagccgggcctgtgactgtgaccagcagattgacagctgcacctatgaggccatgtacaacatccagagccaggcccccagcatcacagagagcagcaccttcggggagggcaacctggccgccgcccacgccaacacaggccctgaggagagtgaaaatgaagatgatggctatgatgtgcccaagccccctgtgcctgctgtgctggcccggaggaccctgagtgacatcagcaatgccagcagcagctttggctggctgagcctggatggagaccccaccaccaacgtgacagagggcagccaggtgcctgagaggcctcccaagcccttcccccggcgcatcaacagcgagaggaaggccggcagctgccagcagggcagcggccctgctgccagcgctgccacagccagcccccagctgagcagcgagattgagaacctgatgagccagggctacagctaccaggacatccagaaggccctggtgattgcccagaacaacatcgagatggccaagaacatcctgcgggagtttgtgtccatcagcagccctgcccacgtggccacctag

SEQ ID NO: 153661 - DNA, 2721 bp, Artificial Sequence
  derived and/or modified sequence
atggccggcaacgtgaagaagagcagcggcgccggcggcggcagcggatccggtgggtcgggtagcggtggattgatcgggctcatgaaagatgctttccaacctcaccatcaccaccaccaccatctgtccccccatcccccaggtactgtagacaaaaaaatggtggaaaagtgttggaagctgatggacaaggtggtccgactgtgccaaaacccaaaactggcactgaaaaactcgccaccttatatcctcgaccttttacccgatacttatcagcatttacggaccatcctgtctaggtatgaaggaaagatggaaaccctgggggagaatgaatactttagggtgtttatggagaaccttatgaagaagacaaaacagactattagcttgtttaaggagggcaaggaaagaatgtatgaagaaaattcccagccaagaagaaacctgacaaagctcagcctcattttctcacacatgctggctgagctcaaggggattttcccctctgggctctttcagggagatactttcagaatcacaaaggccgacgccgccgagttctggaggaaagcttttggggagaagaccatcgtgccttggaaatcttttagacaagctctgcatgaagtgcacccaatttccagcggcctagaggcaatggccctcaagagcacgattgacctgacatgcaacgactatatcagcgtttttgagttcgatattttcacccgattgttccagccttggagctcactgcttcggaactggaattccctggcggtcactcacccaggctatatggcttttctgacttacgatgaagttaaggctagactgcaaaagttcatccacaagcccgggagttatatatttagattgagttgtaccaggctgggccaatgggcaataggctatgtcaccgcggatggtaacatacttcagacgatcccccataataagccccttttccaagctctcatcgatggtttcagggaggggttctacctgtttccagacgggagaaaccagaacccggatctgacgggcttgtgcgagcccaccccccaggaccacatcaaagtcacccaggagcagtatgagctgtattgcgaaatggggagcacgttccaattgtgcaagatctgcgcggagaatgacaaggacgtcaaaatagaaccttgcggccatctcatgtgcaccagctgtctgacgtcttggcaggagtcagaaggacagggctgcccattctgtcgctgcgaaatcaagggcacggagcctatagtggtcgaccccttcgatcctcgcggcagtggctcccttctgaggcagggggcggagggggcaccctctccgaactacgacgacgacgacgatgagcgagctgacgacaccctctttatgatgaaagagctagctggggccaaggttgagcggcctccatcacccttctcgatggccccacaagcaagcctcccacctgttcctccaaggctcgatctgctgcctcaaagagtctgcgtgccctcctcggcgtcggccctgggcaccgcaagcaaagctgcaagtggatcactccataaggataagccgctgccagtgccacctacactgagggatttgccaccaccaccgccacccgaccgaccttactcagttggagccgagtccaggccgcagcggcgccctcttccatgtacccccggcgactgcccctcacgagacaaactgcctcccgttcccagctctaggctgggtgactcctggctgccccggccaatccctaaagtcccagtgtctgctcccagctcgtcggatccctggactgggcgcgagctgacaaatcgacacagtctcccgttttcactgcctagccagatggagccaagacctgatgttccacgcctgggttccacttttagtctggacacctctatgtctatgaatagttcacccctggtcggcccagaatgtgatcatcctaaaatcaaaccaagttctagcgctaacgcaatttactccctcgctgcaagacccttgcccgtgccgaagctcccccccggtgagcaatgcgagggggaggaggacacagagtatatgactcccagctcacgtcctttgagaccattggatacatcccagagcagtcgcgcttgcgattgcgaccaacagatagactcatgtacatatgaggccatgtacaacatccagagtcaggcccccagcatcaccgagtccagtactttcggtgaaggcaatttggcagccgctcacgctaacactggcccagaagagtccgagaacgaggacgatggctacgatgtgcccaaaccacctgtgcctgccgtgctggctcggaggacactaagcgacatcagcaatgccagctcctcttttggttggctgagcctcgacggtgaccctaccactaacgtcacagagggatcccaggttcctgaaaggcctccaaagccattcccaagaagaatcaactccgagcggaaggccggatcctgccagcagggaagcgggcccgctgcctctgccgctacagcatccccccaactcagctcagaaatcgaaaacctcatgtctcagggctactcgtaccaagacatccaaaaggccttagtgatcgctcagaataatatagagatggcaaaaaatatccttcgcgagtttgtttctatttccagccctgctcatgtcgccacttag

SEQ ID NO: 153662 - DNA, 2721 bp, Artificial Sequence
  derived and/or modified sequence
atggccggtaacgtgaagaaaagctcaggagccggagggggttctggcagcggcggaagcggctcagggggtttgatcggactaatgaaggatgcctttcagcctcatcaccatcaccaccaccatctaagcccacaccctcccggaaccgtagataagaagatggtggagaaatgctggaagttgatggataaggtggtgcgcctatgtcagaaccccaaactcgcccttaaaaactcgccaccttacatcctagacctcctgcccgacacttaccagcatttacggactatactgagtaggtatgaaggtaaaatggaaaccttgggtgagaacgaatacttccgggtgttcatggaaaacctgatgaaaaagacgaaacaaacaatctcactattcaaggaaggaaaggagcgaatgtacgaggagaactcccaacccaggaggaacttaactaagctgtctttgatctttagccacatgctggccgagctgaagggcatcttcccctccggactgtttcagggcgatacctttcggattactaaagcagacgccgctgaattttggaggaaggcatttggagaaaagaccatcgtgccatggaagtctttcagacaggccctgcacgaagtccaccctatctcatccgggctggaagcgatggctcttaaatccacgatcgatcttacctgtaacgactatatttccgtgtttgaattcgatatcttcaccaggcttttccagccgtggtcttcactgctgcggaactggaacagtctggctgtgacccacccaggatatatggcattcctgacctacgacgaagtaaaagctaggctgcagaagtttattcataaacccggtagttacatttttcgccttagctgcacgagactgggtcaatgggccattggatatgtaactgcagatggcaatatactccaaaccatcccacacaataagccactcttccaggcactgattgacggctttcgcgaggggttttatctcttcccggatggcagaaaccagaatcccgaccttactggactctgcgagcccacgcctcaagaccatatcaaggtcacacaggaacagtacgagctgtactgtgagatgggctcgactttccagctttgcaagatatgcgctgagaatgataaggacgtgaaaatcgagccctgtggccatctgatgtgtacgtcttgtctgacttcgtggcaggaaagcgaaggccagggctgtcccttttgccggtgtgagattaaagggacagagcccatagtggttgacccttttgaccccaggggctctggatccttgctgcgccaaggtgcggaaggcgcacccagcccgaactacgatgatgatgatgacgagcgcgctgatgacactctgttcatgatgaaggaactcgcaggggctaaagtggaacgccctccatcccctttctccatggcaccccaggcatccctgcctcctgtgcctccacgcttggatcttcttccacagcgagtgtgtgttccctcttcggcctctgctctgggcaccgcctctaaagcggcttccggcagcctgcacaaggacaaacctcttcccgtcccgcctactttgagagatctgcccccaccaccacctcccgatcgcccttactccgtgggtgctgaatcgaggcctcagaggagaccgttgccctgcacgcctggtgactgcccatcccgcgacaagctgcccccagtccccagctccaggctgggcgatagctggctacctagaccgattcccaaggtgcccgtgagtgcccctagcagctcagacccctggacaggcagagagcttaccaaccgccactcattgccatttagcctgccgtcccaaatggaaccccgacccgacgtacctaggcttggttccacattctctttggacacatccatgtctatgaattcttctccgttggtgggtcccgaatgcgaccatcctaaaattaagccatcatccagtgccaacgcaatctatagcctagcggctcggccactgcctgtcccaaaattgcccccaggggaacagtgcgagggcgaggaagatacagaatacatgaccccgagctctcggccactgcgtccgttagatactagccagtcttccagggcgtgtgattgcgaccaacagatcgactcctgcacatacgaggctatgtataatattcagtctcaagctccaagtattaccgaatcatctactttcggagaagggaatctggccgctgcacacgccaataccggccctgaggagagcgagaacgaggatgacggatacgacgtccctaagccgcctgtccccgctgtcctcgccagacgcaccttatctgacatcagcaacgcatcctcatcctttggctggctgtcactggacggggacccaacaacaaacgtgacagaaggctcgcaggtacctgagcggccacccaagcctttcccgagacgcataaattccgaaaggaaagccggttcttgccagcagggcagtggccctgcagcctcggccgcaactgcatctccccaattgtcgagcgagatcgaaaaccttatgtcccagggatatagctatcaggacattcagaaggcactcgtgatagcccagaacaatatcgagatggccaaaaatatcctgcgcgagtttgtctctatatccagcccagcccacgtggcaacatag

SEQ ID NO: 153663 - DNA, 10257 bp, Artificial Sequence
  derived and/or modified sequence
acagaaacctggccgcggctttccgggagctgtgggcacgcgagctgctcgaagccggtggcccggggatcgtcgctgcccagtccggccgcggccggccgcttccccgagcttaccagtaagccggtccgcctccgggacgcgccccgcccgccccgggctcgcgcgctctgaaggggcgcgtcccgcgcactcccggcgccgcccactcccctccccacggccgctcctccctccgcccggatagccggcggcggcggcggcggcggcggcggcggcggccgggagaggcccctccttcacgccctgcttctctccctcgctcgcagtcgagccgagccggcggacccgcctgggctccgaccctgcccaggccatggccggcaacgtgaagaagagctctggggccgggggcggcagcggctccgggggctcgggttcgggtggcctgattgggctcatgaaggacgccttccagccgcaccaccaccaccaccaccacctcagcccccacccgccggggacggtggacaagaagatggtggagaagtgctggaagctcatggacaaggtggtgcggttgtgtcagaacccaaagctggcgctaaagaatagcccaccttatatcttagacctgctaccagatacctaccagcatctccgtactatcttgtcaagatatgaggggaagatggagacacttggagaaaatgagtattttagggtgtttatggagaatttgatgaagaaaactaagcaaaccataagcctcttcaaggagggaaaagaaagaatgtatgaggagaattctcagcctaggcgaaacctaaccaaactgtccctcatcttcagccacatgctggcagaactaaaaggaatctttccaagtggactctttcagggagacacatttcggattactaaagcagatgctgcggaattttggagaaaagcttttggggaaaagacaatagtcccttggaagagctttcgacaggctctacatgaagtgcatcccatcagttctgggctggaggccatggctctgaaatccactattgatctgacctgcaatgattatatttcggtttttgaatttgacatctttacccgactctttcagccctggtcctctttgctcaggaattggaacagccttgctgtaactcatcctggctacatggcttttttgacgtatgacgaagtgaaagctcggctccagaaattcattcacaaacctggcagttatatcttccggctgagctgtactcgtctgggtcagtgggctattgggtatgttactgctgatgggaacattctccagacaatccctcacaataaacctctcttccaagcactgattgatggcttcagggaaggcttctatttgtttcctgatggacgaaatcagaatcctgatctgactggcttatgtgaaccaactccccaagaccatatcaaagtgacccaggaacaatatgaattatactgtgagatgggctccacattccaactatgtaaaatatgtgctgaaaatgataaggatgtaaagattgagccctgtggacacctcatgtgcacatcctgtcttacatcctggcaggaatcagaaggtcagggctgtcctttctgccgatgtgaaattaaaggtactgaacccatcgtggtagatccgtttgatcctagagggagtggcagcctgttgaggcaaggagcagagggagctccctccccaaattatgatgatgatgatgatgaacgagctgatgatactctcttcatgatgaaggaattggctggtgccaaggtggaacggccgccttctccattctccatggccccacaagcttcccttcccccggtgccaccacgacttgaccttctgccgcagcgagtatgtgttccctcaagtgcttctgctcttggaactgcttctaaggctgcttctggctcccttcataaagacaaaccattgccagtacctcccacacttcgagatcttccaccaccaccgcctccagaccggccatattctgttggagcagaatcccgacctcaaagacgccccttgccttgtacaccaggcgactgtccctccagagacaaactgccccctgtcccctctagccgccttggagactcatggctgccccggccaatccccaaagtaccagtatctgccccaagttccagtgatccctggacaggaagagaattaaccaaccggcactcacttccattttcattgccctcacaaatggagcccagaccagatgtgcctaggctcggaagcacgttcagtctggatacctccatgagtatgaatagcagcccattagtaggtccagagtgtgaccaccccaaaatcaaaccttcctcatctgccaatgccatttattctctggctgccagacctcttcctgtgccaaaactgccacctggggagcaatgtgagggtgaagaggacacagagtacatgactccctcttccaggcctctacggcctttggatacatcccagagttcacgagcatgtgattgcgaccagcagattgatagctgtacgtatgaagcaatgtataatattcagtcccaggcgccatctatcaccgagagcagcacctttggtgaagggaatttggccgcagcccatgccaacactggtcccgaggagtcagaaaatgaggatgatgggtatgatgtcccaaagccacctgtgccggccgtgctggcccgccgaactctctcagatatctctaatgccagctcctcctttggctggttgtctctggatggtgatcctacaacaaatgtcactgaaggttcccaagttcccgagaggcctccaaaaccattcccgcggagaatcaactctgaacggaaagctggcagctgtcagcaaggtagtggtcctgccgcctctgctgccaccgcctcacctcagctctccagtgagatcgagaacctcatgagtcaggggtactcctaccaggacatccagaaagctttggtcattgcccagaacaacatcgagatggccaaaaacatcctccgggaatttgtttccatttcttctcctgcccatgtagctacctagcacaccatctccctgctgcaggtttagaggaccagtgagttgggagttattactcaagtggcacctagaagggcaggagttcctttggtgacttcacagtgaagtcttgccctctctgtgggatatcacatcagtggttccaagatttcaaagtggtgaaatgaaaatggagcagctagtatgttttattattttatgggtcttgagtgcatttgaaggtgtccttcagttcccacgtagagagagtgtggattatattacatgataacctacctggggaacagtccagaaagctatagaacaagtattttgctggaaatcctaattgaggacttaagacttcctgggttaaggatgtggccgtgtgtgtgtgtgtctgcctgtggttgtatgtgtccttgtgattataagattaacctgctgtgtgtgttaattccaggcagggaattagcacaaaaggtttaggaaggaatctttttttaaagacttccatctactgtggtattatacccaagcctagtgtgtattacaacttcaacactcccctttggcttatattaccatgtgcatagctaaagtcttctatttttagaacaccttctgtctgttctttccccatcaactccttcctcatccttcttggtgttctgtcatgggccatgggcttgctatggccagccttactgaggccaagcagcttatgggatgttctttattgtgtgtgatggtattggtttgtttggtagataagtgggaggaaaagtactgttgctacactattataggcatgtttgatactagcagctaacactggtcactccaaagcactgtttctataggaacattgaagctattaagatgttttgattatcctaattacataatgaccgatttgagatagaggcctttaaatacattccatgccctccccagaaaatagtctgtgggagtcagttgccttggtgccaggtatgtgttctgatgtaggtcatgagtctttctacttaatgggaagggaagaacatttgtttccaggatgactttctggccagaataccggaaagcttttaggaagcttcgttcacatgctatttaaatgcacaaaatagacagtaaggatttatctgttcagtttttcttcccagtgaattaatttcagcttatatgggtgtcttcatttgaacatgaggaatattaggttatattttcagcagtggttttttcctttgccctttaaggagtggggataatgtccacggtggcccagcctcttgctgatggcaccttccctgcattgctgcctcccgatgatgtggttcttttcttgtgcctgtggctttgggaatgtaacatctctttcctcctttccttcccttttcctcttcacctgaggtcctaaatactctctgtaattactgtgttcttcacggtaattagacatcattcagtgaataaattactgtagtcaaagacagtatgggctggcagtttgtgtaattgcaagttcataaagagaattgagggtccagttgggagaactattagtcagttcttttatatgctgataaatgatccctcgagttcagttagtattctgtccagagtgtttagctcactttcttagcagtgtgtaagctttctccatgtcagaagcaagcctgctctttgataaatctgtcttcctgaaaatctaaatcatgcttttgtctttagatctacacagaaatgaccctccttggatcagttttctttccagtctaatcatctttggaactaaaacttgttctaactcgtctcttggcattcagctactcctagatcttttggttttatcccctggcctcagagccatttatattcccagagtaggcagtacaggatctcgtgttgatttgctgtggttacccagtgtcttctctacatggcataaagcggcaaagcccaccattaggtgaggcggtcccgagttgaggtagagtggggcagaggaagatggcagtgaatatcaaacagtagaccgccatcaacttctaacagccagtacacacactgtttcattttgaggtaacgttcagttttgcattttgtttaaatattgaaggcctagacaaagaactagaaaaaaaaaagcagtttccaggcccatccatattgtaatttttctttatctgcagatattgcctgtagtctaaagatctctttggaagacaaagcattggctatatatcttttgccttttccatgcatctaaatcttctctggagattatctccctactgtgtaggttaagggcagtctcgacttttccttttttgagtcctgtgtggctctttgaatcagcgtgaaactgaggctccagctccctgtgttgtgtgtgtgtgccatccatgggcttgggtgtcagtttgtcacaggtatctgccagcattcaaggttttggatcatttcatgaggatctttcctttgactgggtgctgtgaggacacacctgggtctgtgcctgagattgccaggcaagattaaggaaagttttcatgtggcttttgttttgaggttattctcaaaaccttaatttcttatattttctgttgactaaggcaccagtaacccattcttcaccctccatttgtatggcaatttaaaagtctttggctttgctctgaatttaattaaaactgccttttatgaacagacttcgagttttgccattttgggcaagcccttccgcttgtcccttcctagtggctaataaagtaaaaaaacccacactactttgttctctttttctcatattcattgggctgttgtattcagccagtctcatgctttccctgggtcttcacggattgctttccaagctgccttgttgcggggttgctgcagagcagcaactggacctttccagctgtcgccatgttccttccactaaagtagagggttcttaaaatggaaaaacctgtgggctcttcatatacctccctttagttaagtaatagaccaggcagcttctcatctcagcatttacctgttaatatttttgtgaatagtgctctctacctgtgggtggccgttctcttccacttgctcgtctccccccagccccattctgcataatctaccattcttctcctctctttctcttcttatacagaccctcattactggggcccaagatgtgggatactactgttagtattatttaactattttgtagatttaaaagatttctggttaagggaggtgggggtcactgttcatcactcttaaaatatgtgttttctctatagaaaagtaaaatgtgtttatggtcccaaacagtcaactcacaaatttttataacaaaatttccttgtaaaaactagggaccatctatatattccctttaagatctagttctttttgtaggtgttcagcaatggtgataaagcagaatattctcctacctcacgtcattaaagtcagaagattatagaccttctcaaactataagtccctcttcttgccgttggcctttctgactctggaatgaccactgttcattgaaaaatagttttctgactattggtctggctctaacagtttgtttgttcatccagcaaatgtttatgagtgatgaccatgtgccagaaatgtcaggtatgtgtccttcccttggcgccacatagtagtttactaatgtttgggggattgtacttggactgtcatagcctctgcgtttgaccttaaaatagctcttcccagtaagattgtgcaatttttattcacagctcttccatgtagacttacctttcctcatagagctatcctggttaataacaggccaagattctcccattatcccctgttgtctcctgtagctttgataatgcctgggagattccttggtgtaagtgtcatggataccgactgtttttatgttggaatttgttccaacataattagaatctgtttggtgagttgaaaggtaagttggctcagagttgcacagtagggcattaaatgtttaagcaaagcatctgcccacactcccctttccaatctagtgccttccttgaactttttcctgagctgctacgtccctaatcccccttgttgggaggattttcgtatcacccttatgggacctgtcaccatgtcctgtactatttggaattggttttccagtctttcaacaaccgttgtggctaactatgttttagaagggctggaggtgtgggccctgtcttcgggtctcaggacccaaagatcctttagtcagttgttgggtcttccaagagccagacattaatacagattgaactccatcagtcccctaattgtcagcctttacctccctcccagagcaaggagtttagggattctaaagcttagtgtccacacatcattctaccagaccttagagctttagaagctcaatctaaaatactgtaactcagcataaactattactatcactcctttgaactcagtctccatgagcagtgttttgttggaaatacatagaacggcttaatgcctagagggtggtggatagtgaaggacggtcaaggttatatttttgactgcttagggattctttggatccaagaaacagaaatgttcaagcggaataaaggagggagtggagttgtggtaaggatgcagggtatttcgcagaacccaggacgggaagtgcctttggttcttgggtggagctggaactgcagagctttgcacctagtcctttctcccgcttcacagtctgcttatggtatatgtggcccccaaataggcactctagtcctcaagtctacaccaccttccaactctggggatcaccatgaacaaattctcaatttcccatacttaattttttttttttttgagatggagtctcgctgtgtcgcccaggctggagtgcagtggtgcagtctcaactcaccacaacctctgcctcccaggttcaagcagttctctgcctcaacctcccgagtagctgggattacaggcgcctgccaccatgcccagctaatgttcatatttttagtagagacagggtttcaccgtcttggctaggctggtcttgaactcctgaccctcatgatccacccacctcggcctcccaaagtgctaagattacaggcgtgagccaccgcgcccggcccatacttcgtattcttaaaaaaaactacactcagcccagcacattgatcaagtatctatctctgagcagttggccttgccagggagagcagagatgtggcaggctccttcagctggagacagggagcttctcagagaagtgagcagagactccacagacaccctaaaaaggcttctactcaagaagtaaagccactactcctgcctttttgcttagtggacaggaaggcacaggagtttgtctgggacatcatagaaattcttaggtttaacttaattctggtcattgtcttctttatttcctgtttttcttccctttgtcagtcttcgcatccaagatttcttccctccctcttgtgggccagcctgtcctgttccagagctagcctgttcctgggtagccttccttagcctccattcagcctcaggtcttttgccttcttccgtgtttatttagagagcagaatctaataacgggttccactgtagccactatccatggacttctgggtcctcttcaggtttgagtgcttgaaaatgttcattctctgggcttgtggcctgtctcctccactctcctcctcaccctctcgctccttcctgtgtgagggccgctctgcagtaatgttctcaggcaagccttcctaggcacctcagaaactactttgccagagccagtaagaatatataatattggagcagttgccaggatagaaattaaatatagattccagtttaggatagagtttttaccgagagctctttagacagtatacctgtgtcttctctggcaattgctttcattttagtcctatataaaagctttccttttctgtttttttttaaaactatgcttttgcttgcctaaatcttttgatcttatatttctctcatctcagagcctgtcctgagttgtaaggtatttcatactgccttacttaaaagttttttaaactactagagtcatttgatacacacagaagttacctaataatccaaagatgtccatcaagggaggaagggtgggtcatcagactttgcctttgatgttgtagactaggctcctgagttaagcagcagagggacagcagtgccatgtgccttcactgtgtcccaggaaatctgggttggttccagtgggaaataccagtatttcttggttctggaaagtagcaaaagagtaggagatggggaaatagggatggggagagcaagccccgcatgtccatggcgagtcaggtggggagcacgggtggaagggccggctgttgacagacagactaagctgtgtggtgctcttgccgccccttcctgggtacagagcttgagaaaaatgcagccgaccactccctgtgtttgtacagagcaaagcccaaaagccaacctcagatctcctgatttggcagctgaagaaatcagcagagtcctgattgcctgattcagtcccaaaaatgaatgtcaggccccgccccctccccaccaacattgcctctcctacattctccttctgcccctaaatcagacaggaggccagagaggagtattgctcaatgcgtgctatgtgcaactcctcaggccttgtgccacctccatgctgagccctgaagcagggtgtcctgggtgcctgtgtgtcagctccctcctctctacctacctctgaccttcttgtgggtgagggtggccatgcttatggccatcttaaaactggagaggcagagaactacttatgagtctgtagaccacgtgttgtcttccatggcctgtttctcctgctgtctgggtgagtgagcctgcaacgcaatgcccatgagagtaaatgcctcctgacctaccctgctcagcactgttctagtgtcttggccttgaaagaaaagcctgacttcctgctgacacatgtggtaggggcatggcagctatgaggcacctcctacgtctgttttctggctgtggtgacttgggatttttaaccttatatatctttttcctttactcaaaacaaaacaatttttagcacactg

SEQ ID NO: 153664 - DNA, 2721 bp, Artificial Sequence
  derived and/or modified sequence
atggccggcaacgtgaagaagagcagcggcgccggcggcggcagcggcagcggcggcagcggcagcggcggcctgatcggcctgatgaaggacgccttccagccccaccaccaccaccaccaccacctgagcccccacccccccggcaccgtggacaagaagatggtggagaagtgctggaagctgatggacaaggtggtgagactgtgccagaaccccaagctggccctgaagaacagccccccctacatcctggacctgctgcccgacacctaccagcacctgagaaccatcctgagcagatacgagggcaagatggagaccctgggcgagaacgagtacttcagagtgttcatggagaacctgatgaagaagaccaagcagaccatcagcctgttcaaggagggcaaggagagaatgtacgaggagaacagccagcccagaagaaacctgaccaagctgagcctgatcttcagccacatgctggccgagctgaagggcatcttccccagcggcctgttccagggcgacaccttcagaatcaccaaggccgacgccgccgagttctggagaaaggccttcggcgagaagaccatcgtgccctggaagagcttcagacaggccctgcacgaggtgcaccccatcagcagcggcctggaggccatggccctgaagagcaccatcgacctgacctgcaacgactacatcagcgtgttcgagttcgacatcttcaccagactgttccagccctggagcagcctgctgagaaactggaacagcctggccgtgacccaccccggctacatggccttcctgacctacgacgaggtgaaggccagactgcagaagttcatccacaagcccggcagctacatcttcagactgagctgcaccagactgggccagtgggccatcggctacgtgaccgccgacggcaacatcctgcagaccatcccccacaacaagcccctgttccaggccctgatcgacggcttcagagagggcttctacctgttccccgacggcagaaaccagaaccccgacctgaccggcctgtgcgagcccaccccccaggaccacatcaaggtgacccaggagcagtacgagctgtactgcgagatgggcagcaccttccagctgtgcaagatctgcgccgagaacgacaaggacgtgaagatcgagccctgcggccacctgatgtgcaccagctgcctgaccagctggcaggagagcgagggccagggctgccccttctgcagatgcgagatcaagggcaccgagcccatcgtggtggaccccttcgaccccagaggcagcggcagcctgctgagacagggcgccgagggcgcccccagccccaactacgacgacgacgacgacgagagagccgacgacaccctgttcatgatgaaggagctggccggcgccaaggtggagagaccccccagccccttcagcatggccccccaggccagcctgccccccgtgccccccagactggacctgctgccccagagagtgtgcgtgcccagcagcgccagcgccctgggcaccgccagcaaggccgccagcggcagcctgcacaaggacaagcccctgcccgtgccccccaccctgagagacctgccccccccccccccccccgacagaccctacagcgtgggcgccgagagcagaccccagagaagacccctgccctgcacccccggcgactgccccagcagagacaagctgccccccgtgcccagcagcagactgggcgacagctggctgcccagacccatccccaaggtgcccgtgagcgcccccagcagcagcgacccctggaccggcagagagctgaccaacagacacagcctgcccttcagcctgcccagccagatggagcccagacccgacgtgcccagactgggcagcaccttcagcctggacaccagcatgagcatgaacagcagccccctggtgggccccgagtgcgaccaccccaagatcaagcccagcagcagcgccaacgccatctacagcctggccgccagacccctgcccgtgcccaagctgccccccggcgagcagtgcgagggcgaggaggacaccgagtacatgacccccagcagcagacccctgagacccctggacaccagccagagcagcagagcctgcgactgcgaccagcagatcgacagctgcacctacgaggccatgtacaacatccagagccaggcccccagcatcaccgagagcagcaccttcggcgagggcaacctggccgccgcccacgccaacaccggccccgaggagagcgagaacgaggacgacggctacgacgtgcccaagccccccgtgcccgccgtgctggccagaagaaccctgagcgacatcagcaacgccagcagcagcttcggctggctgagcctggacggcgaccccaccaccaacgtgaccgagggcagccaggtgcccgagagaccccccaagcccttccccagaagaatcaacagcgagagaaaggccggcagctgccagcagggcagcggccccgccgccagcgccgccaccgccagcccccagctgagcagcgagatcgagaacctgatgagccagggctacagctaccaggacatccagaaggccctggtgatcgcccagaacaacatcgagatggccaagaacatcctgagagagttcgtgagcatcagcagccccgcccacgtggccacctag

SEQ ID NO: 153665 - protein, 532 aa, Artificial Sequence
  derived and/or modified sequence
MEELSSVGEQVFAAECILSKRLRKGKLEYLVKWRGWSSKHNSWEPEENILDPRLLLAFQKKEHEKEVQNRKRGKRPRGRPRKLTAMSSCSRRSKLKEPDAPSKSKSSSSSSSSTSSSSSSDEEDDSDLDAKRGPRGRETHPVPQKKAQILVAKPELKDPIRKKRGRKPLPPEQKATRRPVSLAKVLKTARKDLGAPASKLPPPLSAPVAGLAALKAHAKEACGGPSAMATPENLASLMKGMASSPGRGGISWQSSIVHYMNRMTQSQAQAASRLALKAQATNKCGLGLDLKVRTQKGELGMSPPGSKIPKAPSGGAVEQKVGNTGGPPHTHGASRVPAGCPGPQPAPTQELSLQVLDLQSVKNGMPGVGLLARHATATKGVPATNPAPGKGTGSGLIGASGATMPTDTSKSEKLASRAVAPPTPASKRDCVKGSATPSGQESRTAPGEARKAATLPEMSAGEESSSSDSDPDSASPPSTGQNPSVSVQTSQDWKPTRSLIEHVFVTDVTANLITVTVKESPTSVGFFNLRHY

SEQ ID NO: 153666 - DNA, 356 bp, Artificial Sequence
  derived and/or modified sequence
ctgccagagatgagtgcaggtgaggagagtagcagctcggactccgaccccgactccgcctcgccgcccagcactggacagaacccatcagtgtccgttcagaccagccaggactggaagcccacccgcagcctcatcgagcacgtatttgtcaccgacgtcactgccaacctcatcaccgtcacagtgaaggagtctcccaccagcgtcggcttcttcaacctgaggcattactgaagccccggcgccaccagctgcgcgtcttactccccttccctgcctatggtgtcgcttggctaagtgactcccagcccaagccccctcaagagtctgatcgtcgggggaggaggagtggg

SEQ ID NO: 153667 - DNA, 1599 bp, Artificial Sequence
  derived and/or modified sequence
atggaagagctatccagcgtaggggagcaggtgttcgctgcagagtgcattctcagcaagcgtttgcgtaagggtaaacttgagtacttagttaagtggcggggctggtcgtccaaacacaatagctgggaacccgaggagaacatcctggatccccgcctactgctagcctttcaaaagaaagagcacgaaaaagaggtacagaacagaaaaaggggaaaacgtccaaggggcagaccccggaagctaactgccatgtcttcatgcagccggaggtcaaaacttaaggagcctgacgcacctagcaagagtaagtcaagcagctcttcctccagtagcacatcttctagtagctccagcgacgaagaagacgatagtgaccttgatgctaagcgaggcccgagaggccgcgagacccaccctgttcctcagaaaaaagctcagattctcgtggctaaacctgaactaaaggatcctatcagaaaaaaaagagggagaaagcccctgcctcccgagcagaaggccacaaggcgccctgtatctctggcaaaggtgctgaagaccgccaggaaggacctcggcgcccccgcctccaaacttcctccccctctatccgcccctgtggctggattagcagccctgaaagcccatgctaaagaagcttgcggagggcctagcgcaatggccacccctgagaacttagcctccctgatgaagggaatggcatcatctcctggacggggcgggatttcttggcagagctctatcgtacattacatgaacagaatgactcagagccaggctcaggccgcctcgcggttggcgctgaaagcccaagccaccaataaatgcggacttggcttggatctaaaagtccgtacccagaagggcgaactgggcatgtccccccccggatcaaaaattccaaaggcgccgagtggcggcgccgtggagcagaaggtgggcaatacagggggacctccacacactcatggagcatcgagggtgcctgccggctgtcccgggcctcagcccgctccaacccaagaactgtcgcttcaggtgttagacctccaatccgtgaagaacggtatgcccggagtagggctgttagccagacatgcgactgctactaagggagtacctgctacaaaccccgcccccgggaagggcaccggttcaggtctgatcggcgctagcggagcaactatgccgaccgacacttcaaaatccgaaaagctggctagcagggccgtggccccccctactccagcgtctaaacgcgactgtgtcaaggggagtgctaccccgtctggccaagaaagtcggaccgcccccggcgaggctcgaaaggcagcaaccctcccagagatgtcagccggggaggagagtagcagcagcgacagtgacccagattccgccagccccccttccaccggccagaatccgtctgtgagtgtccagacctctcaagactggaagccgacacgaagtctgatcgaacatgttttcgtgaccgacgtgactgccaatctgatcacggtcacagtgaaagaaagccctacctctgtgggattcttcaaccttcgtcactattag

SEQ ID NO: 153668 - DNA, 1599 bp, Artificial Sequence
  derived and/or modified sequence
atggaggagctgagctctgtgggggagcaggtgtttgctgctgagtgcatcctgagcaagaggctgaggaagggcaagctggagtacctggtgaagtggaggggctggagcagcaagcacaacagctgggagcctgaggagaacatcctggacccccggctgctgctggccttccagaagaaggagcacgagaaggaggtgcagaacaggaagaggggcaagaggccccggggccggcccaggaagctgacagccatgagcagctgcagcagaagaagcaagctgaaggagccagatgcccccagcaagagcaagagcagcagcagcagcagcagcagcaccagcagcagcagcagcagtgatgaagaagatgacagcgacctggatgccaagaggggcccccggggccgggagacccaccctgtgccccagaagaaggcccagatcctggtggccaagccagagctgaaggaccccatcaggaagaagaggggcaggaagcccctgcccccagagcagaaggccaccaggaggcctgtgtccctggccaaggtgctgaagacagccaggaaggacctgggcgccccagccagcaagctgcccccacccctgagcgcccctgtggccggcctggccgccctgaaggcccacgccaaggaggcctgtggcggccccagcgccatggccaccccagagaacctggccagcctgatgaagggcatggccagcagccctggccggggcggcatctcctggcagagcagcatcgtgcactacatgaacaggatgacccagagccaggcccaggccgccagccggctggccctgaaggcccaggccaccaacaagtgtggcctgggcctggacctgaaggtgaggacccagaagggggagctgggcatgagccccccaggcagcaagatccccaaggcccccagcggcggcgctgtggagcagaaggtgggcaacacaggaggccccccccacacccatggagccagccgggtgcctgctggctgccccggcccccagcctgcccccacccaggagctgagcctgcaggtgctggacctgcagagcgtgaagaatggcatgcctggggtgggcctgctggcccggcatgccacagccaccaagggcgtgcctgccaccaacccagcccctgggaagggcaccggcagcggcctgattggagccagcggggccaccatgcccacagacaccagcaagtctgagaagctggccagcagagctgtggccccacccaccccagccagcaagagggactgtgtgaagggcagcgccacccccagcggccaggagagcaggacagcccctggagaggccaggaaggccgccaccctgcctgagatgtctgctggggaggagagcagcagcagtgacagcgaccctgattctgccagcccccccagcacaggccagaaccccagcgtgtctgtgcagaccagccaggactggaagcccaccaggagcctcatcgagcacgtgtttgtgacagatgtgacagccaacctgatcaccgtgacagtgaaggagagccccacctctgtgggcttcttcaacctgcggcactactag

SEQ ID NO: 153669 - DNA, 1599 bp, Artificial Sequence
  derived and/or modified sequence
atggaggagctgagcagcgtgggcgagcaggtgttcgccgccgagtgcattctgtccaaacgactgaggaaaggtaagctcgagtatctggtaaagtggaggggctggtcgtccaaacataattcttgggaaccagaagaaaacatactggatcctaggttgctgcttgcatttcagaagaaggagcatgaaaaagaggtgcaaaaccggaagaggggaaagcgacctcgcggccggccgagaaagctgaccgccatgtcctcctgcagccgccggtccaaactcaaagagcctgacgcgccttcaaagtctaagtcaagctcctctagtagttcctctacttcatcgtcatcttctagtgacgaagaagatgattccgacttggacgccaagcgaggtcctagaggccgggaaacccatccagtgcctcaaaagaaagcccagatcctggttgcaaagccagaactgaaggaccccattagaaagaagcgcggtcggaagccccttcccccagagcagaaggcaactcgccggccagtcagccttgctaaggtgctgaagacagctaggaaagatctgggagcaccagccagcaagctaccccctcccctgagcgcgcctgtcgccggtctcgccgctctgaaagcacatgccaaagaggcctgcgggggaccctcagctatggccacacccgagaacctggctagcctcatgaagggcatggccagttcacctggtaggggagggatatcctggcaatcaagcattgtccactacatgaaccggatgacccagtcacaggcacaggcagcatcgcgcctggctctcaaagctcaggcaacaaataaatgcggtcttgggctcgacttgaaagtcaggacacaaaaaggcgagttaggtatgagtcctcctggtagtaaaatccctaaggctccctctggcggagccgtcgagcagaaggtaggaaataccgggggaccgccgcatacccatggggcgagccgagtgcccgcagggtgtcccggtccacagcctgcgccaacacaggagctgagtctgcaggttcttgatcttcagtctgttaaaaacggaatgccaggggttgggttgctcgctcgacatgcaaccgccaccaagggcgtccctgcaacaaatcctgcaccaggaaagggaaccggctcaggtctgattggagcatcaggggcaactatgcctacagatacgtcaaagtctgagaaactggcatccagggcagtggctccgcccacccctgcgagtaagcgcgactgcgtgaagggcagtgcaacgccctccgggcaggagagtcgtactgcccctggcgaggctcggaaggccgcaacactgccggagatgtccgccggggaggaatcgagttcatccgacagcgaccccgacagcgcatcaccaccttccaccgggcaaaacccgtccgtttcagttcaaactagtcaggactggaagcctactcgaagtttaatcgaacatgtctttgtaaccgacgttacagctaatctaataacagtgactgtcaaggaatcacctacttctgtgggcttttttaatcttcgacactactag

SEQ ID NO: 153670 - DNA, 1599 bp, Artificial Sequence
  derived and/or modified sequence
atggaggagcttagtagtgttggagaacaagttttcgctgccgaatgtattcttagcaaaagattgagaaaaggcaagctggagtacctggtcaagtggcgaggatggtcatcgaagcataattcttgggagcctgaagaaaacatcctggatcccagactcctcctggcatttcaaaagaaagaacacgaaaaggaggtacaaaatcgtaagcggggaaagagacctagaggtcgccctagaaagctcaccgccatgtctagttgcagcaggcggtcaaaattgaaagagcccgacgccccttctaagtcaaagtcaagttcctcctcctcctccagcacttcttcctctagcagttccgacgaagaagacgatagcgatctggacgccaaacggggtccacgagggagggagacccaccccgtgcctcagaagaaggcccagatcctagtcgccaagcctgaactcaaggacccaattcggaaaaagcgaggcagaaagccccttcctcctgaacagaaggctacacggaggcctgtgtccctcgcgaaggtcttaaaaaccgcccgtaaagacctgggcgcacctgcctccaagctgcctccccctttgagtgcgcctgttgccggtctggctgccctaaaagcgcacgctaaggaggcttgcggcggaccttccgctatggcgacgcccgaaaatctggcgtcattgatgaaaggaatggcgtcttcacccggaagaggtggaatttcatggcagtccagcatcgtgcactacatgaaccggatgactcagtcccaggcccaggcagcctcaagattagcgttaaaagcacaagctacaaacaaatgtggccttgggcttgatcttaaggtgcgaactcagaaaggagaactcggtatgagcccccctggatcaaagatacctaaggcaccgtccggaggggcagttgaacaaaaagtggggaatacgggcggacctccacatactcatggtgctagtcgggttcccgctggctgccccggtcctcagcctgcccctacacaagaactgagtctgcaggtgctcgacctgcaaagtgttaagaatggcatgcccggagtggggttgctggcaagacatgccaccgccactaaaggggtgcccgcaactaaccccgcacccggaaaggggacaggctcgggcctgattggagcctccggcgctaccatgccaaccgatacctcaaaatcagaaaagctggccagtcgggctgtggctccacctaccccagcctccaaacgcgattgtgtgaagggatccgctacaccatccggacaggagtcccgcaccgctcccggtgaggccaggaaagcagcaacccttcccgagatgtccgccggagaagagtcctcatcatcagacagtgatcctgacagcgctagccctccaagcaccggacagaacccttcagtgagtgttcaaacatcacaggactggaagcccactagatctttaattgagcacgtcttcgtcaccgatgtcacagcaaacctgatcacggttaccgtcaaagaatccccaaccagcgtgggcttcttcaacctgcggcactactag

SEQ ID NO: 153671 - DNA, 4265 bp, Artificial Sequence
  derived and/or modified sequence
ggcggtccgggcgggtgactggcggcgggcgccgcggtcgggctggctgccgggcagcatggaggagctgagcagcgtgggcgagcaggtcttcgccgccgagtgcatcctgagcaagcggctccgcaagggcaagctggagtacctggtcaagtggcgcggctggtcctccaaacataacagctgggagccggaggagaacatcctggacccgaggctgctcctggccttccagaagaaggaacatgagaaggaggtgcagaaccggaagagaggcaagaggccgagaggccggccaaggaagctcactgccatgtcctcctgcagccggcgctccaagctcaaggaacccgatgctccctccaaatccaagtccagcagttcctcctcttcctccacgtcatcctcctcttcctcagatgaagaggatgacagtgacttagatgctaagaggggtccccggggccgcgagacccacccagtgccgcagaagaaggcccagatcctggtggccaaacccgagctgaaggatcccatccggaagaagcggggacgaaagcccctgcccccagagcaaaaggcaacccgaagacccgtgagcctggccaaggtgctgaagaccgcccggaaggatctgggggccccggccagcaagctgccccctccactcagcgcccccgttgcaggcctggcagctctgaaggcccacgccaaggaggcctgtggcggccccagtgccatggccaccccagagaacctggccagcctaatgaagggcatggccagtagccccggccggggtggcatcagctggcagagctccatcgtgcactacatgaaccggatgacccagagccaggcccaggctgccagcaggttggcgctgaaggcccaggccaccaacaagtgcggcctcgggctggacctgaaggtgaggacgcagaaaggggagctgggaatgagccctccaggaagcaaaatcccgaaggcccccagcggtggggctgtggagcagaaagtggggaacacagggggccccccgcacacccatggtgccagcagggtgcctgctgggtgcccaggcccccagccagcacccacccaggagctgagcctccaggtcttggacttgcagagtgtcaagaatggcatgcccggggtgggtctccttgcccgccacgccaccgccaccaagggtgtcccggccaccaacccagcccctgggaagggcactgggagtggcctcattggggccagcggggccaccatgcccaccgacacaagcaaaagtgagaagctggcttccagagcagtggcgccacccacccctgccagcaagagggactgtgtcaagggcagtgctacccccagtgggcaggagagccgcacagcccccggagaagcccgcaaggcggccacactgccagagatgagcgcaggtgaggagagtagcagctcggactccgaccccgactccgcctcgccgcccagcactggacagaacccgtcagtgtccgttcagaccagccaggactggaagcccacccgcagcctcatcgagcacgtatttgtcaccgacgtcactgccaacctcatcaccgtcacagtgaaggagtctcccaccagcgtgggcttcttcaacctgaggcattactgaagccccggcgccaccagctgcgcggtcttactccccttccctgcctatggtgtcgcttggctaagtgactcccagcccaagccccctcaagagtctgggtcgggggaggaggagtgggtggcctccttgatgggcaggcttggaagggacttctcccgcaccccactctgtcccaggacatagggcagggggcctcactgccttgttggtctccaccttgttcctacctctgcaggcctctttgctctcccctcttgcctcaggaaacccggtggcacctgtggctccaggtgactgtcttgaacagagcgggcttcttcatggctgcgttgttgctgagtttgaactgctcctccctggcctgcgtgactgaatcacagctttggtccctgtcttgcaggggctgaggtgtcaggaggggacttctggcccaccttgccttcagccctggagtgggcagagagtattgtggggaggcatggccagtgggactagtgttccctccatctggccacagcttttgggagatggggtgggcaggggtggtcctggctggcattgcctgagccggcagtgatgaagtggggagcttgcccttgacaggtgggggctggctggggccttaatgtgaaaagacagtggcaggcagctggagtagagcgagcccagcagccctaaaaggctgccttcatggccatctagccccagttcagggcagcatccatagcccacaagccagcgtgggtggggcgggggtggtcccacagctgggttccacctgaagagcctccgtgcctcggagcaggagaggcaggctatggctgccaccctccctcctgcctgtgtcccagtgagaactgacctgagtccccttccaaacccagacccacctcctgccccaggcccactgaagcatgttccatttctaaaaagcccagagttcagtgtgtcccaaggaaaacccaaagtggaggtgctcaggtccaggggagtccagtgggcaggacccttggcaggcaagcccctcccttcactcccaggacctaccttctgctagtaaaggactggcttcattctaattatggcccacagactgccccggagacctggaggacagcagtgctggcacttgggtgtccatgggcccgtctgccggctctgcctgtgctgcaagtgttggccgtgggtccagccaacaactccctacgtcctgtgtggggccctgcccaagtggatgaggcattccttgaggagtatcattttccctgacaatccccatcacctttaggggttccctgcttggctcctttccagctgaaaaactagacctgtgccattggggaagctggacaaagtctagggggcccgcctggtagagggtcccgggaagctggatctgtcagcctcggccctgaggcccctgttaactcaagactgtgagctgcctctaggtggtcacgtctgggagctagcttgtatggcttctgaccagtatcaggatttctgttctgagagcagcgtgggcagcaaggcagggcagcccagaggtggcagcggcaggcaatctggtcactaggtctttgtgatgccaaaaataaaagagggtggggtgggtgctttctgttcctctgattggatggagtccgccagcaggcatggggctacattccagtgcctgactatagggaggcactcctgattccatggagcagcccggactttgagaatgggctctggtttgcggggggcaggcgtaccagactgcaagaccccccagtacctcaccgtgccaaataggaagaggtggccttggtgtagccaaatggatctttttaacagtgtgcctttggggagggacccatgtccatggcttcgttgagggccatccatatgccagctgggggccagcccacagtggccatattggctgcagcaggaatggtgcccacctcggcgaattgaagggctaagagtcccagatagctaggccagagctggaagcagacagtaaggggaagagctgctcccacaggagagggagagattccagctcactgcgcagcctgggaggaggcgtggatcctggcacgctgagcctcaggcaccagcctccctgtgctcgacagcaaagtcttgactccttcctgctgagcactgtgctaccttcactgctccaaagccagactaacagctctccaagcccttggggtgactcggcttccaggagctgttggagaaatgaggatgtctgtccctgtctgcctgggcaggccagattcctccccagcagccgggtctctccagaccctgattcggtgcctttctgtttaccagctacttcaatcccaaagtttgaatctgcagataccttactcccagccactttgccttcttactgtgttgtgtgtttttcctggtgcttcaagagcgtgtgcagggcaagtgccgtcactgggaactgcaccagatgctcagacttggttgtcttatgtttaccaataaataaaagtagactttttctatttttatttgctgctatttgtgtgtgtgtttgtgtttgtgtagctaggtatctggcacttctgacgatgcattgttgcttttttcc

SEQ ID NO: 153672 - DNA, 1599 bp, Artificial Sequence
  derived and/or modified sequence
atggaggagctgagcagcgtgggcgagcaggtgttcgccgccgagtgcatcctgagcaagagactgagaaagggcaagctggagtacctggtgaagtggagaggctggagcagcaagcacaacagctgggagcccgaggagaacatcctggaccccagactgctgctggccttccagaagaaggagcacgagaaggaggtgcagaacagaaagagaggcaagagacccagaggcagacccagaaagctgaccgccatgagcagctgcagcagaagaagcaagctgaaggagcccgacgcccccagcaagagcaagagcagcagcagcagcagcagcagcaccagcagcagcagcagcagcgacgaggaggacgacagcgacctggacgccaagagaggccccagaggcagagagacccaccccgtgccccagaagaaggcccagatcctggtggccaagcccgagctgaaggaccccatcagaaagaagagaggcagaaagcccctgccccccgagcagaaggccaccagaagacccgtgagcctggccaaggtgctgaagaccgccagaaaggacctgggcgcccccgccagcaagctgcccccccccctgagcgcccccgtggccggcctggccgccctgaaggcccacgccaaggaggcctgcggcggccccagcgccatggccacccccgagaacctggccagcctgatgaagggcatggccagcagccccggcagaggcggcatcagctggcagagcagcatcgtgcactacatgaacagaatgacccagagccaggcccaggccgccagcagactggccctgaaggcccaggccaccaacaagtgcggcctgggcctggacctgaaggtgagaacccagaagggcgagctgggcatgagcccccccggcagcaagatccccaaggcccccagcggcggcgccgtggagcagaaggtgggcaacaccggcggccccccccacacccacggcgccagcagagtgcccgccggctgccccggcccccagcccgcccccacccaggagctgagcctgcaggtgctggacctgcagagcgtgaagaacggcatgcccggcgtgggcctgctggccagacacgccaccgccaccaagggcgtgcccgccaccaaccccgcccccggcaagggcaccggcagcggcctgatcggcgccagcggcgccaccatgcccaccgacaccagcaagagcgagaagctggccagcagagccgtggccccccccacccccgccagcaagagagactgcgtgaagggcagcgccacccccagcggccaggagagcagaaccgcccccggcgaggccagaaaggccgccaccctgcccgagatgagcgccggcgaggagagcagcagcagcgacagcgaccccgacagcgccagcccccccagcaccggccagaaccccagcgtgagcgtgcagaccagccaggactggaagcccaccagaagcctgatcgagcacgtgttcgtgaccgacgtgaccgccaacctgatcaccgtgaccgtgaaggagagccccaccagcgtgggcttcttcaacctgagacactactag

SEQ ID NO: 153673 - protein, 283 aa, Artificial Sequence
  derived and/or modified sequence
MAGNFWQSSHYLQWILDKQDLLKERQKDLKFLSEEEYWKLQIFFTNVIQALGEHLKLRQQVIATATVYFKRFYARYSLKSIDPVLMAPTCVFLASKVEEFGVVSNTRLIAAATSVLKTRFSYAFPKEFPYRMNHILECEFYLLELMDCCLIVYHPYRPLLQYVQDMGQEDMLLPLAWRIVNDTYRTDLCLLYPPFMIALACLHVACVVQQKDARQWFAELSVDMEKILEIIRVILKLYEQWKNFDERKEMATILSKMPKPKPPPNSEGEQGPNGSQNSSYSQS

SEQ ID NO: 153674 - protein, 198 aa, Artificial Sequence
  derived and/or modified sequence
MAPTCVFLASKVEEFGVVSNTRLIAAATSVLKTRFSYAFPKEFPYRMNHILECEFYLLELMDCCLIVYHPYRPLLQYVQDMGQEDMLLPLAWRIVNDTYRTDLCLLYPPFMIALACLHVACVVQQKDARQWFAELSVDMEKILEIIRVILKLYEQWKNFDERKEMATILSKMPKPKPPPNSEGEQGPNGSQNSSYSQS

SEQ ID NO: 153675 - protein, 162 aa, Artificial Sequence
  derived and/or modified sequence
MAPTCVFLASKVEEFGVVSNTRLIAAATSVLKTRFSYAFPKEFPYRMNHILECEFYLLELMDCCLIVYHPYRPLLQYVQDMGQEDMLLPLAWRIVNDTYRTDLCLLYPPFMIALACLHVACVVQQKDARQWFAELSVDMEKILEIIRVILKLYEQWKNFDER

SEQ ID NO: 153676 - DNA, 852 bp, Artificial Sequence
  derived and/or modified sequence
atggccggcaacttctggcagagcagccactacctgcagtggatcctggacaagcaggacctgctgaaggagagacagaaggacctgaagttcctgagcgaggaggagtactggaagctgcagatcttcttcaccaacgtgatccaggccctgggcgagcacctgaagctgagacagcaggtgatcgccaccgccaccgtgtacttcaagagattctacgccagatacagcctgaagagcatcgaccccgtgctgatggcccccacctgcgtgttcctggccagcaaggtggaggagttcggcgtggtgagcaacaccagactgatcgccgccgccaccagcgtgctgaagaccagattcagctacgccttccccaaggagttcccctacagaatgaaccacatcctggagtgcgagttctacctgctggagctgatggactgctgcctgatcgtgtaccacccctacagacccctgctgcagtacgtgcaggacatgggccaggaggacatgctgctgcccctggcctggagaatcgtgaacgacacctacagaaccgacctgtgcctgctgtacccccccttcatgatcgccctggcctgcctgcacgtggcctgcgtggtgcagcagaaggacgccagacagtggttcgccgagctgagcgtggacatggagaagatcctggagatcatcagagtgatcctgaagctgtacgagcagtggaagaacttcgacgagagaaaggagatggccaccatcctgagcaagatgcccaagcccaagcccccccccaacagcgagggcgagcagggccccaacggcagccagaacagcagctacagccagagctag

SEQ ID NO: 153677 - DNA, 2473 bp, Artificial Sequence
  derived and/or modified sequence
aacagaaccccgtatctgagccacttcgcctaggttagacccactcagcaactcccgtgctgaagacaggagaccgagcggcttgggcccccggccagaattctcaagacgctctcgcgagagccttccaaccgccgcgagctctcgtgaacactagttctcttcaatctcagcacctccaagggtcagcacctcccctccggctccctccgctaccgcgggccggaacttttgtcgataggaacgggtttgcacagttgagtgttgtcggccggcgtgaaggagactagggggccatcctcttcctttcgccgtcgccgccgcggagcggagtcgagccgagctgatttgatcgaggagcgcggttaccggacgggctgggtctatggtcgctccgcgggccgctccgccggctggtgcttttttatcagggcaagctgtgttccatggcagggaacttttggcagagctcccactatttgcaatggattttggataaacaagatctgttgaaggagcgccaaaaggatttaaagtttctctcagaggaagaatattggaagttacaaatattttttacaaatgttatccaagcattaggtgaacatcttaaattaagacaacaagttattgccactgctacggtatatttcaagagattctatgccaggtattctctgaaaagtatagatcctgtattaatggctcctacatgtgtgtttttggcatccaaagtagaggaatttggagtagtttcaaatacaagattgattgctgctgctacttctgtattaaaaactagattttcatatgcctttccaaaggaatttccttataggatgaatcatatattagaatgtgaattctatctgttagaactaatggattgttgcttgatagtgtatcatccttatagacctttgctccagtatgtgcaggacatgggccaagaagacatgttgcttccccttgcatggaggatagtgaatgatacctacagaacggatctttgcctactgtatcctcctttcatgatagctttagcttgcctacatgtagcctgtgttgtacagcagaaagatgccaggcaatggtttgctgagctttctgtggatatggaaaagattttggaaataatcagggttattttaaaactatatgagcagtggaagaatttcgatgagagaaaagagatggcaaccattcttagtaagatgccaaaaccaaaaccacctccaaacagtgaaggagagcagggtccaaatggaagtcagaactctagctacagccaatcttaaaacattccgaagaattccatagtggaccacttggaaataaaccattggacagatttcagtaatgtcttcagtggaacacaaatgaaaatgaatagcttgtttctgtcaagcatattggaaagtgattttatttttgcaaaataagtttttctttaatatgattctagtacataattgattaaaatctcttgattataaatgtttggaaaggttctaaggggacctacagacagacatacatagacatttcaaaattaatagcttttgattagtataatatttcttaatttggataataaaaattgtagctttttattaagccaggaaacatgaagcataatttgtttaaaattctctttggtcattgagggaccaaaaaaggacgtaaaatttacagtcaatctatgagggtttttttccctccataagtttaactttaaaactgtatttaaggaatcaaatcttacaaaatcctggaagattttggtaatgatgttgataatttcagggaaattaatcaagtacctatattgatttaaaagtgtattttattcagtagtttgaggatcttgccatggaagatactagcccagcctagcagaaaagtgcaatatgtatagcatactttgacattttaaacatgatagtccataaccattttgaaatgctgggcaaactacatgaagttatttataattaattcacagctaatcaggcattttgaaagcttaattggattcaaaaaccataatgttggaatttggtaaaattttaatgttgatttttactgtgaaaaggtttttataagatatacacaccctagtttaatgttgtgtcttggtgtggatttacagatttactacaggtattctgaaccaggaacacaatcaggtttcaggccagtttgatactggctgtccttaattctaatatgagagtaggacatcatactaaatgttatgtcagtgggactgtactgtctgtggaacttagcaaattaatcattttcttcagacttgaaggagagtgataaataaaatttggagtcataggatattgatgcacaatttaaggattaaacatttttaatcaattgtggatgatggcttattaaatgttgacttcctagtataaaactgcaagaataaaagtaacttctccagctgtatcgacta

SEQ ID NO: 153678 - DNA, 1035 bp, Artificial Sequence
  derived and/or modified sequence
gaacactagttctcttcaatctcagcacctccaagggtcagcacctcccctccggctccctccgctaccgcgggccggaacttttgtcgataggaacgggtttgcacatttgcaatggattttggataaacaagatctgttgaaggagcgccaaaaggatttaaagtttctctcagaggaagaatattggaagttacaaatattttttacaaatgttatccaagcattaggtgaacatcttaaattaagacaacaagttattgccactgctacggtatatttcaagagattctatgccaggtattctctgaaaagtatagatcctgtattaatggctcctacatgtgtgtttttggcatccaaagtagaggaatttggagtagtttcaaatacaagattgattgctgctgctacttctgtattaaaaactagattttcatatgcctttccaaaggaatttccttataggatgaatcatatattagaatgtgaattctatctgttagaactaatggattgttgcttgatagtgtatcatccttatagacctttgctccagtatgtgcaggacatgggccaagaagacatgttgcttccccttgcatggaggatagtgaatgatacctacagaacggatctttgcctactgtatcctcctttcatgatagctttagcttgcctacatgtagcctgtgttgtacagcagaaagatgccaggcaatggtttgctgagctttctgtggatatggaaaagattttggaaataatcagggttattttaaaactatatgagcagtggaagaatttcgatgagagaaaagagatggcaaccattcttagtaagatgccaaaaccaaaaccacctccaaacagtgaaggagagcagggtccaaatggaagtcagaactctagctacagccaatcttaaaacattccgaagaattccatagtggaccacttggaaataaaccattggacagatttcagtaatgtcttcagtggaacacaaatgaaaatgaatagcttgtttctgtc

SEQ ID NO: 153679 - DNA, 958 bp, Artificial Sequence
  derived and/or modified sequence
gtcgccgccgcggagcggagtcgagccgagctgatttgatcgaggagcgcggttaccggacgggctgggtctatggtcgctccgcgggccgctccgccggctggtgcttttttatcagggcaagctgtgttccatggcagggaacttttggcagagctcccactattatccaagcattaggtgaacatcttaaattaagacaacaagttattgccactgctacggtatatttcaagagattctatgccaggtattctctgaaaagtatagatcctgtattaatggctcctacatgtgtgtttttggcatccaaagtagaggaatttggagtagtttcaaatacaagattgattgctgctgctacttctgtattaaaaactagattttcatatgcctttccaaaggaatttccttataggatgaatcatatattagaatgtgaattctatctgttagaactaatggattgttgcttgatagtgtatcatccttatagacctttgctccagtatgtgcaggacatgggccaagaagacatgttgcttccccttgcatggaggatagtgaatgatacctacagaacggatctttgcctactgtatcctcctttcatgatagctttagcttgcctacatgtagcctgtgttgtacagcagaaagatgccaggcaatggtttgctgagctttctgtggatatggaaaagattttggaaataatcagggttattttaaaactatatgagcagtggaagaatttcgatgagagaaaagagatggcaaccattcttagtaagatgccaaaaccaaaaccacctccaaacagtgaaggagagcagggtccaaatggaagtcagaactctagctacagccaatcttaaaacattccgaagaattccatagtggaccacttggaaataaaccattggacagatttcagtaatgtcttcagtggaacaca

SEQ ID NO: 153680 - DNA, 852 bp, Artificial Sequence
  derived and/or modified sequence
atggcaggtaatttttggcagtcctcccattatcttcagtggatcctggataaacaggatttgctgaaagagaggcagaaggatctgaagttcttgagcgaggaggagtactggaagctccagatctttttcaccaatgtaatccaggcattgggcgagcatctgaagcttagacagcaggtcatcgcgacagccactgtgtactttaagaggttttacgcacggtactctttaaaaagtattgacccggtccttatggcgcccacgtgtgtgtttttggcaagcaaggtagaagaatttggagttgtatcaaacacaaggcttatcgcagccgcaacgtccgttcttaaaactcgcttcagttacgcttttcccaaggaatttccctacagaatgaatcacatcctggaatgtgaattttatctcttagagctgatggactgctgcttaattgtttaccacccctaccgacctctgctccagtacgtgcaggacatggggcaggaggacatgctccttcctctggcctggcgtatagtcaacgacacctaccggactgatttgtgccttctgtacccaccattcatgatcgccctggcttgtctccacgttgcttgtgtggtccaacaaaaagacgctagacagtggtttgcggagttatctgtggacatggaaaagatacttgagataataagagttatcctaaaactgtacgagcagtggaaaaacttcgacgagcgaaaagaaatggctacgatcctgtcgaagatgcccaagcccaagcccccgcctaactctgagggagagcagggccctaatggctcccagaattcttcctactcgcagtcttag

SEQ ID NO: 153681 - DNA, 852 bp, Artificial Sequence
  derived and/or modified sequence
atggccggcaacttctggcagagcagccactacctgcagtggatcctggacaagcaggacctgctgaaggagcggcagaaggacctgaagttcctgtctgaggaggagtactggaagctgcagatcttcttcaccaacgtcatccaggccctgggggagcacctgaagctgcggcagcaggtgattgccacagccaccgtgtacttcaagcgcttctacgcccgctacagcctgaagagcattgatcctgtgctgatggcccccacctgtgtgttcctggccagcaaggtggaggagtttggagtggtgagcaacacccggctgattgctgctgccacctctgtgctgaagacccgcttctcctatgccttccccaaggagttcccctacaggatgaaccacatcctggagtgtgagttctacctgctggagctgatggactgctgcctgattgtgtaccacccctaccggcccctgctgcagtatgtgcaggacatgggccaggaggacatgctgctgcccctggcctggagaattgtgaatgacacctacagaacagacctgtgcctgctgtacccacccttcatgattgccctggcctgcctgcacgtggcctgtgtggtgcagcagaaggatgcccggcagtggtttgctgagctgtctgtggacatggagaagatcctggagatcatccgggtcatcctgaagctgtatgagcagtggaagaactttgatgagaggaaggagatggccaccatcctgagcaagatgcccaagcccaagcccccacccaacagcgagggggagcagggccccaacggcagccagaacagcagctacagccagagctag

SEQ ID NO: 153682 - DNA, 852 bp, Artificial Sequence
  derived and/or modified sequence
atggccggcaacttctggcagagcagccactacctgcagtggatcctggataaacaggacttactgaaagaacgacaaaaggatctgaagttcctgagcgaggaggaatactggaagttacagatcttcttcacaaatgtgattcaggcattaggcgagcacttaaagctgcgccagcaggtaatcgctactgcgacagtgtactttaaaaggttttacgcccggtattccctgaagagcatcgacccggtcctgatggcgccaacgtgcgtttttctcgccagcaaagtggaggaatttggggtggtgtcaaatacgaggttaatagccgctgccaccagtgtgctcaaaactcgtttcagctacgccttccccaaggaattcccttaccgtatgaatcatatcctggagtgtgaattttacttactcgagctgatggactgctgcctaatagtctatcacccataccggccactgttacagtatgtacaggacatggggcaagaagacatgctgcttcctctggcctggagaattgttaacgacacgtaccgcaccgacctctgcctgctgtatcctccatttatgattgctctcgcttgtctacatgttgcttgtgtagtgcaacaaaaagacgcgaggcagtggttcgcagagcttagcgtggatatggagaaaatcctcgagattatccgagtgatcttgaaactgtacgaacagtggaaaaacttcgacgagcggaaagagatggcgaccatcctgtccaagatgccaaagcccaaacctccacccaactccgagggcgaacagggccccaatggtagccagaactctagctatagccaatcctag

SEQ ID NO: 153683 - DNA, 852 bp, Artificial Sequence
  derived and/or modified sequence
atggcaggtaatttttggcagtcctctcattatctccagtggatcctagataaacaggatctgcttaaggagcgccagaaggaccttaagtttctgtccgaagaggaatactggaaactgcagatttttttcactaacgttatccaggccctgggagaacacctgaaattacgacagcaagtcattgcgaccgccactgtctattttaagcgtttttacgcacgatacagcctgaagtcaatcgatcccgtgctgatggcgccaacgtgcgtctttttggcctccaaagtcgaggaatttggagttgtgtccaataccagactgatcgctgcagccacttctgttctgaagacaagattcagctatgctttccccaaggagttcccataccgaatgaatcacatcttagagtgtgagttctacctgctggagctcatggattgttgcctgatcgtctatcatccatatagacccctgctccagtacgttcaggacatgggccaggaagacatgctgttgccactcgcctggcgaatcgtcaatgatacctacaggaccgatttatgcctgctctatcctcctttcatgatagccttggcttgtctgcatgtggcttgcgtggtccagcagaaggacgccagacaatggttcgctgagctgtctgtggacatggaaaaaattttagagattatcagggtgatcctgaagctatatgaacagtggaaaaattttgacgaacgcaaggagatggcgacaatactgagcaaaatgcccaagccaaaaccacctcccaattccgagggcgagcaaggcccaaatgggtctcagaactcaagttatagccagagctag

SEQ ID NO: 153684 - protein, 288 aa, Artificial Sequence
  derived and/or modified sequence
MGHTRRQGTSPSKCPYLNFFQLLVLAGLSHFCSGVIHVTKEVKEVATLSCGHNVSVEELAQTRIYWQKEKKMVLTMMSGDMNIWPEYKNRTIFDITNNLSIVILALRPSDEGTYECVVLKYEKDAFKREHLAEVTLSVKADFPTPSISDFEIPTSNIRRIICSTSGGFPEPHLSWLENGEELNAINTTVSQDPETELYAVSSKLDFNMTTNHSFMCLIKYGHLRVNQTFNWNTTKQEHFPDNLLPSWAITLISVNGIFVICCLTYCFAPRCRERRRNERLRRESVRPV

SEQ ID NO: 153685 - DNA, 867 bp, Artificial Sequence
  derived and/or modified sequence
atgggtcacacgcggaggcagggcactagtccatcaaaatgcccctatctgaatttcttccagctgttggtcctggccggcctctcacacttttgcagcggcgtgatccatgtcaccaaggaagtcaaggaagtcgcaaccctgtcttgcgggcataatgttagcgtggaggagctggcccagactcgaatttactggcaaaaagagaagaagatggttctcacaatgatgtcaggcgatatgaacatttggcccgaatacaaaaaccggacgatctttgacattaccaacaatctttccattgtcatattagctctgaggcccagcgacgaagggacatacgagtgcgtcgtgcttaaatatgagaaggatgcatttaaaagggagcaccttgcagaagtgacgctcagtgtcaaggcagactttccgacccccagcatcagtgatttcgaaattccaacatccaatatacgtagaatcatttgttcgacgtccggaggctttcccgagccacatctctcctggctggaaaacggcgaggagcttaatgccatcaacaccacagtgtcacaggatcctgaaaccgagctttacgccgttagctctaagctggatttcaatatgaccacaaaccacagttttatgtgtttaattaagtacgggcacctgagagtgaatcagaccttcaattggaataccaccaagcaagagcacttccctgataacttgctcccgtcctgggcaattactctcatttcagtgaacggcatatttgtcatctgttgtcttacctactgtttcgcaccgaggtgcagagaacgcagaaggaacgaaagactccggcgggaaagcgtcagacctgtttag

SEQ ID NO: 153686 - DNA, 867 bp, Artificial Sequence
  derived and/or modified sequence
atgggccacacccgccgacaaggcacaagcccaagcaaatgtccttacctcaattttttccagctacttgttctcgcaggactctcgcacttctgctctggggtgattcatgtgactaaagaggtcaaagaagttgcaaccctgtcatgtggccacaacgtgtctgtggaagaactggcacagacccgaatttattggcagaaggagaagaaaatggttctcacaatgatgagtggggacatgaacatctggcctgagtacaagaacaggactatctttgacatcacaaacaacctttcaatcgtcatactggctctcagaccatccgacgaggggacatatgaatgcgtggtgctgaaatatgaaaaagatgcctttaaacgtgaacaccttgcagaagtgaccctctctgtgaaagccgactttcccacacccagcatcagcgattttgaaatcccaaccagcaacatccgccgcattatatgtagtacaagcggtggattccccgaaccacacctgtcttggctggaaaatggagaggaactcaacgccatcaacacgactgtgtctcaggaccccgagacggagctttacgcggtgagctccaaactggattttaatatgacaacaaaccactccttcatgtgcctcatcaagtatggtcatctgcgggtgaatcagacattcaattggaacaccaccaaacaagagcactttccggacaatctactcccgtcctgggctataactctgattagcgtgaatggtattttcgtgatttgttgtctaacctactgttttgcgccaaggtgtcgtgaaagacgccgcaatgaacggctgagaagggaatccgtgcggcccgtctag

SEQ ID NO: 153687 - DNA, 867 bp, Artificial Sequence
  derived and/or modified sequence
atgggccacacccggcggcagggcaccagccccagcaaatgtccctacctgaacttcttccagctgctggtgctggccggcctgagccacttctgcagcggggtcatccacgtgaccaaggaggtgaaggaggtggccaccctgagctgtggccacaacgtgtctgtggaggagctggcccagacccgcatctactggcagaaggagaagaagatggtgctgaccatgatgtctggggacatgaacatctggccagagtacaagaacagaaccatctttgacatcaccaacaacctgagcatcgtcatcctggccctgcggcccagtgatgagggcacctatgaatgtgtggtgctgaagtatgagaaggatgccttcaagcgggagcacctggccgaggtgaccctgtctgtgaaggctgacttccccacccccagcatcagtgactttgagatccccaccagcaacatccgccgcatcatctgcagcaccagcggcggcttccctgagccccacctgtcctggctggagaatggagaggagctgaatgccatcaacaccaccgtgtcccaggaccctgagacagagctgtatgctgtgagcagcaagctggacttcaacatgaccaccaaccacagcttcatgtgcctgatcaagtatggccacctgcgggtgaaccagaccttcaactggaacaccaccaagcaggagcacttcccagacaacctgctgcccagctgggccatcaccctcatctctgtgaatggcatcttcgtcatctgctgcctgacctactgctttgccccccgctgccgggagaggagaagaaatgaaaggctgcggcgggagagcgtgcggcctgtgtag

SEQ ID NO: 153688 - DNA, 867 bp, Artificial Sequence
  derived and/or modified sequence
atgggccacacccggcggcagggcaccagccccagcaagtgcccctacttaaatttctttcaactgctggtgctggcagggctgtcccacttctgctcgggcgtcattcacgtgacaaaggaggtgaaagaagtggccactttatcatgtggccacaatgtttctgtcgaggagctcgcccagaccagaatctattggcagaaggaaaagaagatggtgctgacgatgatgtccggtgacatgaatatctggcccgaatataagaatcggaccatctttgatattacgaacaatctgtctatcgtcatcctggcactcagaccaagtgacgagggaacgtacgaatgcgtagtcctgaaatacgaaaaagacgctttcaaacgtgaacaccttgccgaggtgactttgtccgttaaagcagatttccctactccatctatctcagattttgagattcctactagtaatatccgacggataatttgcagcacatcaggaggctttcctgagccgcacctttcttggctggaaaacggcgaagaacttaatgctattaacacgacggtgtctcaggatccagaaacagagctgtacgctgtgtcctccaagcttgacttcaatatgactaccaaccattcctttatgtgtcttattaaatacggccacttgcgggttaatcaaacatttaactggaatactacaaagcaggagcatttcccggacaacttgctgcccagctgggctattactcttatatcagtaaacggcatatttgtgatttgttgccttacctattgttttgcaccccggtgtcgggagcggcggaggaacgagcgtttacgacgcgaatctgtaagacccgtttag

SEQ ID NO: 153689 - DNA, 867 bp, Artificial Sequence
  derived and/or modified sequence
atgggccacacccggcggcagggcaccagccccagcaagtgcccctacctgaacttctttcagctgctcgtgctagcaggactgtctcacttctgctcgggggttatccatgtcactaaggaagtcaaagaggtagccactctgtcttgcgggcacaacgtgagcgtagaagaattggcccagacgcggatttactggcagaaagaaaagaaaatggtccttaccatgatgtctggggacatgaatatttggcccgagtataaaaaccggacaatctttgatattactaataacctgagcattgtcattctagccctccgaccatccgacgaagggacatacgaatgcgtagttcttaagtatgagaaggacgcgttcaagagagaacacctcgcagaagtgaccctgtccgtgaaggctgatttcccaactccaagcattagcgatttcgagatacctacctctaacatccgaaggattatctgtagcacatcagggggctttcccgaaccccatctgtcttggctggagaacggggaagaattgaacgctattaacactaccgtctcacaggaccccgaaactgagctatacgcagtctcttccaagctggactttaatatgaccacaaatcattccttcatgtgcttgatcaagtacggccacctgagagtgaaccagaccttcaactggaacactacaaagcaggagcattttccagataatctcctcccttcctgggccattaccctgattagtgtaaacggtattttcgtgatctgttgccttacctattgttttgccccacgctgccgggaaaggaggcgtaacgaacgcctgcggcgcgagtcagtgcgccctgtgtag

SEQ ID NO: 153690 - DNA, 867 bp, Artificial Sequence
  derived and/or modified sequence
atgggtcacacgcgcagacaaggcacttcccccagcaagtgcccttatctgaacttttttcaactgcttgttctggctggtctgtctcatttttgctcaggggtgatacacgtcactaaagaggttaaggaggtggccactttaagttgtggacacaacgtttccgtggaggagttagcacagacaaggatctattggcaaaaggagaagaagatggtcctgactatgatgtctggagatatgaacatctggccggagtacaagaatcgaacaatcttcgacatcacaaataacttaagtattgtcatccttgccttgaggccaagcgacgagggaacgtacgagtgcgtggtgctgaaatatgaaaaggatgcttttaagagagagcacctggccgaagttactctcagcgtgaaggccgacttcccgacgccctccatttctgactttgagatccccacaagcaatatacgtcgcatcatatgcagcaccagcggtggctttccggagccacatctatcctggttagagaacggggaagagctaaatgctattaatacgaccgtgtcgcaggatccagagacagaactgtacgctgtctcaagtaagctggattttaacatgaccacaaatcattctttcatgtgtctgatcaagtatggtcatctgagagtcaatcagaccttcaattggaacaccactaaacaagaacacttcccagacaatctgctgccgtcatgggccatcacgttgatatcagtgaatggcatatttgtgatttgttgcctaacatattgcttcgccccacgttgcagggaacgcagaagaaatgaacggctgcgacgcgagagtgttagacccgtgtag

SEQ ID NO: 153691 - DNA, 867 bp, Artificial Sequence
  derived and/or modified sequence
atgggccacacaaggaggcagggaactagcccttcaaaatgtccctatctgaattttttccagcttcttgtcctggctggcctatcccatttttgcagcggggtcatccacgtgacgaaagaggtaaaagaagtcgcaacgctctcttgtgggcataacgtgtctgtggaggaactggcccagacgcggatttattggcaaaaggaaaagaagatggtgcttactatgatgagcggtgacatgaacatttggcccgaatataaaaaccgtaccattttcgatattactaataacctgtcaatagtcatcttggccctccgacccagtgatgaaggaacctatgagtgcgtcgtgctcaagtacgaaaaggacgctttcaagagagagcatttggccgaggtgacgctgtctgtaaaggccgattttccaaccccctctatttctgactttgaaatcccgacaagtaacatccggcgtatcatttgttcaaccagcgggggttttccagaaccccatctgagctggctcgagaacggggaagagctgaatgccatcaacaccaccgtgagccaggatcctgaaacagagctctacgccgtaagcagcaagcttgactttaatatgaccacaaaccatagttttatgtgtttaatcaagtatggacatcttagagttaaccagacattcaattggaacaccaccaagcaagaacacttccctgataaccttctccctagttgggccatcacccttatttcagtaaatggcatcttcgtcatctgttgtctgacttactgctttgcaccacgttgtcgcgagcgacggaggaacgaacgcctacgcagagaatctgtgagacctgtgtag

SEQ ID NO: 153692 - DNA, 2725 bp, Artificial Sequence
  derived and/or modified sequence
aagtaacagaagttagaaggggaaatgtcgcctctctgaagattacccaaagaaaaagtgatttgtcattgctttatagactgtaagaagagaacatctcagaagtggagtcttaccctgaaatcaaaggatttaaagaaaaagtggaatttttcttcagcaagctgtgaaactaaatccacaacctttggagacccaggaacaccctccaatctctgtgtgttttgtaaacatcactggagggtcttctacgtgagcaattggattgtcatcagccctgcctgttttgcacctgggaagtgccctggtcttacttgggtccaaattgttggctttcacttttgaccctaagcatctgaagccatgggccacacacggaggcagggaacatcaccatccaagtgtccatacctcaatttctttcagctcttggtgctggctggtctttctcacttctgttcaggtgttatccacgtgaccaaggaagtgaaagaagtggcaacgctgtcctgtggtcacaatgtttctgttgaagagctggcacaaactcgcatctactggcaaaaggagaagaaaatggtgctgactatgatgtctggggacatgaatatatggcccgagtacaagaaccggaccatctttgatatcactaataacctctccattgtgatcctggctctgcgcccatctgacgagggcacatacgagtgtgttgttctgaagtatgaaaaagacgctttcaagcgggaacacctggctgaagtgacgttatcagtcaaagctgacttccctacacctagtatatctgactttgaaattccaacttctaatattagaaggataatttgctcaacctctggaggttttccagagcctcacctctcctggttggaaaatggagaagaattaaatgccatcaacacaacagtttcccaagatcctgaaactgagctctatgctgttagcagcaaactggatttcaatatgacaaccaaccacagcttcatgtgtctcatcaagtatggacatttaagagtgaatcagaccttcaactggaatacaaccaagcaagagcattttcctgataacctgctcccatcctgggccattaccttaatctcagtaaatggaatttttgtgatatgctgcctgacctactgctttgccccaagatgcagagagagaaggaggaatgagagattgagaagggaaagtgtacgccctgtataacagtgtccgcagaagcaaggggctgaaaagatctgaaggtcccacctccatttgcaattgacctcttctgggaacttcctcagatggacaagattaccccaccttgccctttacgtatctgctcttaggtgcttcttcacttcagttgctttgcaggaagtgtctagaggaatatggtgggcacagaagtagctctggtgaccttgatcaaggtgttttgaaatgcagaattcttgagttctggaagggactttagagaataccagtgttattaatgacaaaggcactgaggcccagggaggtgacccgaattataaaggccagcgccagaacccagatttcctaactctggtgctctttccctttatcagtttgactgtggcctgttaactggtatatacatatatatgtcaggcaaagtgctgctggaagtagaatttgtccaataacaggtcaacttcagagactatctgatttcctaatgtcagagtagaagattttatgctgctgtttacaaaagcccaatgtaatgcataggaagtatggcatgaacatctttaggagactaatggaaatattattggtgtttacccagtattccatttttttcattgtgttctctattgctgctctctcactcccccatgaggtacagcagaaaggagaactatccaaaactaatttcctctgacatgtaagacgaatgatttaggtacgtcaaagcagtagtcaaggaggaaagggatagtccaaagacttaactggttcatattggactgataatctctttaaatggctttatgctagtttgacctcatttgtaaaatatttatgagaaagttctcatttaaaatgagatcgttgtttacagtgtatgtactaagcagtaagctatcttcaaatgtctaaggtagtaactttccatagggcctccttagatccctaagatggctttttctccttggtatttctgggtctttctgacatcagcagagaactggaaagacatagccaactgctgttcatgttactcatgactcctttctctaaaactgccttccacaattcactagaccagaagtggacgcaacttaagctgggataatcacattatcatctgaaaatctggagttgaacagcaaaagaagacaacatttctcaaatgcacatctcatggcagctaagccacatggctgggatttaaagcctttagagccagcccatggctttagctacctcactatgctgcttcacaaaccttgctcctgtgtaaaactatattctcagtgtagggcagagaggtctaacaccaacataaggtactagcagtgtttcccgtattgacaggaatacttaactcaataattcttttcttttccatttagtaacagttgtgatgactatgtttctattctaagtaattcctgtattctacagcagatactttgtcagcaatactaagggaagaaacaaagttgaaccgtttctttaataa

SEQ ID NO: 153693 - DNA, 1491 bp, Artificial Sequence
  derived and/or modified sequence
ccaaagaaaaagtgatttgtcattgctttatagactgtaagaagagaacatctcagaagtggagtcttaccctgaaatcaaaggatttaaagaaaaagtggaatttttcttcagcaagctgtgaaactaaatccacaacctttggagacccaggaacaccctccaatctctgtgtgttttgtaaacatcactggagggtcttctacgtgagcaattggattgtcatcagccctgcctgttttgcacctgggaagtgccctggtcttacttgggtccaaattgttggctttcacttttgaccctaagcatctgaagccatgggccacacacggaggcagggaacatcaccatccaagtgtccatacctcaatttctttcagctcttggtgctggctggtctttctcacttctgttcaggtgttatccacgtgaccaaggaagtgaaagaagtggcaacgctgtcctgtggtcacaatgtttctgttgaagagctggcacaaactcgcatctactggcaaaaggagaagaaaatggtgctgactatgatgtctggggacatgaatatatggcccgagtacaagaaccggaccatctttgatatcactaataacctctccattgtgatcctggctctgcgcccatctgacgagggcacatacgagtgtgttgttctgaagtatgaaaaagacgctttcaagcgggaacacctggctgaagtgacgttatcagtcaaagctgacttccctacacctagtatatctgactttgaaattccaacttctaatattagaaggataatttgctcaacctctggaggttttccagagcctcacctctcctggttggaaaatggagaagaattaaatgccatcaacacaacagtttcccaagatcctgaaactgagctctatgctgttagcagcaaactggatttcaatatgacaaccaaccacagcttcatgtgtctcatcaagtatggacatttaagagtgaatcagaccttcaactggaatacaaccaagcaagagcattttcctgataacctgctcccatcctgggccattaccttaatctcagtaaatggaatttttgtgatatgctgcctgacctactgctttgccccaagatgcagagagagaaggaggaatgagagattgagaagggaaagtgtacgccctgtataacagtgtccgcagaagcaaggggctgaaaagatctgaaggtagcctccgtcatctcttctgggatacatggatcgtggggatcatgaggcattcttcccttaacaaatttaagctgttttacccactacctcaccttcttaaaaacctctttcagattaagctgaacagttacaagatggctggcatccctctcctttctccccatatgcaatttgcttaatgtaacctcttcttttgccatgtttccattctgccatcttgaattgtcttgtcagccaattcattatctattaaacactaatttgag

SEQ ID NO: 153694 - DNA, 867 bp, Artificial Sequence
  derived and/or modified sequence
atgggccacaccagaagacagggcaccagccccagcaagtgcccctacctgaacttcttccagctgctggtgctggccggcctgagccacttctgcagcggcgtgatccacgtgaccaaggaggtgaaggaggtggccaccctgagctgcggccacaacgtgagcgtggaggagctggcccagaccagaatctactggcagaaggagaagaagatggtgctgaccatgatgagcggcgacatgaacatctggcccgagtacaagaacagaaccatcttcgacatcaccaacaacctgagcatcgtgatcctggccctgagacccagcgacgagggcacctacgagtgcgtggtgctgaagtacgagaaggacgccttcaagagagagcacctggccgaggtgaccctgagcgtgaaggccgacttccccacccccagcatcagcgacttcgagatccccaccagcaacatcagaagaatcatctgcagcaccagcggcggcttccccgagccccacctgagctggctggagaacggcgaggagctgaacgccatcaacaccaccgtgagccaggaccccgagaccgagctgtacgccgtgagcagcaagctggacttcaacatgaccaccaaccacagcttcatgtgcctgatcaagtacggccacctgagagtgaaccagaccttcaactggaacaccaccaagcaggagcacttccccgacaacctgctgcccagctgggccatcaccctgatcagcgtgaacggcatcttcgtgatctgctgcctgacctactgcttcgcccccagatgcagagagagaagaagaaacgagagactgagaagagagagcgtgagacccgtgtag

SEQ ID NO: 153695 - protein, 212 aa, Artificial Sequence
  derived and/or modified sequence
MKPPSSIQTSEFDSSDEEPIEDEQTPIHISWLSLSRVNCSQFLGLCALPGCKFKDVRRNVQKDTEELKSCGIQDIFVFCTRGELSKYRVPNLLDLYQQCGIITHHHPIADGGTPDIASCCEIMEELTTCLKNYRKTLIHCYGGLGRSCLVAACLLLYLSDTISPEQAIDSLRDLRGSGAIQTIKQYNYLHEFRDKLAAHLSSRDSQSRSVSR

SEQ ID NO: 153696 - protein, 166 aa, Artificial Sequence
  derived and/or modified sequence
MNPCCKFKDVRRNVQKDTEELKSCGIQDIFVFCTRGELSKYRVPNLLDLYQQCGIITHHHPIADGGTPDIASCCEIMEELTTCLKNYRKTLIHCYGGLGRSCLVAACLLLYLSDTISPEQAIDSLRDLRGSGAIQTIKQYNYLHEFRDKLAAHLSSRDSQSRSVSR

SEQ ID NO: 153697 - protein, 69 aa, Artificial Sequence
  derived and/or modified sequence
MKPPSSIQTSEFDSSDEEPIEDEQTPIHISWLSLSRVNCSQFLGLCALPGCKFKDVRRNVQKEKKKKKK

SEQ ID NO: 153698 - protein, 207 aa, Artificial Sequence
  derived and/or modified sequence
MKPPSSIQTSEFDSSDEEPIEDEQTPIHISWLSLSRVNCSQFLGLCALPGCKFKDVRRNVQKDTEELKSCGIQDIFVFCTRGELSKYRVPNLLDLYQQCGIITHHHPIADGGTPDIASCCEIMEELTTCLKNLFCYGGLGRSCLVAACLLLYLSDTISPEQAIDSLRDLRGSGAIQTIKQYNYLHEFRDKLAAHLSSRDSQSRSVSR

SEQ ID NO: 153699 - DNA, 639 bp, Artificial Sequence
  derived and/or modified sequence
atgaagccccccagcagcatccagaccagcgagttcgacagcagcgacgaggagcccatcgaggacgagcagacccccatccacatcagctggctgagcctgagcagagtgaactgcagccagttcctgggcctgtgcgccctgcccggctgcaagttcaaggacgtgagaagaaacgtgcagaaggacaccgaggagctgaagagctgcggcatccaggacatcttcgtgttctgcaccagaggcgagctgagcaagtacagagtgcccaacctgctggacctgtaccagcagtgcggcatcatcacccaccaccaccccatcgccgacggcggcacccccgacatcgccagctgctgcgagatcatggaggagctgaccacctgcctgaagaactacagaaagaccctgatccactgctacggcggcctgggcagaagctgcctggtggccgcctgcctgctgctgtacctgagcgacaccatcagccccgagcaggccatcgacagcctgagagacctgagaggcagcggcgccatccagaccatcaagcagtacaactacctgcacgagttcagagacaagctggccgcccacctgagcagcagagacagccagagcagaagcgtgagcagatag

SEQ ID NO: 153700 - DNA, 501 bp, Artificial Sequence
  derived and/or modified sequence
atgaacccctgctgcaagttcaaggacgtgagaagaaacgtgcagaaggacaccgaggagctgaagagctgcggcatccaggacatcttcgtgttctgcaccagaggcgagctgagcaagtacagagtgcccaacctgctggacctgtaccagcagtgcggcatcatcacccaccaccaccccatcgccgacggcggcacccccgacatcgccagctgctgcgagatcatggaggagctgaccacctgcctgaagaactacagaaagaccctgatccactgctacggcggcctgggcagaagctgcctggtggccgcctgcctgctgctgtacctgagcgacaccatcagccccgagcaggccatcgacagcctgagagacctgagaggcagcggcgccatccagaccatcaagcagtacaactacctgcacgagttcagagacaagctggccgcccacctgagcagcagagacagccagagcagaagcgtgagcagatag

SEQ ID NO: 153701 - DNA, 624 bp, Artificial Sequence
  derived and/or modified sequence
atgaagccccccagcagcatccagaccagcgagttcgacagcagcgacgaggagcccatcgaggacgagcagacccccatccacatcagctggctgagcctgagcagagtgaactgcagccagttcctgggcctgtgcgccctgcccggctgcaagttcaaggacgtgagaagaaacgtgcagaaggacaccgaggagctgaagagctgcggcatccaggacatcttcgtgttctgcaccagaggcgagctgagcaagtacagagtgcccaacctgctggacctgtaccagcagtgcggcatcatcacccaccaccaccccatcgccgacggcggcacccccgacatcgccagctgctgcgagatcatggaggagctgaccacctgcctgaagaacctgttctgctacggcggcctgggcagaagctgcctggtggccgcctgcctgctgctgtacctgagcgacaccatcagccccgagcaggccatcgacagcctgagagacctgagaggcagcggcgccatccagaccatcaagcagtacaactacctgcacgagttcagagacaagctggccgcccacctgagcagcagagacagccagagcagaagcgtgagcagatag

SEQ ID NO: 153702 - DNA, 893 bp, Artificial Sequence
  derived and/or modified sequence
acagaaggacgaaccagtgagctaagctgcggggcgcgggctcggccggggcaccggtgagtcgccggcgctgcagagggaggcggcactggtctcgacgtggggcggccagcgatgaagccgcccagttcaatacaaacaagtgagtttgactcatcagatgaagagcctattgaagatgaacagactccaattcatatatcatggctatctttgtcacgagtgaattgttctcagtttctcggtttatgtgctcttccaggttgtaaatttaaagatgttagaagaaatgtccaaaaagatacagaagaactaaagagctgtggtatacaagacatatttgttttctgcaccagaggggaactgtcaaaatatagagtcccaaaccttctggatctctaccagcaatgtggaattatcacccatcatcatccaatcgcagatggagggactcctgacatagccagctgctgtgaaataatggaagagcttacaacctgccttaaaaattaccgaaaaaccttaatacactgctatggaggacttgggagatcttgtcttgtagctgcttgtctcctactatacctgtctgacacaatatcaccagagcaagccatagacagcctgcgagacctaagaggatccggggcaatacagaccatcaagcaatacaattatcttcatgagtttcgggacaaattagctgcacatctatcatcaagagattcacaatcaagatctgtatcaagataaaggaattcaaatagcatatatatgaccatgtctgaaatgtcagttctctagcataatttgtattgaaatgaaaccaccagtgttatcaacttgaatgtaaatgtacatgtgcagatattcctaaagttttattgacaaaa

SEQ ID NO: 153703 - DNA, 637 bp, Artificial Sequence
  derived and/or modified sequence
atgaatccctgttgtaaatttaaagatgttagaagaaatgtccaaaaagatacagaagaactaaagagctgtggtatacaagacatatttgttttctgcaccagaggggaactgtcaaaatatagagtcccaaaccttctggatctctaccagcaatgtggaattatcacccatcatcatccaatcgcagatggagggactcctgacatagccagctgctgtgaaataatggaagagcttacaacctgccttaaaaattaccgaaaaaccttaatacactgctatggaggacttgggagatcttgtcttgtagctgcttgtctcctactatacctgtctgacacaatatcaccagagcaagccatagacagcctgcgagacctaagaggatccggggcaatacagaccatcaagcaatacaattatcttcatgagtttcgggacaaattagctgcacatctatcatcaagagattcacaatcaagatctgtatcaagataaaggaattcaaatagcatatatatgaccatgtctgaaatgtcagttctctagcataatttgtattgaaatgaaaccaccagtgttatcaacttgaatgtaaatgtacatgtgcagatattcctaaagttttattgac

SEQ ID NO: 153704 - DNA, 791 bp, Artificial Sequence
  derived and/or modified sequence
cggcactggtctcgacgtggggcggccagcgatgaagccgcccagttcaatacaaacaagtgagtttgactcatcagatgaagagcctattgaagatgaacagactccaattcatatatcatggctatctttgtcacgagtgaattgttctcagtttctcggtttatgtgctcttccaggttgtaaatttaaagatgttagaagaaatgtccaaaaagatacagaagaactaaagagctgtggtatacaagacatatttgttttctgcaccagaggggaactgtcaaaatatagagtcccaaaccttctggatctctaccagcaatgtggaattatcacccatcatcatccaatcgcagatggagggactcctgacatagccagctgctgtgaaataatggaagagcttacaacctgccttaaaaatttgttctgctatggaggacttgggagatcttgtcttgtagctgcttgtctcctactatacctgtctgacacaatatcaccagagcaagccatagacagcctgcgagacctaagaggatccggggcaatacagaccatcaagcaatacaattatcttcatgagtttcgggacaaattagctgcacatctatcatcaagagattcacaatcaagatctgtatcaagataaaggaattcaaatagcatatatatgaccatgtctgaaatgtcagttctctagcataatttgtattgaaatgaaaccaccagtgttatcaacttgaatgtaaatgtacatgtgcagatattcctaaagttttattgac

SEQ ID NO: 153705 - DNA, 639 bp, Artificial Sequence
  derived and/or modified sequence
atgaagcctccctcgagcattcagaccagcgaatttgattcctcagatgaagagcctatagaagatgagcaaacccctatccacatatcttggttatcattgagccgggtaaactgcagccagttcctcggactttgcgctctgccaggctgtaaattcaaggacgtgcgcagaaatgtccagaaggatactgaagagttgaagagttgcggaattcaggacattttcgtgttctgcacacgcggcgagcttagtaagtaccgtgtccctaatctactcgacttataccagcagtgtgggataataacgcaccatcatcctatagccgacggcggaacacccgacattgcttcttgctgcgagatcatggaggagcttacaacttgcctgaagaattacagaaagactctgatccactgctatggtgggctcggccggtcatgtctggtagccgcctgcctcctcctgtatctcagcgacactattagccccgaacaggccatcgatagcctgcgggatttgaggggcagtggtgcaatacagaccattaagcagtacaactatctgcacgaattcagagacaagttagccgctcatctgagcagtcgagattcgcagtctagatctgtgtctcgatag

SEQ ID NO: 153706 - DNA, 501 bp, Artificial Sequence
  derived and/or modified sequence
atgaacccctgctgcaaatttaaggacgtgcgcagaaacgtgcagaaggacactgaggagctgaagagctgtggcattcaggacatatttgtgttctgtacgaggggagagttgtcaaagtaccgcgtgccaaatcttctggacctttaccaacagtgtggcattataacacatcaccacccaatcgctgatggcggaacccccgacatcgcctcttgttgtgagataatggaggagctcaccacttgcctcaagaactatcgtaaaaccctgatacactgttatggaggccttgggaggtcttgtcttgtcgctgcgtgcttacttttgtacctctcagacacaatctctcccgagcaggcgatcgacagtctgcgtgatctgcgcggatcaggagctatacaaaccataaagcagtacaattatttgcatgaatttcgggataaactggctgcacatttgtcctcccgagactcccagtcccgttcagtttctcgatag

SEQ ID NO: 153707 - DNA, 624 bp, Artificial Sequence
  derived and/or modified sequence
atgaagccaccatcttcgatccagacatccgagttcgattcgagcgacgaagagcctatcgaggatgagcaaactccgattcatatttcctggttgagtctctcacgagtcaactgcagtcagtttttaggactgtgtgccctccctgggtgcaaattcaaggacgttagacgcaacgttcagaaagacaccgaagagctgaagtcctgcggcattcaagacatcttcgtgttttgcacacgaggcgagctctccaaataccgggtgcccaatctcctggatttataccagcagtgcggaatcatcacgcaccaccatcctatcgccgacggggggaccccagatatcgcttcttgttgtgagatcatggaagagcttaccacatgtttgaaaaatcttttctgctacgggggccttggccggtcatgcctcgttgccgcatgcttgctgctctacctgagcgacacaatctctccagaacaggctattgattccttgagagatctccgggggtcgggagccattcaaaccatcaagcagtacaactatttgcatgaattcagagacaagctcgccgctcatctgtcttctcgggactcccaatctaggtccgtctcaagatag

SEQ ID NO: 153708 - DNA, 639 bp, Artificial Sequence
  derived and/or modified sequence
atgaagccacccagcagcatccagaccagcgagtttgacagcagtgatgaggagcccattgaagatgagcagacccccatccacatctcctggctgagcctgagccgggtgaactgcagccagttcctgggcctgtgtgccctgcccggctgcaagttcaaggatgtgagaagaaatgtgcagaaggacacagaggagctgaagagctgtggcatccaggacatctttgtgttctgcaccagaggagagctgagcaagtacagagtgcccaacctgctggacctgtaccagcagtgtggcatcatcacccaccaccaccccatcgcagatggcggcaccccagacatcgccagctgctgtgagatcatggaggagctgaccacctgcctgaagaactacaggaagaccctcatccactgctatggaggcctgggccgcagctgcctggtggccgcctgcctgctgctgtacctgagtgacaccatcagccctgagcaggccatcgacagcctgcgggacctgcggggcagcggggccatccagaccatcaagcagtacaactacctgcacgagttccgggacaagctggccgcccacctgagcagccgggacagccagagccgctctgtgtccaggtag

SEQ ID NO: 153709 - DNA, 501 bp, Artificial Sequence
  derived and/or modified sequence
atgaacccctgctgcaagttcaaggatgtgagaagaaatgtgcagaaggacacagaggagctgaagagctgtggcatccaggacatctttgtgttctgcaccagaggagagctgagcaagtacagagtgcccaacctgctggacctgtaccagcagtgtggcatcatcacccaccaccaccccatcgcagatggcggcaccccagacatcgccagctgctgtgagatcatggaggagctgaccacctgcctgaagaactacaggaagaccctcatccactgctatggaggcctgggccgcagctgcctggtggccgcctgcctgctgctgtacctgagtgacaccatcagccctgagcaggccatcgacagcctgcgggacctgcggggcagcggggccatccagaccatcaagcagtacaactacctgcacgagttccgggacaagctggccgcccacctgagcagccgggacagccagagccgctctgtgtccaggtag

SEQ ID NO: 153710 - DNA, 624 bp, Artificial Sequence
  derived and/or modified sequence
atgaagccacccagcagcatccagaccagcgagtttgacagcagtgatgaggagcccattgaagatgagcagacccccatccacatctcctggctgagcctgagccgggtgaactgcagccagttcctgggcctgtgtgccctgcccggctgcaagttcaaggatgtgagaagaaatgtgcagaaggacacagaggagctgaagagctgtggcatccaggacatctttgtgttctgcaccagaggagagctgagcaagtacagagtgcccaacctgctggacctgtaccagcagtgtggcatcatcacccaccaccaccccatcgcagatggcggcaccccagacatcgccagctgctgtgagatcatggaggagctgaccacctgcctgaagaacctcttctgctacggcggcctgggccgcagctgcctggtggccgcctgcctgctgctgtacctgagtgacaccatcagccctgagcaggccatcgacagcctgcgggacctgcggggcagcggggccatccagaccatcaagcagtacaactacctgcacgagttccgggacaagctggccgcccacctgagcagccgggacagccagagccgctctgtgtccaggtag

SEQ ID NO: 153711 - DNA, 639 bp, Artificial Sequence
  derived and/or modified sequence
atgaagccccccagcagcatccagaccagcgagttcgacagcagcgacgaagaaccaattgaagatgaacagaccccgattcacattagctggctgtctttaagtcgtgtgaattgcagccagtttctgggcttatgcgcactccccggctgcaagtttaaggatgttagacgtaacgtccaaaaggacaccgaagaactaaagtcctgtggtatccaggatattttcgtgttttgtaccaggggagaacttagtaaatatagagtgccgaacctgctcgatctttaccagcagtgtggcattataactcatcatcaccctatagcagacggtggtacgccggacatcgcgtcgtgctgcgaaattatggaggaactcactacatgcctgaagaattaccggaagacactcatccactgctatgggggactggggcggtcttgtctggtggcagcctgtctattgctttacctgtccgacacaatcagcccagagcaagcaatcgatagccttagagacctgaggggctcaggagccatccagacaatcaaacagtataattatctccacgaattccgtgacaaactcgccgcccatctatccagcagagactcacaaagcagatcagtgagtcggtag

SEQ ID NO: 153712 - DNA, 501 bp, Artificial Sequence
  derived and/or modified sequence
atgaacccctgctgcaagttcaaggacgtgcggcggaacgtgcagaaagacacggaggagctgaagtcatgtggcatccaggacatatttgtattctgtaccaggggtgagctgtcaaagtacagggtaccaaacctgttggacctctatcagcagtgtggaatcattacgcatcaccatcccatcgccgatggaggcacccccgatatcgccagttgctgtgagattatggaggagttaactacctgcctcaaaaactatagaaaaacccttattcactgttacggtggcctgggccgaagctgtctagtcgcagcgtgccttctgttatacctgagtgacaccattagtccagaacaggccatcgattctttgcgagacttgaggggcagcggggccatccaaactattaagcaatacaattacctacatgaatttcgagacaagctggcagcccatcttagctcccgggactcccagtctcggagcgtttccaggtag

SEQ ID NO: 153713 - DNA, 624 bp, Artificial Sequence
  derived and/or modified sequence
atgaagccccccagcagcatccagaccagcgagttcgacagcagcgacgaagagccgattgaggacgagcagactccaatccatatttcttggctatcgctgagtagggtgaattgctctcagttccttgggctctgtgctcttccaggctgcaaatttaaggacgttcggcggaatgtgcagaaggacactgaggaactaaaatcctgcggcatccaggacatttttgtgttctgcacacgtggggagttgtcaaagtatagagtccccaatctcctggatctgtatcagcagtgcggcattattacccatcaccaccccatcgcagacggtgggactccagatatcgcctcctgttgcgaaataatggaggagttgaccacctgccttaaaaatcttttttgctatgggggcttgggcagaagttgtttggttgctgcctgtctcctgctttatctttccgacaccatttctcccgagcaggctatagactccctccgcgacctgcggggctctggagctatccagacaataaagcagtacaactacctgcacgaatttagggataagctagccgcacatttaagcagtagggatagccagagtcgcagcgttagcagatag

SEQ ID NO: 153714 - DNA, 639 bp, Artificial Sequence
  derived and/or modified sequence
atgaaaccaccttcttccatccaaacctccgaattcgattctagtgatgaggaacccattgaagatgaacagacaccgatccatatcagctggctgtcgctgtctagagtgaattgtagccagttcctcgggctttgtgctcttcccggttgcaagttcaaggatgtccgcagaaacgttcaaaaggataccgaagagcttaagtcctgcggcatccaggacatttttgtgttctgtacaagaggtgagctatcaaagtacagggtgcccaacctgctggatctctaccagcagtgcgggatcattactcaccaccatcccatagccgatggtgggaccccggatatcgcttcatgctgtgaaataatggaggaactgactacctgcctcaagaactaccggaaaaccctaatccattgttatggcggtttgggaaggtcgtgtttggtagctgcctgcttacttttgtacctgagcgacacaatcagtcccgaacaggctattgattcactccgagatctgagaggctctggtgccattcagacgattaagcagtataactatctccatgagtttcgcgacaaattggctgcacacctctcctccagggactcccagtcacggtctgtgtctcgatag

SEQ ID NO: 153715 - DNA, 501 bp, Artificial Sequence
  derived and/or modified sequence
atgaatccgtgctgtaaatttaaggatgtgaggagaaacgtgcagaaagacactgaggagctgaagagttgcgggatccaggacatcttcgttttctgcactcggggagagctctctaagtacagagttcctaacctgctcgacctgtatcagcaatgtggtataatcacccaccaccaccctatcgcagacgggggaacaccagatatcgccagttgttgtgagattatggaggaattgacgacatgcctcaagaactatcgcaaaacgctcattcactgttacggcggacttgggaggtcctgtctcgtagccgcatgccttttgctgtacctttccgatacaattagcccggagcaggcgatcgactccctacgggatttgaggggatcaggggctatacaaaccatcaagcaatacaattacctccacgaatttagagataaactggccgctcacctgtctagcagagatagccagagcagaagtgtgagtaggtag

SEQ ID NO: 153716 - DNA, 624 bp, Artificial Sequence
  derived and/or modified sequence
atgaagcccccatcctcaattcagacgtccgaatttgactccagcgatgaggaaccgattgaagatgaacagacccccatccacatctcatggctgtctctgtcccgcgttaactgctctcagttcctgggactgtgcgcactacctggatgtaaattcaaggacgtgcgaaggaacgttcagaaggataccgaggagctgaaatcatgtggaattcaggacatattcgtgttttgcactcggggagagttgagtaagtatcgcgtcccgaacctgctggacctgtatcagcaatgtggtatcataacccaccaccatccaatcgctgatgggggaactcctgatatcgccagctgttgcgagattatggaggagcttacaacatgtttgaaaaatctcttttgctatggtggcctggggaggtcttgcttggttgcggcatgcctcctgctgtatctctctgacactatcagcccagaacaggcgatcgattcattgcgggatctgagaggatccggcgcaatacagaccatcaaacagtataattatcttcacgagttccgcgataaattggctgctcacctcagcagtagagactcccagtcacggagcgtgagcagatag

SEQ ID NO: 153717 - protein, 284 aa, Artificial Sequence
  derived and/or modified sequence
MYGSCLLEKEAGMYPGTLMSPGGDGTAGTGGTGGGGSPMPASNFAAAPAFSHYMGYPHMPSMDPHWPSLGVWGSPYSPPREDWSVYPGPSSTMGTVPVNDVTSSPAAFCSTDYSNLGPVGGGTSGSSLPGQAGGSLVPTDAGAAKASSPSRSRHSPYAWMRKTVQVTGKTRTKEKYRVVYTDHQRLELEKEFHCNRYITIQRKSELAVNLGLSERQVKIWFQNRRAKERKMIKKKISQFENSGGSVQSDSDSISPGELPNTFFTTPSAVRGFQPIEIQQVIVSE

SEQ ID NO: 153718 - DNA, 855 bp, Artificial Sequence
  derived and/or modified sequence
atgtacggaagctgtcttttggagaaagaagcaggcatgtacccgggcactctcatgagccctgggggcgacggcacagctgggacaggcggcacagggggcggtgggagtccgatgccagcctccaatttcgctgcggcaccggctttctcgcactatatggggtatcctcatatgcccagcatggatcctcactggccgtctctgggagtctggggctcaccctacagtcccccgcgagaagactggagcgtgtatcctgggccgtctagtacaatgggcacagtgccggtgaacgacgtgacctctagccccgccgctttctgctcgaccgactacagcaacttgggccctgtgggcggtggaactagcggcagcagcctaccaggccaggctggcgggtcgcttgtcccgacggacgcaggcgccgccaaggccagttcccccagcaggagccgccacagcccctatgcatggatgcgcaagacggtgcaggtgacggggaaaaccaggacaaaagaaaagtatcgtgtagtttacactgatcatcaaagattggagctggaaaaggaattccattgcaatagatatatcaccatccagagaaaatcagagctggcagttaacctgggcctttccgagagacaggtgaaaatctggtttcagaatcgcagagccaaggagagaaagatgatcaaaaagaaaatctcccagtttgagaatagtggaggctcggtgcaaagtgactctgactccatcagccctggggaactacctaacacttttttcaccacaccatctgctgttcgtggatttcaacctattgagatacagcaggttatagtctccgaatga

SEQ ID NO: 153719 - DNA, 855 bp, Artificial Sequence
  derived and/or modified sequence
atgtacgggagctgtctcctggagaaggaggcaggcatgtatccgggaaccttaatgtctccaggcggcgacggaacggctggaaccgggggaactggtgggggtggctcaccaatgcctgccagtaacttcgcggccgcccctgccttttcccattacatggggtacccgcacatgccaagtatggacccacactggccctcactgggggtgtggggctcaccttattcgcccccacgcgaagattggtctgtgtaccctggcccatccagtaccatgggcaccgtacctgtgaatgatgtcacctcatctccagcggctttctgctccaccgattatagcaacctgggcccagtgggcgggggcacttctggatctagtctacctggccaggccgggggttccctggtgccgaccgacgccggggctgccaaggccagcagtccctcacgctccaggcattctccttatgcctggatgcggaagaccgttcaggtgacaggcaagactagaaccaaagaaaaatatcgcgtggtctacacagaccatcagaggcttgagctggagaaggagtttcattgcaaccgctatataactatacagaggaagtcagagcttgccgttaacctcggactctccgagcgccaggtcaagatctggtttcagaatcgtagggcaaaggagagaaagatgataaagaagaaaatcagtcagtttgagaattccggaggtagcgttcagtccgatagcgactctatctcacccggcgagctccccaatactttttttactaccccatcagccgttcgcgggttccagcctatagagattcagcaagtcattgtgagcgagtag

SEQ ID NO: 153720 - DNA, 855 bp, Artificial Sequence
  derived and/or modified sequence
atgtatggcagctgcctgctggagaaggaggccggcatgtacccaggcaccctgatgagccctggaggagatggaacagctggcactggaggcaccggcggcggcggcagccccatgcctgccagcaactttgctgctgccccagccttcagccactacatgggctacccccacatgcccagcatggacccccactggcccagcctgggcgtgtggggcagcccctacagccccccccgggaggactggagcgtgtacccaggccccagcagcaccatgggcaccgtgcctgtgaatgatgtgaccagcagccctgctgccttctgcagcacagactacagcaacctgggccctgtgggcggcggcaccagcggcagcagcctgcccggccaggccggcggcagcctggtgcccacagatgctggagctgccaaggccagcagccccagccgcagccgccacagcccctatgcctggatgaggaagacagtgcaggtgacaggcaagaccaggaccaaggagaagtacagagtggtgtacacagaccaccagaggctggagctggagaaggagttccactgcaaccgctacatcaccatccagaggaagtctgagctggccgtgaacctgggcctgtctgagcggcaggtgaagatctggttccagaacagaagagccaaggagaggaagatgatcaagaagaagatcagccagtttgagaacagcggcggctctgtgcagagcgacagcgacagcatcagccctggagagctgcccaacaccttcttcaccaccccatctgctgtgcggggcttccagcccatcgagatccagcaggtgattgtgtctgagtag

SEQ ID NO: 153721 - DNA, 855 bp, Artificial Sequence
  derived and/or modified sequence
atgtacggcagctgcctgctggagaaggaggccggcatgtaccccggcacgctgatgtcacccggcggcgacggcactgccgggactgggggaacaggtggggggggcagccctatgcccgctagcaacttcgccgctgcccctgcattcagccattatatgggctaccctcacatgcccagcatggatccccattggccatccttgggagtctggggttcaccttactcccccccccgggaagactggagtgtgtatcccggacctagtagcacaatgggcaccgtccccgtgaatgatgtaacgtcaagccctgccgcattctgcagcaccgactactcaaacctcgggcctgtgggcgggggaacaagcggttcaagccttcccggacaggctggcgggtcgctagtgcctaccgacgcgggtgctgccaaagcatcctcacccagtaggtcgcgacactcaccctacgcttggatgaggaagacagtccaggtgaccggaaagacccgcactaaagagaagtatcgagtggtgtatacagatcaccagcggctggagttagagaaggagttccattgcaatcgctacatcacaatccaacggaagagcgagttagcagtcaatctgggactttctgagcgacaggtcaagatttggttccaaaatagaagggcaaaggagagaaagatgatcaagaaaaaaatcagccagttcgagaattccggaggaagcgtccagagtgacagtgatagcatctcacccggcgagctgccgaacacattttttaccactccctccgctgtgaggggcttccaacctatagagatccagcaagtcattgtgtcggagtag

SEQ ID NO: 153722 - DNA, 855 bp, Artificial Sequence
  derived and/or modified sequence
atgtatggctcttgtctgctcgaaaaggaggcgggaatgtaccccggtactctcatgagccccggaggagacggaacagccggaaccggtggcaccggcggtggcggaagcccaatgcctgcgtctaactttgcggctgcccctgctttctcccactacatgggatatccacatatgccctccatggatccacattggccatcccttggtgtctgggggtccccctactccccaccacgagaagactggtccgtgtacccgggaccttcttcaacaatgggaacagtacctgtgaatgatgtcaccagtagcccagcagccttctgttccactgactattccaatcttggtccagtaggcggagggaccagtggaagttctctaccaggccaggccggaggtagcctggtgcctaccgacgccggagcggcaaaagcttcatccccttcaagatctagacattctccctatgcctggatgcgaaagacagtccaggtgacgggaaaaacacgaacaaaggaaaagtacagggtggtttacaccgaccatcaacgccttgaactagagaaagaattccactgcaatcggtatatcaccatccagaggaaatccgaactggcagtcaatctggggctgtcggaaaggcaggtgaaaatctggtttcagaatagacgagctaaagaaagaaagatgataaagaagaagatttcacagtttgaaaactctgggggttcggttcagtcagacagcgacagtatttcgccaggggagctacctaacacattcttcaccaccccgtctgctgtcagggggttccagcccattgagatccagcaagtaatcgtatcagagtag

SEQ ID NO: 153723 - DNA, 1517 bp, Artificial Sequence
  derived and/or modified sequence
cgatgtacggaagctgtcttttggagaaagaagcaggcatgtacccgggcactctcatgagccctgggggcgacggcacagctgggacaggcggcacagggggcggtgggagtccgatgccagcctccaatttcgctgcggcaccggctttctcgcactatatggggtatcctcatatgcccagcatggatcctcactggccgtctctgggagtctggggctcaccctacagtcccccgcgagaagactggagcgtgtatcctgggccgtctagtacaatgggcacagtgccggtgaacgacgtgacctctagccccgccgctttctgctcgaccgactacagcaacttgggccctgtgggcggtggaactagcggcagcagcctaccaggccaggctggcgggtcgcttgtcccgacggacgcaggcgccgccaaggccagttcccccagcaggagccgccacagcccctatgcatggatgcgcaagacggtgcaggtgacggggaaaaccaggacaaaagaaaagtatcgtgtagtttacactgatcatcaaagattggagctggaaaaggaattccattgcaatagatatatcaccatccagagaaaatcagagctggcagttaacctgggcctttccgagagacaggtgaaaatctggtttcagaatcgcagagccaaggagagaaagatgatcaaaaagaaaatctcccagtttgagaatagtggaggctcggtgcaaagtgactctgactccatcagccctggggaactacctaacacttttttcaccacaccatctgctgttcgtggatttcaacctattgagatacagcaggttatagtctccgaatgaaagaaagcaaagagaaatttaaagtgccctttttttagtgatgtcttttgggtctctaagctatctacaggggagttggagcagggtgtaattccctgtaaggcagtatttggaacagatggatgcacaatgggttgaagataatttaggggactcttacttttagaaactatccccagaaaactcctgtcacgtgctgtgctatatgtcagtcactcaggaatcttagtggtaaggtatataattaaaagctagaatcacaggcccttccaactctgttcacaatttcagaaacttgcttatgaatagactgtaaaatacaattttgccagaaagcacatttgtgtatgtgtacttctgtttgttatttgatgctaggtgttttcttttatgctatctttaaggagtgagaagaaggtaaaccgaagtttatctatctttagctacctttccaagtgtttaattcaaaagctaacagaatttttataataagataaatgttttaaaaatcatcagaaggtgattctgattccattgtcactgcttaacaagaataaccaataaaaaagacaattttggccctcaatcatacttgtctggcatcaattatctcagaactttcaacttgcagtgtcattttaaaatcttgtcaaaacaatg

SEQ ID NO: 153724 - DNA, 855 bp, Artificial Sequence
  derived and/or modified sequence
atgtacggcagctgcctgctggagaaggaggccggcatgtaccccggcaccctgatgagccccggcggcgacggcaccgccggcaccggcggcaccggcggcggcggcagccccatgcccgccagcaacttcgccgccgcccccgccttcagccactacatgggctacccccacatgcccagcatggacccccactggcccagcctgggcgtgtggggcagcccctacagcccccccagagaggactggagcgtgtaccccggccccagcagcaccatgggcaccgtgcccgtgaacgacgtgaccagcagccccgccgccttctgcagcaccgactacagcaacctgggccccgtgggcggcggcaccagcggcagcagcctgcccggccaggccggcggcagcctggtgcccaccgacgccggcgccgccaaggccagcagccccagcagaagcagacacagcccctacgcctggatgagaaagaccgtgcaggtgaccggcaagaccagaaccaaggagaagtacagagtggtgtacaccgaccaccagagactggagctggagaaggagttccactgcaacagatacatcaccatccagagaaagagcgagctggccgtgaacctgggcctgagcgagagacaggtgaagatctggttccagaacagaagagccaaggagagaaagatgatcaagaagaagatcagccagttcgagaacagcggcggcagcgtgcagagcgacagcgacagcatcagccccggcgagctgcccaacaccttcttcaccacccccagcgccgtgagaggcttccagcccatcgagatccagcaggtgatcgtgagcgagtag

SEQ ID NO: 153725 - protein, 345 aa, Artificial Sequence
  derived and/or modified sequence
MQRLVAWDPACLPLPPPPPAFKSMEVANFYYEADCLAAAYGGKAAPAAPPAARPGPRPPAGELGSIGDHERAIDFSPYLEPLGAPQAPAPATATDTFEAAPPAPAPAPASSGQHHDFLSDLFSDDYGGKNCKKPAEYGYVSLGRLGAAKGALHPGCFAPLHPPPPPPPPPAELKAEPGFEPADCKRKEEAGAPGGGAGMAAGFPYALRAYLGYQAVPSGSSGSLSTSSSSSPPGTPSPADAKAPPTACYAGAAPAPSQVKSKAKKTVDKHSDEYKIRRERNNIAVRKSRDKAKMRNLETQHKVLELTAENERLQKKVEQLSRELSTLRNLFKQLPEPLLASSGHC

SEQ ID NO: 153726 - DNA, 1837 bp, Artificial Sequence
  derived and/or modified sequence
gagccgcgcacgggactgggaaggggacccacccgagggtccagccaccagccccctcactaatagcggccaccccggcagcggcggcagcagcagcagcgacgcagcggcgacagctcagagcagggaggccgcgccacctgcgggccggccggagcgggcagccccaggccccctccccgggcacccgcgttcatgcaacgcctggtggcctgggacccagcatgtctccccctgccgccgccgccgcctgcctttaaatccatggaagtggccaacttctactacgaggcggactgcttggctgctgcgtacggcggcaaggcggcccccgcggcgccccccgcggccagacccgggccgcgcccccccgccggcgagctgggcagcatcggcgaccacgagcgcgccatcgacttcagcccgtacctggagccgctgggcgcgccgcaggccccggcgcccgccacggccacggacaccttcgaggcggctccgcccgcgcccgcccccgcgcccgcctcctccgggcagcaccacgacttcctctccgacctcttctccgacgactacgggggcaagaactgcaagaagccggccgagtacggctacgtgagcctggggcgcctgggggccgccaagggcgcgctgcaccccggctgcttcgcgcccctgcacccaccgcccccgccgccgccgccgcccgccgagctcaaggcggagccgggcttcgagcccgcggactgcaagcggaaggaggaggccggggcgccgggcggcggcgcaggcatggcggcgggcttcccgtacgcgctgcgcgcttacctcggctaccaggcggtgccgagcggcagcagcgggagcctctccacgtcctcctcgtccagcccgcccggcacgccgagccccgctgacgccaaggcgcccccgaccgcctgctacgcgggggccgcgccggcgccctcgcaggtcaagagcaaggccaagaagaccgtggacaagcacagcgacgagtacaagatccggcgcgagcgcaacaacatcgccgtgcgcaagagccgcgacaaggccaagatgcgcaacctggagacgcagcacaaggtcctggagctcacggccgagaacgagcggctgcagaagaaggtggagcagctgtcgcgcgagctcagcaccctgcggaacttgttcaagcagctgcccgagcccctgctcgcctcctccggccactgctagcgcggcccccgcgcgcgtccccctgccggccggggctgagactccggggagcgcccgcgcccgcgccctcgcccccgcccccggcggcgccggcaaaactttggcactggggcacttggcagcgcggggagcccgtcggtaattttaatattttattatatatatatatctatatttttgtccaaaccaaccgcacatgcagatggggctcccgcccgtggtgttatttaaagaagaaacgtctatgtgtacagatgaatgataaactctctgcttctccctctgcccctctccaggcgccggcgggcgggccggtttcgaagttgatgcaatcggtttaaacatggctgaacgcgtgtgtacacgggactgacgcaacccacgtgtaactgtcagccgggccctgagtaatcgcttaaagatgttcctacgggcttgttgctgttgatgttttgttttgttttgttttttggtctttttttgtattataaaaaataatctatttctatgagaaaagaggcgtctgtatattttgggaatcttttccgtttcaagcattaagaacacttttaataaacttttttttgagaatggttacaaagcc

SEQ ID NO: 153727 - DNA, 1038 bp, Artificial Sequence
  derived and/or modified sequence
atgcaacggctcgtcgcctgggatcctgcctgcttgcccttacccccccccccgcctgctttcaagtcaatggaggtagccaatttctactacgaggccgattgtctcgccgctgcttacggagggaaggccgcccctgctgcaccccctgccgcccgtcctgggccgagacctcctgccggagagctggggtctatcggagatcatgaaagagctatcgattttagtccttacctggagcccctcggagccccccaggcaccggcacctgccactgccactgatacttttgaagcggcacctcccgcaccggcccccgcacccgcctccagcggccagcatcatgactttttaagtgatctgttttcagatgactacggcggaaagaattgcaaaaaaccagctgaatatggatacgtgagcctggggcggctaggggccgcgaaaggcgcgctccatcccggctgtttcgctccactgcacccgcctcctcctcccccacccccacctgcggagctgaaggccgagcctggcttcgaacccgccgattgtaagagaaaggaagaggcaggagcgcctggagggggggccgggatggcagcgggattcccttacgccctgcgcgcttatctcggataccaggcagtgccaagcggttcgtccgggtcactgtcaacgagctctagctccagtccaccgggaacacctagccctgctgatgcgaaggcaccacccaccgcctgttacgctggcgctgcaccggccccttcacaagtgaagtcaaaagccaagaaaactgtagacaagcacagtgatgaatacaagatccgcagggaacggaacaacatcgcggtgcggaaatcacgagacaaggccaaaatgagaaatttggagacccagcacaaggtgcttgaactcactgccgagaatgagaggcttcagaagaaggtcgagcaactgagtcgggaacttagcactttaaggaatctattcaagcagctccccgaacccttgctcgcatcgtcagggcactgttag

SEQ ID NO: 153728 - DNA, 1038 bp, Artificial Sequence
  derived and/or modified sequence
atgcagaggctggtggcctgggaccctgcctgcctgcccctgcccccacctcctccagccttcaagtccatggaggtggccaacttctactatgaagctgactgcctggccgccgcctacggcggcaaggccgccccagctgcccctcctgctgcccggcccggcccccggcccccagctggggagctgggcagcatcggggaccacgagcgggccatcgacttcagcccctacctggagcccctgggcgccccccaggccccagccccagccacagccacagacacctttgaagctgcccccccagccccagccccagccccagccagcagcggccagcaccacgacttcctgagtgacctcttcagtgatgattatggaggcaagaactgcaagaagccagcagaatatggctacgtgtccctgggccgcctgggcgccgccaagggggccctgcaccctggctgctttgcccccctgcaccccccacctcctcctcctcctcctcctgctgagctgaaggccgagcccggctttgagcctgctgactgcaagaggaaggaggaggccggggcccctgggggcggggccggcatggctgctggcttcccctatgccctgcgggcctacctgggctaccaggccgtgcccagcggcagcagcggcagcctgagcaccagcagcagcagcagccccccaggcacccccagccctgcagatgccaaggccccacccacagcctgctacgccggggccgccccagcccccagccaggtgaagagcaaggccaagaagacagtggacaagcacagtgatgagtacaagatcagaagagagaggaacaacattgctgtgaggaagagccgggacaaggccaagatgaggaacctggagacccagcacaaggtgctggagctgacagcagaaaatgaaaggctgcagaagaaggtggagcagctgagccgggagctgagcaccctgaggaacctcttcaagcagctgcctgagcccctgctggccagcagcggccactgctag

SEQ ID NO: 153729 - DNA, 1038 bp, Artificial Sequence
  derived and/or modified sequence
atgcagcggctggtggcctgggaccccgcctgcctgcccctgccccctcctccccccgcctttaaaagcatggaagtcgcaaatttttattatgaggcagactgtcttgctgcagcatacggtggtaaagccgccccagcagctcccccagccgccagacccggccctcgtccgcccgctggcgagctcggatctatcggtgatcatgaacgcgctatcgacttttctccttacctcgagcccttgggggccccacaggcccctgcccctgccacagcaacagacaccttcgaggctgctccccctgcccccgctcctgcccccgctagctcaggtcagcaccatgactttctgagcgacttgttttctgatgactacgggggcaagaattgcaaaaagcccgcagaatacggctacgtgagcctgggtcgtcttggagccgccaagggcgccctacaccctggatgctttgcccctctgcatccaccgcctccaccaccacccccacccgccgaactgaaagcagaacctggtttcgagcccgcggattgcaagagaaaagaggaagcaggtgcacctggcgggggcgccggcatggcagccggatttccgtatgccctccgagcatacctggggtatcaagcagttccctctggctcttctggaagtctgagtacgtcaagttccagctccccaccaggaaccccttctcccgcagacgcgaaagcgccgcctaccgcctgctatgccggagccgctccagctccgtctcaagtgaagagcaaagccaagaagaccgttgacaagcattccgacgaatacaaaatccggcgcgagcgaaataacatcgccgtgcggaagagccgcgataaggccaaaatgcgaaacctggaaactcagcataaagtgctcgagttaactgctgaaaatgagcgattgcagaaaaaagtcgaacagcttagtcgggagctctctactctgcggaacctgtttaaacagctgcccgaacctctgctggctagtagcggacattgttag

SEQ ID NO: 153730 - DNA, 1038 bp, Artificial Sequence
  derived and/or modified sequence
atgcagcggctggttgcatgggatcctgcttgccttccactgccaccacctccaccagcctttaagagtatggaggtagccaacttctattatgaagccgactgtctagctgctgcctatggaggtaaggccgcaccagccgctcccccagctgccagacctgggccacgacccccagccggagagttagggtctatcggtgaccacgaaagagctatcgacttttccccatacttagaacctcttggtgcgcctcaggcccctgctcccgctaccgccacggacaccttcgaggccgcaccgccagcacctgcacccgcacccgcttcttcagggcagcaccatgacttcctgtccgatctcttcagcgatgactacgggggaaaaaactgcaaaaagcctgctgagtacgggtatgtttcacttggacggctgggggcagcaaagggcgctctgcacccgggatgttttgcccctctgcatcctccccctcccccaccccctcccccagccgaacttaaggcagagcccggattcgagcctgccgattgcaagcggaaagaggaggcaggggcaccaggtggcggagccggaatggcggctggcttcccttatgctctgcgtgcctacctgggctatcaggccgtacctagcggtagctcgggttccctgtccacgagcagctcttcctctccccctggcaccccatcccctgccgatgcaaaagcgccacccaccgcctgttatgctggggctgccccagctccgtcacaggtgaaatccaaagctaaaaaaacggtggataaacactccgatgagtacaagatccgcagggaaaggaacaatatcgctgttaggaagtcacgtgacaaagcgaagatgcggaacttggaaacacagcacaaggtcttggaactgacagcagagaatgaaagactccaaaagaaggtggagcagctgagtagggagttgtctactctgaggaatttgttcaaacagcttcctgagccccttctcgcatctagtggccactgttag

SEQ ID NO: 153731 - DNA, 1038 bp, Artificial Sequence
  derived and/or modified sequence
atgcagagactggtggcctgggaccccgcctgcctgcccctgcccccccccccccccgccttcaagagcatggaggtggccaacttctactacgaggccgactgcctggccgccgcctacggcggcaaggccgcccccgccgccccccccgccgccagacccggccccagaccccccgccggcgagctgggcagcatcggcgaccacgagagagccatcgacttcagcccctacctggagcccctgggcgccccccaggcccccgcccccgccaccgccaccgacaccttcgaggccgccccccccgcccccgcccccgcccccgccagcagcggccagcaccacgacttcctgagcgacctgttcagcgacgactacggcggcaagaactgcaagaagcccgccgagtacggctacgtgagcctgggcagactgggcgccgccaagggcgccctgcaccccggctgcttcgcccccctgcaccccccccccccccccccccccccccccgccgagctgaaggccgagcccggcttcgagcccgccgactgcaagagaaaggaggaggccggcgcccccggcggcggcgccggcatggccgccggcttcccctacgccctgagagcctacctgggctaccaggccgtgcccagcggcagcagcggcagcctgagcaccagcagcagcagcagcccccccggcacccccagccccgccgacgccaaggccccccccaccgcctgctacgccggcgccgcccccgcccccagccaggtgaagagcaaggccaagaagaccgtggacaagcacagcgacgagtacaagatcagaagagagagaaacaacatcgccgtgagaaagagcagagacaaggccaagatgagaaacctggagacccagcacaaggtgctggagctgaccgccgagaacgagagactgcagaagaaggtggagcagctgagcagagagctgagcaccctgagaaacctgttcaagcagctgcccgagcccctgctggccagcagcggccactgctag

SEQ ID NO: 153732 - protein, 269 aa, Artificial Sequence
  derived and/or modified sequence
MSAALFSLDGPARGAPWPAEPAPFYEPGRAGKPGRGAEPGALGEPGAAAPAMYDDESAIDFSAYIDSMAAVPTLELCHDELFADLFNSNHKAGGAGPLELLPGGPARPLGPGPAAPRLLKREPDWGDGDAPGSLLPAQVAACAQTVVSLAAAGQPTPPTSPEPPRSSPRQTPAPGPAREKSAGKRGPDRGSPEYRQRRERNNIAVRKSRDKAKRRNQEMQQKLVELSAENEKLHQRVEQLTRDLAGLRQFFKQLPSPPFLPAAGTADCR

SEQ ID NO: 153733 - protein, 133 aa, Artificial Sequence
  derived and/or modified sequence
MSAALFSLDGPARGAPWPAEPAPFYEPGRAGKPGRGAEPGALGEPGAAAPAMYDDESAIDFSAYIDSMAAVPTLELCHDELFADLFNSNHKARAPWARALPLPACSSASPTGATATRPARCCPRRWPRAHRPW

SEQ ID NO: 153734 - DNA, 1269 bp, Artificial Sequence
  derived and/or modified sequence
aggtgacagcctcgcttggacgcagagcccggcccgacgccgccatgagcgccgcgctcttcagcctggacggcccggcgcgcggcgcgccctggcctgcggagcctgcgcccttctacgaaccgggccgggcgggcaagccgggccgcggggccgagccaggggccctaggcgagccaggcgccgccgcccccgccatgtacgacgacgagagcgccatcgacttcagcgcctacatcgactccatggccgccgtgcccaccctggagctgtgccacgacgagctcttcgccgacctcttcaacagcaatcacaaggcgggcggcgcggggcccctggagcttcttcccggcggccccgcgcgccccttgggcccgggccctgccgctccccgcctgctcaagcgcgagcccgactggggcgacggcgacgcgcccggctcgctgttgcccgcgcaggtggccgcgtgcgcacagaccgtggtgagcttggcggccgcagggcagcccaccccgcccacgtcgccggagccgccgcgcagcagccccaggcagacccccgcgcccggccccgcccgggagaagagcgccggcaagaggggcccggaccgcggcagccccgagtaccggcagcggcgcgagcgcaacaacatcgccgtgcgcaagagccgcgacaaggccaagcggcgcaaccaggagatgcagcagaagttggtggagctgtcggctgagaacgagaagctgcaccagcgcgtggagcagctcacgcgggacctggccggcctccggcagttcttcaagcagctgcccagcccgcccttcctgccggccgccgggacagcagactgccggtaacgcgcggccggggcgggagagactcagcaacgacccatacctcagacccgacggcccggagcggagcgcgccctgccctggcgcagccagagccgccgggtgcccgctgcagtttcttgggacataggagcgcaaagaagctacagcctggacttaccaccactaaactgcgagagaagctaaacgtgtttattttcccttaaattatttttgtaatggtagctttttctacatcttactcctgttgatgcagctaaggtacatttgtaaaaagaaaaaaaaccagacttttcagacaaaccctttgtattgtagataagaggaaaagactgagcatgctcacttttttatattaatttttacagtatttgtaagaataaagcagcatttgaaatcgaaaaaaaaaaaaaaaaaa

SEQ ID NO: 153735 - DNA, 810 bp, Artificial Sequence
  derived and/or modified sequence
atgagcgcagccctgttctccctggatggccccgccagaggagccccttggcccgctgagccagcccccttctacgagccaggacgggctggtaaaccaggccggggagccgagcctggggcactcggggagcccggtgccgcagctcccgcgatgtacgacgacgaatcagccattgacttcagtgcttatattgactccatggctgccgtccccactctggagttatgccatgatgagctgttcgcagatctctttaattcaaaccataaggcgggtggggccggcccattagagctgctgcccgggggccctgctaggcctctggggcctggacccgccgctcccagactgctgaagcgcgagcccgattggggcgacggtgatgcacccggctccctgctgccggctcaggtggcggcttgtgcccagactgtagtgagcctggcggccgccgggcagccaacgccccctactagcccggagcccccccgctcctctcctcgacagactcccgcaccgggacccgcgagagaaaagtcagctggaaagcgcgggcctgatagaggttcacctgagtacagacagcggcgtgaaagaaataacatcgccgtgcgaaaaagcagagacaaggccaaaagaagaaaccaggaaatgcagcagaagctcgttgagcttagcgccgaaaacgaaaagttgcaccagagagtggaacagctgacccgtgatctggccgggctccggcagttctttaaacaattgccctccccaccctttctcccggccgcaggaaccgcagactgtcgatag

SEQ ID NO: 153736 - DNA, 402 bp, Artificial Sequence
  derived and/or modified sequence
atgagtgcggctctttttagtctggacgggccggccaggggagccccatggcctgcagagcctgcccccttttatgaacctggccgggctggcaaaccagggcggggcgccgaacctggagccctgggcgaacccggggcagcagcacccgccatgtatgatgacgaaagcgcaattgatttctcagcgtacatagattccatggctgccgttcctactctcgaactgtgtcacgatgagctgtttgccgaccttttcaattccaaccacaaggcgcgcgccccgtgggccagggcactaccattgcctgcctgttcaagtgcttctcccaccggggccacagctactcgcccagcccgctgctgcccccgccgctggccccgagcacaccggccctggtag

SEQ ID NO: 153737 - DNA, 810 bp, Artificial Sequence
  derived and/or modified sequence
atgtctgctgccctcttcagcctggatggccctgcccggggggccccctggccagctgagcccgcccccttctatgagcccggccgggccggcaagccaggaagaggagctgagcccggggccctgggggagcctggagctgctgccccagccatgtatgatgatgaaagtgccatcgacttcagcgcctacatcgacagcatggctgctgtgcccaccctggagctgtgccatgatgagctgtttgctgacctcttcaacagcaaccacaaggccggcggggccggccccctggagctgctgcccggcggccctgcccggcccctgggccctggccctgctgccccccggctgctgaagcgggagccagactggggagatggagatgcccctggcagcctgctgcctgcccaggtggccgcctgtgcccagacagtggtgtccctggccgccgccggccagcccaccccacccaccagccctgagcccccaagaagcagcccccggcagaccccagcccctggccctgcccgggagaagtctgctgggaagaggggccctgaccggggcagccctgagtaccggcagaggcgggagaggaacaacattgctgtgaggaagagccgggacaaggccaagagaagaaaccaggagatgcagcagaagctggtggagctgtctgcagaaaatgagaagctgcaccagagggtggagcagctgacccgggacctggccggcctgcggcagttcttcaagcagctgcccagcccccccttcctgcctgctgctggaacagctgactgcaggtag

SEQ ID NO: 153738 - DNA, 402 bp, Artificial Sequence
  derived and/or modified sequence
atgtctgctgccctcttcagcctggatggccctgcccggggggccccctggccagctgagcccgcccccttctatgagcccggccgggccggcaagccaggaagaggagctgagcccggggccctgggggagcctggagctgctgccccagccatgtatgatgatgaaagtgccatcgacttcagcgcctacatcgacagcatggctgctgtgcccaccctggagctgtgccatgatgagctgtttgctgacctcttcaacagcaaccacaaggcccgggccccctgggcccgggccctgcccctgcctgcctgcagcagcgccagccccactggagccacagccaccaggcctgcccgctgctgcccccggcgctggccccgggcccaccggccctggtag

SEQ ID NO: 153739 - DNA, 810 bp, Artificial Sequence
  derived and/or modified sequence
atgagcgccgccctgttcagcctggacggccccgcccggggcgccccttggcccgcggagcctgcccctttctacgaacccggacgcgccgggaaaccagggagaggagcagaacctggagcattaggagagcccggcgcagccgctcccgccatgtacgatgatgagtccgcaattgacttttcagcatacatcgacagcatggccgccgttccaactctggagctctgccacgatgagctgttcgccgacctttttaattccaatcacaaggccggcggcgctgggcccttagagctgctgcctggcgggcccgcacgaccgctgggacctggaccagccgcacccagactgttgaaacgggaacccgattggggagatggcgacgcgcccggaagtcttctgccagcccaggtggctgcctgcgcccaaaccgttgtgagccttgccgccgctggccaacctacacctcctacctcaccagaaccacccaggtcttcacctcggcagacacctgcaccagggcccgctcgagagaaatcagcaggtaagagaggaccagataggggctccccagagtatcgacagcggcgagagaggaacaacattgccgttcggaaatcccgcgacaaggcaaaacgccggaaccaggagatgcaacagaagctggtggagctttccgccgagaacgagaagttgcaccaacgcgtggagcagcttacccgtgatttggcgggcctccggcagtttttcaagcagttaccatccccccctttcctgccggccgcggggaccgccgactgtcgctag

SEQ ID NO: 153740 - DNA, 402 bp, Artificial Sequence
  derived and/or modified sequence
atgagcgccgccctgttcagcctggacggccccgcccggggcgccccctggccagctgaacccgctcccttctacgagcccggccgggccggtaagccgggaaggggagccgagcccggcgcccttggagagcctggcgcagcggctccagccatgtatgatgacgagtctgctattgatttctccgcgtacattgatagcatggcagcggtccctacacttgagttgtgccacgacgagctcttcgccgacctctttaactccaatcataaggctcgggctccatgggcccgtgcactgccactgccagcgtgctctagtgcttcccctaccggcgccaccgcgacaaggcctgcccggtgttgtccacgccggtggccccgtgcacatcggccctggtag

SEQ ID NO: 153741 - DNA, 810 bp, Artificial Sequence
  derived and/or modified sequence
atgtctgcagccctcttcagcctcgacggccctgcgagaggcgcaccttggccagccgagccagcgccattctatgagccagggcgagctggtaagcccggtcgtggagccgagccaggagccctgggcgagcctggagcagcagccccagccatgtatgacgatgaaagcgcgatagatttttcagcttatatagatagtatggccgcagtgcctaccctcgagctttgccatgacgaattgtttgccgatttgtttaacagtaaccataaagcagggggtgcgggtcccctggagctattgccaggaggccctgcacggccattggggcctggacccgcagcgccacggctgctgaaacgcgaaccggattggggcgacggagatgctcctgggtctttgctgcctgcccaagtcgcagcctgtgcccagacggtagtgtccctggcagccgcagggcaaccaaccccacccaccagcccagaaccccctcgctcgtcccctcgacaaacaccagcccctgggcctgcacgcgaaaagtctgccggaaagaggggcccagatcggggatcgcctgagtataggcagcgaagggaacggaacaacattgcagtcagaaaatcccgggataaagctaagcgccgtaatcaggaaatgcaacagaaactggtggaactgtcagctgaaaacgagaaacttcaccagagagtggagcaattaactagggacctggcaggacttaggcaattttttaagcagctgccttctcctccatttttaccagctgccggaacagccgactgtcggtag

SEQ ID NO: 153742 - DNA, 402 bp, Artificial Sequence
  derived and/or modified sequence
atgtctgcagctcttttttccctcgacggaccagccaggggagccccttggcctgctgaacccgctccattttatgagccagggagggctggcaaacctggcagaggagcagagcccggagctctgggagagcccggagctgccgcaccggctatgtacgatgacgagtctgctatcgacttctccgcttacattgacagcatggcagcagtcccaacactggaattatgtcatgacgagctctttgcagacctgtttaactcaaaccacaaggccagagctccttgggcccgtgcccttccactaccagcgtgctcaagcgcaagcccaacaggagccactgccacccgcccagccaggtgttgccccaggcgctggccgagggcgcacagaccatggtag

SEQ ID NO: 153743 - DNA, 2178 bp, Artificial Sequence
  derived and/or modified sequence
gatgccgccacacgatggcactgcttccgtagacctggaagaaacgcgggcgcgggagctggcggcggacgcccgggtctgcggggtcggggagtagcgtccggccggagagcccgcacctcgaggagccggcggaggacgcggtgtcgtgaccgcgtctcccccatctgctctgcttttggcgacagcgtcccgtcggcctttcggccaggacgcagcagccgcgtctctgggcctcgacccccagggccggccggacccgggacctccgaggagagcagcgagaaccggcccggattccccgaggcgcccgagtgcggtgcgggcagccctccccgcctgccaggccgccgctgtccccacgtctggtcccccacgcctcttcccgcatctggtcccacggtggaggcgcggggcgagggcctcacgcgcgtgcccacggtcggggggcgtccttggacgcgcgggtcctctcccacgggtctccaccccccgccctccggcgacaggagccggcctgggacgcgcgcgctgcggccaagtcctggttttgatttcactcccaaccccgaggagcgaggaggttccaagcccacaaacaggaagaagagaaggccctggagtgctggcagagggagtgtcattcccagcagcgcagcgcaggccggcccgggccggggagggagcagcagcgcgggcaccctcctgcaacgtgggctgggggtccccagggccggggagggggccccggggaggaactgagagggggcgcgccccgggaaggctcggggcggctccggggggctcccagggcgcccccgccccttcccccgcggccccggggcgcccccgcggtgccggagtcggggcggggcgtgcacgtcagccggggctagaaaaggcggcggggctgggcccagcgaggtgacagcctcgcttggacgcagagcccggcccgacgccgccatgagcgccgcgctcttcagcctggacggcccggcgcgcggcgcgccctggcctgcggagcctgcgcccttctacgaaccgggccgggcgggcaagccgggccgcggggccgagccaggggccctaggcgagccaggcgccgccgcccccgccatgtacgacgacgagagcgccatcgacttcagcgcctacatcgactccatggccgccgtgcccaccctggagctgtgccacgacgagctcttcgccgacctcttcaacagcaatcacaaggcgggcggcgcggggcccctggagcttcttcccggcggccccgcgcgccccttgggcccgggccctgccgctccccgcctgctcaagcgcgagcccgactggggcgacggcgacgcgcccggctcgctgttgcccgcgcaggtggccgcgtgcgcacagaccgtggtgagcttggcggccgcagggcagcccaccccgcccacgtcgccggagccgccgcgcagcagccccaggcagacccccgcgcccggccccgcccgggagaagagcgccggcaagaggggcccggaccgcggcagccccgagtaccggcagcggcgcgagcgcaacaacatcgccgtgcgcaagagccgcgacaaggccaagcggcgcaaccaggagatgcagcagaagttggtggagctgtcggctgagaacgagaagctgcaccagcgcgtggagcagctcacgcgggacctggccggcctccggcagttcttcaagcagctgcccagcccgcccttcctgccggccgccgggacagcagactgccggtaacgcgcggccggggcgggagagactcagcaacgacccatacctcagacccgacggcccggagcggagcgcgccctgccctggcgcagccagagccgccgggtgcccgctgcagtttcttgggacataggagcgcaaagaagctacagcctggacttaccaccactaaactgcgagagaagctaaacgtgtttattttcccttaaattatttttgtaatggtagctttttctacatcttactcctgttgatgcagctaaggtacatttgtaaaaagaaaaaaaaccagacttttcagacaaaccctttgtattgtagataagaggaaaagactgagcatgctcacttttttatattaatttttacagtatttgtaagaataaagcagcatttgaaatcgcccct

SEQ ID NO: 153744 - DNA, 1462 bp, Artificial Sequence
  derived and/or modified sequence
gggccggggagggagcagcagcgcgggcaccctcctgcaacgtgggctgggggtccccagggccggggagggggccccggggaggaactgagagggggcgcgccccgggaaggctcggggcggctccggggggctcccagggcgcccccgccccttcccccgcggccccggggcgcccccgcggtgccggagtcggggcggggcgtgcacgtcagccggggctagaaaaggcggcggggctgggcccagcgaggtgacagcctcgcttggacgcagagcccggcccgacgccgccatgagcgccgcgctcttcagcctggacggcccggcgcgcggcgcgccctggcctgcggagcctgcgcccttctacgaaccgggccgggcgggcaagccgggccgcggggccgagccaggggccctaggcgagccaggcgccgccgcccccgccatgtacgacgacgagagcgccatcgacttcagcgcctacatcgactccatggccgccgtgcccaccctggagctgtgccacgacgagctcttcgccgacctcttcaacagcaatcacaaggcgcgcgccccttgggcccgggccctgccgctccccgcctgctcaagcgcgagcccgactggggcgacggcgacgcgcccggctcgctgttgcccgcgcaggtggccgcgtgcgcacagaccgtggtgagcttggcggccgcagggcagcccaccccgcccacgtcgccggagccgccgcgcagcagccccaggcagacccccgcgcccggccccgcccgggagaagagcgccggcaagaggggcccggaccgcggcagccccgagtaccggcagcggcgcgagcgcaacaacatcgccgtgcgcaagagccgcgacaaggccaagcggcgcaaccaggagatgcagcagaagttggtggagctgtcggctgagaacgagaagctgcaccagcgcgtggagcagctcacgcgggacctggccggcctccggcagttcttcaagcagctgcccagcccgcccttcctgccggccgccgggacagcagactgccggtaacgcgcggccggggcgggagagactcagcaacgacccatacctcagacccgacggcccggagcggagcgcgccctgccctggcgcagccagagccgccgggtgcccgctgcagtttcttgggacataggagcgcaaagaagctacagcctggacttaccaccactaaactgcgagagaagctaaacgtgtttattttcccttaaattatttttgtaatggtagctttttctacatcttactcctgttgatgcagctaaggtacatttgtaaaaagaaaaaaaaccagacttttcagacaaaccctttgtattgtagataagaggaaaagactgagcatgctcacttttttatattaatttttacagtatttgtaagaataaagcagcatttgaaatcg

SEQ ID NO: 153745 - DNA, 810 bp, Artificial Sequence
  derived and/or modified sequence
atgagcgccgccctgttcagcctggacggccccgccagaggcgccccctggcccgccgagcccgcccccttctacgagcccggcagagccggcaagcccggcagaggcgccgagcccggcgccctgggcgagcccggcgccgccgcccccgccatgtacgacgacgagagcgccatcgacttcagcgcctacatcgacagcatggccgccgtgcccaccctggagctgtgccacgacgagctgttcgccgacctgttcaacagcaaccacaaggccggcggcgccggccccctggagctgctgcccggcggccccgccagacccctgggccccggccccgccgcccccagactgctgaagagagagcccgactggggcgacggcgacgcccccggcagcctgctgcccgcccaggtggccgcctgcgcccagaccgtggtgagcctggccgccgccggccagcccaccccccccaccagccccgagccccccagaagcagccccagacagacccccgcccccggccccgccagagagaagagcgccggcaagagaggccccgacagaggcagccccgagtacagacagagaagagagagaaacaacatcgccgtgagaaagagcagagacaaggccaagagaagaaaccaggagatgcagcagaagctggtggagctgagcgccgagaacgagaagctgcaccagagagtggagcagctgaccagagacctggccggcctgagacagttcttcaagcagctgcccagcccccccttcctgcccgccgccggcaccgccgactgcagatag

SEQ ID NO: 153746 - DNA, 402 bp, Artificial Sequence
  derived and/or modified sequence
atgagcgccgccctgttcagcctggacggccccgccagaggcgccccctggcccgccgagcccgcccccttctacgagcccggcagagccggcaagcccggcagaggcgccgagcccggcgccctgggcgagcccggcgccgccgcccccgccatgtacgacgacgagagcgccatcgacttcagcgcctacatcgacagcatggccgccgtgcccaccctggagctgtgccacgacgagctgttcgccgacctgttcaacagcaaccacaaggccagagccccctgggccagagccctgcccctgcccgcctgcagcagcgccagccccaccggcgccaccgccaccagacccgccagatgctgccccagaagatggcccagagcccacagaccctggtag

SEQ ID NO: 153747 - protein, 54 aa, Artificial Sequence
  derived and/or modified sequence
MGPVMPPSKKPESSGISVSSGLSQCYGGSGFSKALQEDDDLDFSLPDIRLEEGA

SEQ ID NO: 153748 - protein, 93 aa, Artificial Sequence
  derived and/or modified sequence
MGPVMPPSKKPESSGISVSSGLSQCYGGSGFSKALQEDDDLDFSLPDIRLEEGAMEDEELTNLNWLHESKNLLKSFGESVLRSVSPVQDLDDD

SEQ ID NO: 153749 - protein, 468 aa, Artificial Sequence
  derived and/or modified sequence
MGPVMPPSKKPESSGISVSSGLSQCYGGSGFSKALQEDDDLDFSLPDIRLEEGAMEDEELTNLNWLHESKNLLKSFGESVLRSVSPVQDLDDDTPPSPAHSDMPYDARQNPNCKPPYSFSCLIFMAIEDSPTKRLPVKDIYNWILEHFPYFANAPTGWKNSVRHNLSLNKCFKKVDKERSQSIGKGSLWCIDPEYRQNLIQALKKTPYHPHPHVFNTPPTCPQAYQSTSGPPIWPGSTFFKRNGALLQVPPGVIQNGARVLSRGLFPGVRPLPITPIGVTAAMRNGITSCRMRTESEPSCGSPVVSGDPKEDHNYSSAKSSNARSTSPTSDSISSSSSSADDHYEFATKGSQEGSEGSEGSFRSHESPSDTEEDDRKHSQKEPKDSLGDSGYASQHKKRQHFAKARKVPSDTLPLKKRRTEKPPESDDEEMKEAAGSLLHLAGIRSCLNNITNRTAKGQKEQKETTKN

SEQ ID NO: 153750 - protein, 208 aa, Artificial Sequence
  derived and/or modified sequence
MGPVMPPSKKPESSGISVSSGLSQCYGGSGFSKALQEDDDLDFSLPDIRLEEGAMEDEELTNLNWLHESKNLLKSFGESVLRSVSPVQDLDDDTPPSPAHSDMPYDARQNPNCKPPYSFSCLIFMAIEDSPTKRLPVKDIYNWILEHFPYFANAPTGWKNSVRHNLSLNKCFKKVDKERSQSIGKGSLWCIDPEYRQNLIQALKKTPY

SEQ ID NO: 153751 - DNA, 7907 bp, Artificial Sequence
  derived and/or modified sequence
gggaggacgcgcggcgcgcccggcggacgccgcaggtcccatgccgcgccgcgacccccgcgcccctgccgcccgcgcccgcggccgccccccgccgcccgccgccccgggctcgccgcgccgcgcccgcgcgtccttagcggggccaccgagcgatgcccgccgggcgcccgcgaaagtttgtcggctcctgctgaagggcagcggcgcccccgcacccccgtgccccgctccggccaggagccttcacgtaaatgggtccagtcatgcctcccagtaagaagccagaaagctcaggaattagtgtctccagtggactgagtcagtgttacgggggcagcggtttctccaaggcccttcaggaagacgatgacctcgacttttctctgcctgacatccgattagaagagggggccatggaagatgaagagctgaccaacctgaactggctgcacgagagcaagaacttgctgaagagctttggggagtcggtcctcaggagtgtcagccccgtccaggacctggacgatgacacccccccatcccctgcccactctgacatgccctacgatgccaggcagaaccccaactgcaaacccccctactccttcagctgcctcatatttatggccatcgaggactctccaaccaagcgcctgccagtgaaggatatctacaactggatcttggaacattttccgtattttgcaaatgcacctactgggtggaaaaactcagtgagacacaatttatcattgaataagtgttttaagaaagtggacaaagagaggagtcagagtattgggaaagggtcgttgtggtgcatagacccagagtatagacaaaatctaattcaggctttgaaaaagacaccttatcacccacacccacacgtgttcaatacacctcccacctgtcctcaggcatatcaaagcacatcaggtccacccatctggccgggcagtaccttcttcaagagaaatggagcccttctccaagttcctccaggagtgatccaaaatggagcgcgggtcctgagccgagggctgtttcctggcgtgcggccgctgccaatcactcccattggggtgacagcggccatgaggaatggcatcaccagctgccggatgcggactgagagtgagccatcttgtggctccccagtggtcagcggagaccccaaggaggatcacaactacagcagtgccaagtcctccaacgcccggagcacctcgcccaccagcgactccatctcctcctcctcctcctcagccgacgaccactatgagtttgccaccaaggggagccaggagggcagcgagggcagcgaggggagcttccggagccacgagagccccagcgacacggaagaggacgacaggaagcacagccagaaggagcccaaggattctctgggggacagcgggtacgcatcccagcacaagaagcgccagcacttcgccaaggccaggaaggtccccagcgacacactgcccctcaaaaagagacgcaccgaaaagccccccgagagcgatgatgaggagatgaaagaagcggcagggtccctcctgcacttagcagggatccggtcctgtttgaataacatcaccaatcggacggcaaaggggcagaaagagcaaaaggaaaccacaaaaaattaaaaacaagtcactgatttgttttgaacttacgaccatttggtttcagcatgtcaggagatttctaatgatttgtggcaatatcagcaattttttttcttttttcttgtttttggtttggttttctttcttttcttttccttttattttgttttaatttgccccctcttctttgttttggacccttaagaattttatttttaaaggagattgaagccatagaactcatattgacactcagctgttttacaaaagcttttcattatctgaagacaaaaccgaaaaagccaaaattaccattgcttcctccagcttgtcagaaacctgtggctgaatccgcagggatgtcaacgtcaatatcacaggaacacacattcggcacctagaaggcacgtgggcaaagtaatcatcgttcaggcccaacccttaggtttaaaaagtcaggttgtccatcccattgggttcactgagtgaaggcacataaagcaattgaggaggaggaggaacccctcgtccccctaggagcagacccaagcttgtggcaccaggcatctgatggtgccaggaaagccactggaattgtcacacggcgagcacagagggccggccaccagtcctcgatgcttctgaaccctgaagcccgatgacatcttacgaggtggacgttggactgttcatgcgcatcgggtgtcagtgactcatggagaagaaatggggtaaatttttagtgatgttgctaatcattgaattctgttctctattaaattaagaaaatgttccaaaagccataagcctgaagattggccctgtgcacgcacgcacacacacacacacacacacacacacacacacacacacacgaaggagagagagagaaaactgatggggaaaacaagctgtgtcttcttaactgcccaagtgaaaagcaaccaagtccaggaaattacaatagctgttaaggaaaggaaataatggtacagatctttttctgtctatcaaaactatttgatccaagtgaaaaaaaaaaaaaaactagaaagctacggaacctgccattagtattgtggtgtatttttaagattaaaggtacactgatggacaaaaaaaaaaagtaaaacatggcaaaaaataaaataactcctatactgccctcaaaatggagtttgcaattaatatcaggatttatctttgcaaaaatcagtgatttccacattcagccagtatagccagcagaaatttctgatccacaatgcatggattcctttgaagaaaaaaaagaaaaagagaaaaaaatcacaaaaacaaactttttttattcaaaagtaacaaagttcttgtaaggtaaataatgtatttagcatgaagcatgaattattttcatataaatatagaaaatagagaaaaggctatgcctgtaatttttaagcccttaggcttagagtttcttttggttttcttcttttttctttccttttctttgctttctttttttcctttttgtttttgtttttgttttttgtttttgtttttttttcgggttattttgttttggttttttgaagcaggtgtttaaggtttaaccttcttcagggacaaattctgactgttggggaacttactctgcaatataaaaatatcttcatgctctggtagggcttggatggttgaactctgtactgccttgtgtgcacttcagccccgaccccctctgattctctgttgaaaagtgtgtcctttctctctgtctgtacatgtttaacatgacgcaataatttgagggcaaacttagtagtgagtgtgtatgatagaatcaagagaattatgggacgcttacttgagaaaatcattaccatgatttggttctaggaaaaaggcagtgaataattatgcaaattagccagaagaaggggaaccgtgctaatgggccttattgggtgaggggacgagatggggttcatgtgaaggaggaagcgatgccgaggtaggaaaggccagccccagacatcctatcgccacaatgccatgtcgcaataggaagcaggggccggccatcgctaccttcagcacactgaccaacctggaattaagaccacctagattgcgagagctgaatttagaaaccagacaacgtcatgcagcccagaaactcctgttgttacctttgcctaagaaattttctttaatggcgggggcggggggcgggggtacaaagagaaatctctaaaagaatatgatcttccatccaagtggagggaaactttaaaacaaaaacacccagtactgtggctcaggatatgatgcgtgaggagagggagggaacagagatgaccttaacttttaaaaaagggactgctgtgggccaaagccaagcccatctgccaggacgaggtaatgtcagagctccatcagcccggacagtgggaactaactggtgcattccccacacttaccttccggtgggttgctgatgagagaacctgaaaaaacctacacctctacagcaggtcgaattcatgacctgaagctgaatacttccagcatatttattcagggtgtaggtgggaataaagtatcttcgcagtgctctgttccctccgtctccccagacatctgacaccctaaaagccatccacagctatggaacctgagcgacaccttgatttgtgttgtcacctgaccaagcctaaagacctccagctcagtcccccaccttcatcccaccccacagatgataaaattcagacctctctcctgaaaggcagaggttcaacattcaggactgtttctggccgaggacttcttccaattaaaacccccaccgtgggctgtctcccctcatttcatttttctaaaggggcagaggcctcttttagaaaataataaaatgcaatgtgtgtgatttacttttctgatctctttgagaaatagagaaatataaaagtgtgttcttaactccagaaccactctttttgcataaatacctcatcgggcagctttctaagtgtgattttcctgagtctcccttcgttggatctgccggaagacttgtcggggaacctttagtgagggtacttcttcctatttttcttctgtttttggaggcatacacattatgcataaccaaaacaatggctcaattgtgtttaactttgtattttgattgttgagaacaaaaacaaaaagtatcaatgtgtatgtggctgtttgtagtgaatttattggagaatgaggttgtccgtgtccttaacaagccaaggggcaggaggcaccctctcttatcccctcctccaagagcagtagagaatttaagcacaagcctatttgtgaaagaatattttgcttaagtgtcattcactttagtcttggaattccttcccaaacgtcaggtgttcttttagcttccaaactagcatatgtatccattagtctgacagatcgcctgaacaccattaagaggtgtggcgtttttgctttcatttctcctgctgggagaagtggcggttcatgtgtcattccagtatctcacatactcacacggggcaggggggagggggaaacggggaactatagcaatatttaaagatgctttggaaaccaaccgtgaacacatcaacaccacgacgtctacgattacttgctattggccctcggatacatttaagagaaagagacagtcactcttttttttcttaaatgatatacatataaacagttatttttatcctattataattgtcttttgtctttatctagtactatgtggaaagggtttgcatcatagatttttcccagccttataatataccataagctcctacttccctgcccctccctaatcagtattctttcaagagttctttggtgaagccatctatctgaaactaaaatgaaccaaacccatatttcactggtggttggagaaaaccatggccaaaacgattgtggcaggtctcaatcttgggagtttttaagaaggaatgtgccagaggccgattcccaagaacagagttttcttttgttttgcagaggcattcaatgtgtctagtgcttgctggccacagcagttactaccacagagccttctgggaggggccgttgtgttgaaggaggctcctgcctgagggacagcatcaggcagtgggctctgtagagtgagaaccaggtggaggccttctgtgcccagctcagagttctgcaccacgccaggactgcccaggccaagggctactgacgcaagttccactcattccactctgtggggggcgccttgggcctctcctggaagggctcttggagaaggaattggagttacgtacaagtgacctaaatgggaagcttttctagatgagattggattaaattccatgtgatttctctttccctttaatccaggttgggactcgtttctttctggtggatcacagctgcccagatgttgcaattgatttttatgtttctgtagagaagtatttttctttcatcttcaggattttttttgccaccaaaagaaaacattggaactctgtgtttcctcttgattgtgacttcccagtgttgacagttaagtccttagtgtcgtaggtcccagcccaccaatactatatcaaacactgttatgcacataatgcagcactgtgatctaatttaaataatacttttttattatttatactactatatataatatacatcaacacttttgctatataacctaagtgataaccctcttttagttacctgccaaactctggacttggtttatattgcagttaacacagttacaaagctgtaatggtgtctttttttcctttgtaacggaatgtgtaaatcaaagtatatacattgtgtggtgttcctgtttctggagtttcatgaggatttacacatggcattcagtgttctgtatagatctgcctacctttgtgaattcatctgttaacccctcttcctttgagagagcaccggcgatggtggttaactccttgtgttttctctctctcctactggttattcttgaattaagcacagactcgtcagctcggttgctttatcatgaataatgtgtgtgaccttgcagttcttccacagttcagcaaacaagtgctagcttcactgaccaaaaattaaggaaggaaaacacagtttttaaaacgatccatcttttaacagccgaaaccgatgtgtctatggtgctgcaccttgctgttgtacttctgaaatcagacgtgtgtgaacgatcatttctgacttaaccgtgagatgctcacgagtacccttcctgttgttttgttagcattgaaatcgagactatttatttggaatatatacaacagtgtttttccactgtatttcatttgcaaaagttgagaactgctttctctaccttttgcaaaataattgatattccatattggattctcaaagacttcgatatggtgaacctattaaacctagaaattgtattcatcctttcatgactgtggcctgagttccccagcccctctcctccttttttttagatgagatttagcacactctcagttatttaaacatgcaacatttcttgagtatgtatgttgaggccatctgagctcatagctgattcagtaaccagtttcatgctgtgtcattcacactcactacttaatactgccatggtgaaaatgtggaggaaaaatgtatccatgtgtgtctgggaagcatatacacttgtacattttttaatactctgattctgtaacatttctgagttttgttttgttttacagaaaaaaaaaaaaagtgataaagcaatcagaagaccaagaggtttactattgatgcttagggtcgtctgaccttggctggccaatagacctacacggccaaattaatttacgagagtaataatttttcaaaagccaattttttttctgtattttctgtatgaaactgccaatatcatgaatagaaagggagaaccataaaggagaaagaacgtgatgttctgttatgttcatgtaaacctaaagaaacagtgtggaggcaggcgcgatcagccgaactctagggacttggtgttgcttggaaggcatccatacctgcattttgcattcttcgtatgtaatcatattgccaaagacaaactatttcatcatttattgtaaataacacttttccccagacctaccataaagtttctgtgatgtattgtcttccagttgcaataaaaattactgagttgcatcaattgaagaaaaacaccaaaaa

SEQ ID NO: 153752 - DNA, 337 bp, Artificial Sequence
  derived and/or modified sequence
gtagcttgcaggtttctgatatcgcatcagtggacaggcggcatgcactatattaacagcctctagaagaccagcattctcgtgattatggaggcccctctgtcttttctgtgacgggagcaatgctgacctcggtttcctggacccattccgactcaggagccttcacgtaaatgggtccagtcatgcctcccagtaagaagccagaaagctcaggaattagtgtctccagtggactgagtcagtgttacgggggcagcggtttctccaaggcccttcaggaagacgatgacctcgacttttctctgcctgacatccgattagaagagggggccat

SEQ ID NO: 153753 - DNA, 505 bp, Artificial Sequence
  derived and/or modified sequence
ggcattccccttctgcacgatggcaaaatctgggcaaagttgaaagttgcaagattccagtcaaacaattgtccttgcttgggtaaatatcctcaaatgaaaaaaaatcagcctctagaagaccagcattctcgtgattatggaggcccctctgtcttttctgtgacgggagcaatgctgacctcggtttcctggacccattccgactcaggagccttcacgtaaatgggtccagtcatgcctcccagtaagaagccagaaagctcaggaattagtgtctccagtggactgagtcagtgttacgggggcagcggtttctccaaggcccttcaggaagacgatgacctcgacttttctctgcctgacatccgattagaagagggggccatggaagatgaagagctgaccaacctgaactggctgcacgagagcaagaacttgctgaagagctttggggagtcggtcctcaggagtgtcagccccgtccaggacctggacgatgaca

SEQ ID NO: 153754 - DNA, 1595 bp, Artificial Sequence
  derived and/or modified sequence
gcgatctgctgcagctcggccgggagacggcgcgacccggcggcggggccacccgcgagtccagcgtcgccgcagccccccaatgcggccgcgagaagcagcgggggggcaggcgatcgaaggagccttcacgtaaatgggtccagtcatgcctcccagtaagaagccagaaagctcaggaattagtgtctccagtggactgagtcagtgttacgggggcagcggtttctccaaggcccttcaggaagacgatgacctcgacttttctctgcctgacatccgattagaagagggggccatggaagatgaagagctgaccaacctgaactggctgcacgagagcaagaacttgctgaagagctttggggagtcggtcctcaggagtgtcagccccgtccaggacctggacgatgacacccccccatcccctgcccactctgacatgccctacgatgccaggcagaaccccaactgcaaacccccctactccttcagctgcctcatatttatggccatcgaggactctccaaccaagcgcctgccagtgaaggatatctacaactggatcttggaacattttccgtattttgcaaatgcacctactgggtggaaaaactcagtgagacacaatttatcattgaataagtgttttaagaaagtggacaaagagaggagtcagagtattgggaaagggtcgttgtggtgcatagacccagagtatagacaaaatctaattcaggctttgaaaaagacaccttatcacccacacccacacgtgttcaatacacctcccacctgtcctcaggcatatcaaagcacatcaggtccacccatctggccgggcagtaccttcttcaagagaaatggagcccttctccaagttcctccaggagtgatccaaaatggagcgcgggtcctgagccgagggctgtttcctggcgtgcggccgctgccaatcactcccattggggtgacagcggccatgaggaatggcatcaccagctgccggatgcggactgagagtgagccatcttgtggctccccagtggtcagcggagaccccaaggaggatcacaactacagcagtgccaagtcctccaacgcccggagcacctcgcccaccagcgactccatctcctcctcctcctcctcagccgacgaccactatgagtttgccaccaaggggagccaggagggcagcgagggcagcgaggggagcttccggagccacgagagccccagcgacacggaagaggacgacaggaagcacagccagaaggagcccaaggattctctgggggacagcgggtacgcatcccagcacaagaagcgccagcacttcgccaaggccaggaaggtccccagcgacacactgcccctcaaaaagagacgcaccgaaaagccccccgagagcgatgatgaggagatgaaagaagcggcagggtccctcctgcacttagcagggatccggtcctgtttgaataacatcaccaatcggacggcaaaggggcagaaagagcaaaaggaaaccacaaaaaattaaaaacaagtcactgatttgttttgaacttacgaccatttggtttcagcatgtc

SEQ ID NO: 153755 - DNA, 851 bp, Artificial Sequence
  derived and/or modified sequence
agctcggccgggagacggcgcgacccggcggcggggccacccgcgagtccagcgtcgccgcagccccccaatgcggccgcgagaagcagcgggggggcaggcgatcgaagcagcctctagaagaccagcattctcgtgattatggaggcccctctgtcttttctgtgacgggagcaatgctgacctcggtttcctggacccattccgactcaggagccttcacgtaaatgggtccagtcatgcctcccagtaagaagccagaaagctcaggaattagtgtctccagtggactgagtcagtgttacgggggcagcggtttctccaaggcccttcaggaagacgatgacctcgacttttctctgcctgacatccgattagaagagggggccatggaagatgaagagctgaccaacctgaactggctgcacgagagcaagaacttgctgaagagctttggggagtcggtcctcaggagtgtcagccccgtccaggacctggacgatgacacccccccatcccctgcccactctgacatgccctacgatgccaggcagaaccccaactgcaaacccccctactccttcagctgcctcatatttatggccatcgaggactctccaaccaagcgcctgccagtgaaggatatctacaactggatcttggaacattttccgtattttgcaaatgcacctactgggtggaaaaactcagtgagacacaatttatcattgaataagtgttttaagaaagtggacaaagagaggagtcagagtattgggaaagggtcgttgtggtgcatagacccagagtatagacaaaatctaattcaggctttgaaaaagacaccttat

SEQ ID NO: 153756 - DNA, 2692 bp, Artificial Sequence
  derived and/or modified sequence
gcgggaggacgcgcggcgcgcccggcggacgccgcaggtcccatgccgcgccgcgacccccgcgcccctgccgcccgcgcccgcggccgccccccgccgcccgccgccccgggctcgccgcgccgcgcccgcgcgtccttagcggggccaccgagcgatgcccgccgggcgcccgcgaaagtttgtcggctcctgctgaagggcagcggcgcccccgcacccccgtgccccgctccggccaggagccttcacgtaaatgggtccagtcatgcctcccagtaagaagccagaaagctcaggaattagtgtctccagtggactgagtcagtgttacgggggcagcggtttctccaaggcccttcaggaagacgatgacctcgacttttctctgcctgacatccgattagaagagggggccatggaagatgaagagctgaccaacctgaactggctgcacgagagcaagaacttgctgaagagctttggggagtcggtcctcaggagtgtcagccccgtccaggacctggacgatgacacccccccatcccctgcccactctgacatgccctacgatgccaggcagaaccccaactgcaaacccccctactccttcagctgcctcatatttatggccatcgaggactctccaaccaagcgcctgccagtgaaggatatctacaactggatcttggaacattttccgtattttgcaaatgcacctactgggtggaaaaactcagtgagacacaatttatcattgaataagtgttttaagaaagtggacaaagagaggagtcagagtattgggaaagggtcgttgtggtgcatagacccagagtatagacaaaatctaattcaggctttgaaaaagacaccttatcacccacacccacacgtgttcaatacacctcccacctgtcctcaggcatatcaaagcacatcaggtccacccatctggccgggcagtaccttcttcaagagaaatggagcccttctccaagttcctccaggagtgatccaaaatggagcgcgggtcctgagccgagggctgtttcctggcgtgcggccgctgccaatcactcccattggggtgacagcggccatgaggaatggcatcaccagctgccggatgcggactgagagtgagccatcttgtggctccccagtggtcagcggagaccccaaggaggatcacaactacagcagtgccaagtcctccaacgcccggagcacctcgcccaccagcgactccatctcctcctcctcctcctcagccgacgaccactatgagtttgccaccaaggggagccaggagggcagcgagggcagcgaggggagcttccggagccacgagagccccagcgacacggaagaggacgacaggaagcacagccagaaggagcccaaggattctctgggggacagcgggtacgcatcccagcacaagaagcgccagcacttcgccaaggccaggaaggtccccagcgacacactgcccctcaaaaagagacgcaccgaaaagccccccgagagcgatgatgaggagatgaaagaagcggcagggtccctcctgcacttagcagggatccggtcctgtttgaataacatcaccaatcggacggcaaaggggcagaaagagcaaaaggaaaccacaaaaaattaaaaacaagtcactgatttgttttgaacttacgaccatttggtttcagcatgtcaggagatttctaatgatttgtggcaatatcagcaattttttttcttttttcttgtttttggtttggttttctttcttttcttttccttttattttgttttaatttgccccctcttctttgttttggacccttaagaattttatttttaaaggagattgaagccatagaactcatattgacactcagctgttttacaaaagcttttcattatctgaagacaaaaccgaaaaagccaaaattaccattgcttcctccagcttgtcagaaacctgtggctgaatccgcagggatgtcaacgtcaatatcacaggaacacacattcggcacctagaaggcacgtgggcaaagtaatcatcgttcaggcccaacccttaggtttaaaaagtcaggttgtccatcccattgggttcactgagtgaaggcacataaagcaattgaggaggaggaggaacccctcgtccccctaggagcagacccaagcttgtggcaccaggcatctgatggtgccaggaaagccactggaattgtcacacggcgagcacagagggccggccaccagtcctcgatgcttctgaaccctgaagcccgatgacatcttacgaggtggacgttggactgttcatgcgcatcgggtgtcagtgactcatggagaagaaatggggtaaatttttagtgatgttgctaatcattgaattctgttctctattaaattaagaaaatgttccaaaagccataagcctgaagattggccctgtgcacgcacgcacacacacacacacacacacacacacacacacacacacacgaaggagagagagagaaaactgatggggaaaacaagctgtgtcttcttaactgcccaagtgaaaagcaaccaagtccaggaaattacaatagctgttaaggaaaggaaataatggtacagatctttttctgtctatcaaaactatttgatccaagtgaaaaaaaaaaaaaaa

SEQ ID NO: 153757 - DNA, 165 bp, Artificial Sequence
  derived and/or modified sequence
atgggcccagtgatgcctccaagcaagaaacccgagtctagcggcatttcggtgtcatcaggcctgtcccagtgttatggcgggtcaggcttctctaaggctctccaggaggatgatgatctggactttagcctccctgatatccgtttggaagagggtgcttag

SEQ ID NO: 153758 - DNA, 282 bp, Artificial Sequence
  derived and/or modified sequence
atggggccggttatgccacctagcaaaaagccagagagcagcgggatctccgtctcatcaggcctgtctcaatgttatggcggatctggattcagcaaagcactccaggaggatgatgatctggactttagtctcccggatatccgcttagaggagggcgccatggaggacgaggaactgacaaacctcaactggttgcatgagtccaagaatctgctgaagtcttttggggagagcgtgttgcgtagcgtctctcccgtgcaagacttggacgacgactag

SEQ ID NO: 153759 - DNA, 1407 bp, Artificial Sequence
  derived and/or modified sequence
atggggcccgtgatgcccccatccaaaaaacccgaatccagcgggatatctgtcagctcagggctctcccagtgttacgggggctcagggttttcaaaagcgctgcaggaagacgacgacctggatttttccctgcccgacatcaggcttgaagaaggggccatggaggacgaggaactaaccaacctcaattggcttcatgagagcaaaaacctcctcaagtccttcggcgagagcgtcctgcggtccgtttccccagtccaagacctggatgacgatacacctccctctccggctcattcagacatgccttatgacgctcgacagaatccaaactgtaagcccccatactccttctcatgtctcatcttcatggcgattgaagactccccgaccaaacgcctgccagttaaagacatctacaactggattctggagcatttcccctattttgcaaatgcccctacaggctggaagaacagcgtccgccataacctctccctgaacaagtgctttaaaaaggtggataaagaaaggtcccagtctatcggtaagggaagtctctggtgtatcgacccagagtaccggcagaatctgatccaggcattgaaaaagaccccctatcacccccatccccacgtgtttaacactccgccaacctgtcctcaggcatatcagtccacctcagggccccctatatggccgggctctactttcttcaagcgtaatggggccctattgcaggtccccccaggggtgattcagaacggggcacgcgtgctttccaggggattgtttcctggagtgcgccctctgccaattacgcctatcggcgtgaccgctgctatgagaaacggaatcaccagctgcaggatgcgcaccgagtccgagccctcctgcggcagccccgttgtgagcggtgatcccaaagaagatcataattacagcagcgccaagtcttcaaacgccaggtctacaagtcccacaagtgactcaatcagctccagtagctcctccgctgatgaccactacgagttcgcaacaaaaggaagtcaggagggatccgaagggagcgaaggaagtttccggtcccacgaatccccctctgataccgaggaggacgatcgaaagcactcgcagaaggagccaaaagattctctcggcgatagcgggtatgcctcacagcataaaaaaaggcagcacttcgcgaaggctcgaaaggttccctccgatacgcttcctcttaaaaaacgtcgcacagagaagccgcccgagagcgatgacgaagagatgaaggaggctgcgggctccttgctccacctggcggggatcaggtcttgtcttaataacatcacaaacagaactgcaaaagggcagaaggagcagaaagaaaccacaaagaactag

SEQ ID NO: 153760 - DNA, 627 bp, Artificial Sequence
  derived and/or modified sequence
atgggacccgttatgccacccagcaagaagcctgagagctccggtattagcgttagcagtggtctatctcagtgttacggcggttcggggttctctaaggcattgcaggaggatgacgatttggatttctctctgcccgatatacgtcttgaggagggagcaatggaagacgaggaattgaccaacctgaactggttacacgagtctaagaacctcttgaaaagtttcggcgaaagcgtgttgagaagtgtcagcccagtacaggacctcgacgatgacactcctccatcgcctgcacattctgacatgccgtacgacgcgcgacagaatcccaactgcaagccaccctacagcttttcttgcctcatctttatggcgatcgaggacagccccacgaagcggctgcccgttaaagatatttacaactggatcctggagcacttcccatatttcgcaaacgcgcctaccggatggaaaaattccgtcagacataacctgtcactcaataaatgctttaagaaggtggacaaggagcgcagccagagtattggaaagggatctctctggtgcatcgatccagaatataggcagaaccttatacaggcactcaaaaagaccccttattag

SEQ ID NO: 153761 - DNA, 1407 bp, Artificial Sequence
  derived and/or modified sequence
atgggccccgttatgcccccttccaagaaaccagaatcctcaggcatctccgtttcctccggtctgtctcagtgttacggcggatccggctttagtaaggcgctgcaggaagatgacgacctcgattttagcttgcccgacatccgcttggaggagggagcgatggaggatgaggagctgacaaacctcaactggctgcacgagtctaagaacctgctcaaatccttcggagaaagtgtccttcgcagcgtgtctcctgtacaggacctggacgatgatacaccacccagccccgctcactcagacatgccatacgatgcacgccagaatcctaactgcaagccgccttactcattttcctgcctgatattcatggccatcgaagacagccctacaaagagactgccagtgaaggacatttataattggattttagagcactttccatattttgccaatgccccgaccggctggaagaattccgtgaggcataacttatcccttaacaaatgttttaagaaggtcgacaaagaacggtcccaatctatcgggaaggggagcctgtggtgtattgatcccgaatatcgacagaatctcatccaggcccttaagaagaccccgtaccacccccatccccatgtcttcaacacgcctccaacgtgccctcaggcctatcagtcgacgtccggaccaccgatctggcccggcagcaccttctttaagcgcaacggggccttgttacaggtccctccgggggtgatacagaacggggccagagtgctgtccagaggacttttccctggcgtacgcccattacctataacacctattggcgtcacggccgccatgcgaaatggaataacttcctgtagaatgcgcaccgagtcagagccctcttgcgggagccccgtggtgtccggcgaccccaaggaggatcataactattcctccgctaagtcttccaatgccagatctacttcaccaacctctgactcaatctcatctagttccagttctgccgatgatcactacgaattcgccacaaaggggagccaagagggctcagagggatcggagggtagctttcggtcacacgaatcacccagtgatacagaagaggacgataggaaacattctcagaaggaacccaaggattcgctaggcgactccggctacgcctctcagcacaagaaacggcagcacttcgctaaggcccgcaaagttccttcagatacactgccgttaaaaaagaggcgaacagagaagcctccagagtccgacgatgaagagatgaaagaagccgccggatcactcctccatttggccgggatccgcagctgtctgaacaatatcactaaccgcacagccaaggggcagaaggaacagaaagaaacgacaaagaattag

SEQ ID NO: 153762 - DNA, 165 bp, Artificial Sequence
  derived and/or modified sequence
atgggccctgtgatgccacccagcaagaagccagagagcagcggcatctctgtgagcagcggcctgagccagtgctacggcggcagcggcttcagcaaggccctgcaggaggatgatgacctggacttcagcctgcctgacatccggctggaggagggcgcctag

SEQ ID NO: 153763 - DNA, 282 bp, Artificial Sequence
  derived and/or modified sequence
atgggccctgtgatgccacccagcaagaagccagagagcagcggcatctctgtgagcagcggcctgagccagtgctacggcggcagcggcttcagcaaggccctgcaggaggatgatgacctggacttcagcctgcctgacatccggctggaggagggcgccatggaggatgaggagctgaccaacctgaactggctgcacgagagcaagaacctgctgaagagctttggagagagcgtgctgcggtctgtgtcccctgtgcaggacctggatgatgactag

SEQ ID NO: 153764 - DNA, 1407 bp, Artificial Sequence
  derived and/or modified sequence
atgggccctgtgatgccacccagcaagaagccagagagcagcggcatctctgtgagcagcggcctgagccagtgctacggcggcagcggcttcagcaaggccctgcaggaggatgatgacctggacttcagcctgcctgacatccggctggaggagggcgccatggaggatgaggagctgaccaacctgaactggctgcacgagagcaagaacctgctgaagagctttggagagagcgtgctgcggtctgtgtcccctgtgcaggacctggatgatgacaccccacccagccctgcccacagcgacatgccctatgatgcccggcagaaccccaactgcaagccaccctacagcttcagctgcctgatcttcatggccatcgaggacagccccaccaagaggctgcctgtgaaggacatctacaactggatcctggagcacttcccctactttgccaatgcccccaccggctggaagaacagcgtgcgccacaacctgagcctgaacaagtgcttcaagaaggtggacaaggagaggagccagagcatcggcaagggcagcctgtggtgcattgatcctgagtaccggcagaacctgatccaggccctgaagaagaccccctaccacccccacccccacgtgttcaacaccccacccacctgcccccaggcctaccagagcaccagcggcccccccatctggccaggcagcaccttcttcaagagaaatggagccctgctgcaggtgcccccaggagtcatccagaatggagcccgggtgctgagccggggcctcttccctggggtgcggcccctgcccatcacccccatcggcgtgacagctgccatgagaaatggcatcaccagctgcaggatgaggacagagagcgagcccagctgtggcagccctgtggtgtctggggaccccaaggaggaccacaactacagcagcgccaagagcagcaatgcccggagcaccagccccaccagtgacagcatcagcagcagcagcagcagcgcagatgaccactatgaatttgccaccaagggcagccaggagggcagcgagggcagcgagggcagcttccgcagccatgagagccccagcgacacagaagaagatgacaggaagcacagccagaaggagcccaaggacagcctgggggacagcggctacgccagccagcacaagaagaggcagcactttgccaaggccaggaaggtgcccagcgacaccctgcccctgaagaagagaagaacagagaagcccccagagagtgatgatgaggagatgaaggaggccgccggcagcctgctgcacctggccggcatccgcagctgcctgaacaacatcaccaacagaacagccaagggccagaaggagcagaaggagaccaccaagaactag

SEQ ID NO: 153765 - DNA, 627 bp, Artificial Sequence
  derived and/or modified sequence
atgggccctgtgatgccacccagcaagaagccagagagcagcggcatctctgtgagcagcggcctgagccagtgctacggcggcagcggcttcagcaaggccctgcaggaggatgatgacctggacttcagcctgcctgacatccggctggaggagggcgccatggaggatgaggagctgaccaacctgaactggctgcacgagagcaagaacctgctgaagagctttggagagagcgtgctgcggtctgtgtcccctgtgcaggacctggatgatgacaccccacccagccctgcccacagcgacatgccctatgatgcccggcagaaccccaactgcaagccaccctacagcttcagctgcctgatcttcatggccatcgaggacagccccaccaagaggctgcctgtgaaggacatctacaactggatcctggagcacttcccctactttgccaatgcccccaccggctggaagaacagcgtgcgccacaacctgagcctgaacaagtgcttcaagaaggtggacaaggagaggagccagagcatcggcaagggcagcctgtggtgcattgatcctgagtaccggcagaacctgatccaggccctgaagaagaccccctactag

SEQ ID NO: 153766 - DNA, 165 bp, Artificial Sequence
  derived and/or modified sequence
atgggccccgtgatgccccccagcaagaagcccgagagcagcggcatctcagttagctccggtctgtcccagtgttacggagggtctggtttctccaaggctttgcaggaggacgacgacctggacttcagtctgccagacatccgtctcgaggagggagcatag

SEQ ID NO: 153767 - DNA, 282 bp, Artificial Sequence
  derived and/or modified sequence
atgggccccgtgatgccccccagcaagaagcccgagagcagcggcatatcggtctcatctggcttgagccagtgctacggcgggagtggcttttccaaggccctccaggaagatgacgatctcgactttagcctgccagacatccgtctcgaggagggtgcgatggaggatgaagagctgaccaatctcaattggctgcacgagtccaagaatctgctgaaatctttcggagagagtgtgttgcggtctgtgagtcccgtgcaggacctcgatgatgattag

SEQ ID NO: 153768 - DNA, 1407 bp, Artificial Sequence
  derived and/or modified sequence
atgggccccgtgatgccccccagcaagaagcccgagagcagcggcatcagtgtatcgagcggactgtctcagtgctatggcggcagcgggttcagcaaagcacttcaagaagacgatgacctggacttcagtttgcccgacatccgactcgaggagggggctatggaggatgaagaattaaccaaccttaactggctacacgaatccaagaacttgctcaagagctttggcgaatcagttctgcgatcggtctcccccgtccaggatcttgatgacgatactccaccctccccagcacacagcgacatgccttatgacgccagacagaatccaaattgtaaacccccatacagcttttcctgcctgatcttcatggcgatcgaggacagcccgactaagcgcctccccgtgaaagacatctataactggatactcgaacacttcccctacttcgcaaatgcacccaccggctggaagaattccgtgcggcataatctgagcttaaataaatgtttcaagaaggtcgataaggagcggtctcagagcataggaaaaggcagtctgtggtgcatcgatccagaatacagacagaacctcatccaagctctgaagaagaccccctatcacccacacccacatgtgtttaacactccacccacctgtcctcaggcctatcagtccacctctggcccccctatttggcccggatctaccttttttaagcggaacggagccctgcttcaggtgcccccgggggttatacaaaatggtgcccgagttctgagtcgcgggctgttcccaggcgttcggccactgcctattacacctatcggtgtgaccgctgccatgcggaacggcataactagttgcagaatgaggacggagagcgaaccgagctgcggcagtcctgttgtgagtggagaccccaaagaagatcataattatagtagtgccaagtccagtaatgctaggtctacctccccgacttctgacagcataagctcctcaagcagttccgcggacgaccactacgagtttgccacaaagggctcccaagagggaagcgaagggtctgaaggcagcttcagaagtcacgaatcgcctagcgatacagaggaagatgacagaaaacactctcagaaagaacccaaagattccctgggggacagcgggtacgccagccagcataaaaaaagacagcatttcgctaaagcacgaaaagtcccttccgacaccctccctctgaagaaaagacgtacagagaaacctcctgagtctgatgatgaggagatgaaagaggccgcgggatcccttctgcacctcgccgggatccgatcctgcctcaacaatatcacgaatcgaacagctaaaggacagaaagagcagaaagagactaccaaaaattag

SEQ ID NO: 153769 - DNA, 627 bp, Artificial Sequence
  derived and/or modified sequence
atgggccccgtgatgccccccagcaagaagcccgagagcagcggcattagtgtcagctctggtctctctcagtgctacggtggcagcggcttttcaaaagccctccaggaggacgatgacttagacttcagcctccccgacatcaggctggaggaaggagctatggaggacgaagagctgacaaatctgaattggctccacgaaagtaagaatctcttgaaatcttttggcgaatctgtcctcaggtccgtgagccctgtgcaggaccttgatgacgacacccccccctccccggcacatagcgatatgccttacgacgcaaggcagaaccctaattgtaagccaccttacagctttagttgtctgatattcatggcgatcgaggatagccccaccaagagattaccggttaaggatatctacaattggatccttgaacatttcccatacttcgctaacgccccaaccggctggaagaactcggtgcgccacaatctttctctgaataagtgcttcaagaaggtggacaaagagcgtagccagtcaatagggaagggaagcttgtggtgcatcgatccggagtaccgacaaaatttaatccaggcccttaagaagacaccatactag

SEQ ID NO: 153770 - DNA, 1407 bp, Artificial Sequence
  derived and/or modified sequence
atgggccccgtgatgccccccagcaagaagcccgagagcagcggcattagtgtctctagcgggctctcacaatgctacggaggatcagggttttctaaagctctgcaggaagatgatgacctggacttcagcctgccagacattagactcgaggagggagccatggaagacgaagaactcaccaacctgaactggcttcacgagagcaagaatttactgaaaagctttggcgagtcagtgctgaggtctgtgtcacccgtgcaggatcttgatgacgatacccctcccagccccgctcattctgatatgccttacgacgctagacagaatcctaactgtaaacctccctatagtttcagctgccttatttttatggcaatagaagactcgcctacaaaaaggttgcctgtaaaagacatctataattggatactggaacacttcccgtatttcgcgaacgctccaacaggatggaagaactctgtgaggcacaatttgtcactgaataagtgtttcaagaaggtggacaaggagcgtagccagtctatcggaaaaggcagcctgtggtgcattgatcccgagtaccggcagaacctgatccaggcccttaaaaaaacaccttaccacccccacccacatgtgttcaacaccccaccaacttgtccccaggcctatcagtctacatccggtccacccatttggccaggttccacttttttcaaacggaatggcgcccttctgcaagtgcccccgggagtaatccagaatggtgcccgggtgctatcaagggggctttttcccggagttagaccactgccgatcacaccaatcggggttacagccgccatgagaaatggaatcaccagttgccgcatgcgcacggaaagcgaaccctcctgcggatcgcctgtggtgtcgggcgacccgaaagaggatcacaattatagtagcgcaaaaagctccaatgcaagaagcacatctcctaccagtgactccatttctagtagctccagttccgctgacgatcactatgagttcgctaccaaaggaagccaagaaggcagtgaaggaagcgagggaagcttccggagccatgaatcccccagcgacacagaagaggacgaccggaaacactctcagaaggagcctaaagattctctgggcgattcaggatacgcttcacagcataagaagcgccagcacttcgccaaagcgcgaaaagtgcccagcgacacattgcctctaaagaaacggcggactgagaaacccccggagtctgatgacgaggaaatgaaggaagccgccgggtcactccttcacctcgcaggtatccgtagctgtctgaataacatcactaataggaccgccaagggacagaaggaacagaaggagactaccaagaactag

SEQ ID NO: 153771 - DNA, 165 bp, Artificial Sequence
  derived and/or modified sequence
atggggcctgtaatgcctcccagcaagaagcctgaaagtagcgggattagcgtgagctcaggcctgagccaatgctatggcggtagcggctttagcaaggccctgcaggaggacgatgatttggatttcagcttgcctgatattcgcctcgaagaaggggcatag

SEQ ID NO: 153772 - DNA, 282 bp, Artificial Sequence
  derived and/or modified sequence
atgggcccagtcatgccgcctagcaaaaagcccgaaagttccggaatatccgtgtctagtggcctgagccagtgttacgggggaagcggcttcagtaaggcactccaggaggacgatgatctcgacttcagcttacctgatatccggcttgaggagggcgcaatggaggacgaggagctcaccaatcttaattggctccatgagtcaaagaacttgcttaagagttttggcgagagtgtgttacggtcagtgtcccctgtgcaggatctcgatgacgattag

SEQ ID NO: 153773 - DNA, 1407 bp, Artificial Sequence
  derived and/or modified sequence
atgggaccagtcatgcctcctagtaaaaagcctgagtctagtggcatctcagtctcgagtggactgtctcagtgttatggcggttctggattctcaaaagcactacaggaggacgacgatctggattttagcctccccgatattagattagaagagggagccatggaggacgaagagttgacgaacctgaattggcttcatgagagcaagaacctactgaagtcctttggggagagcgtcttgcggtccgtgagtcccgtgcaggacctcgacgacgacacacccccatctcccgcacactctgatatgccctatgacgccagacaaaatccgaactgcaagccgccatattcctttagttgcctgatttttatggcaatcgaagacagtcccacaaagcgtctgccagtcaaagacatatacaactggattctggaacactttccttacttcgccaacgcacccacaggttggaagaattcggtgaggcacaatctgtcactcaataaatgtttcaagaaggtcgacaaagaacgctcacagtctattggaaaaggatccctgtggtgtattgatccagaataccggcaaaatcttattcaggccctcaagaaaaccccataccacccacatcctcatgtgttcaatacgccacctacttgccctcaagcctaccagtctacatccggaccaccgatctggcctgggtctaccttcttcaaacggaatggggcactactgcaggttccgccaggtgtgatccaaaacggcgctagagtgttgtctcgtggccttttccccggagttaggccacttccaataactcctataggcgttaccgccgcaatgagaaatggtatcacctcgtgccggatgcgaaccgagtcagaaccctcctgcggatccccggtcgtgagcggggaccctaaggaagatcacaattactcatcagccaaatcatccaatgccaggtctactagtcctacatcagactcgatctcttcctcgtcatcctctgccgatgaccactacgagtttgcaaccaagggtagccaagaggggtctgagggcagcgaaggaagcttccgcagccatgagtctcccagcgacaccgaggaggacgataggaagcatagtcaaaaagagccgaaggattccctgggcgatagtgggtatgcctcacaacataaaaaacgtcagcacttcgctaaggcacgcaaagtgccttccgacactttgcccctcaagaagagaagaaccgagaaacccccagagtccgacgatgaggagatgaaggaggctgctggcagcctgttgcacctcgccggtatccgctcctgtctcaataatatcacgaacagaacagccaagggacagaaagaacaaaaggaaacaaccaagaattag

SEQ ID NO: 153774 - DNA, 627 bp, Artificial Sequence
  derived and/or modified sequence
atgggtcctgtcatgcccccatccaagaagcctgaatcatccggaatcagtgtgagctccggactgagtcagtgttacggtggctccggattttcaaaggccctccaggaagacgatgatctggatttctcactgcccgacatcagattggaggagggcgcaatggaagatgaagaactgacaaacttgaattggctgcatgagtctaagaatctcctaaagagctttggagaaagcgtgcttcggagcgtgtccccagtccaggatctcgatgacgacaccccaccctcaccagcccacagcgacatgccatacgacgcccgacaaaatcctaactgcaaacccccatactccttctcctgcctgatatttatggccatagaggactcaccaaccaagagattacctgtgaaggacatttacaattggatcttagagcacttcccctatttcgctaatgccccaaccggttggaaaaattcagttaggcataatctctccctgaataagtgtttcaaaaaggtcgataaggagagatcacagtcgataggcaagggctcattgtggtgtatcgatcccgagtaccgacagaacttgatacaagctcttaaaaagactccctattag

SEQ ID NO: 153775 - DNA, 1407 bp, Artificial Sequence
  derived and/or modified sequence
atgggtcccgtgatgcccccaagcaaaaagccagagtcttcaggcattagtgtgagcagtgggctgtctcagtgttatggcggatccgggttttccaaggccctccaggaagacgacgatctggatttttccctgcctgatatcaggcttgaggagggtgcaatggaggacgaggaactgactaatctgaattggctgcacgaatcaaaaaacctgctgaaatccttcggcgaaagcgtccttcgctctgtttcccccgtgcaggaccttgatgatgacaccccccctagccctgctcactcggacatgccctatgatgcgagacagaatcctaattgcaaacccccatactccttttcatgtctcatcttcatggcaattgaggattcccccaccaaacgtctgcccgtgaaagacatttataactggatcttggagcactttccttatttcgcaaatgccccaacaggttggaaaaacagtgtcagacacaacctgagtctaaataagtgcttcaagaaggtggataaggagaggagtcaatcaatcggaaaaggctcactgtggtgtatcgatccagagtacagacaaaatcttatccaagcactcaagaagacaccgtaccatcctcacccccacgttttcaatacgcctcctacctgcccgcaagcctatcagtctacaagcgggccaccaatctggcctggcagcaccttttttaaaagaaatggagcactcctccaggtgcccccaggggtgattcagaacggtgcaagggttctttcaaggggcttgttcccaggtgtgcgacctttacctattacgccgattggggttaccgccgcaatgaggaacggaatcacatcttgtagaatgcgaaccgaaagtgagccatcctgcggatctccagtagtaagtggggatccgaaagaagaccacaactattcctccgccaagtcttccaacgcacgcagcacttcaccaacatcagactcaatatcctcatcctcctcaagcgccgatgatcactatgagtttgctactaaggggtctcaggaaggctctgaaggcagcgagggcagtttcaggagccacgagtcacccagcgataccgaagaggacgatcgcaaacattcccagaaagaaccaaaggacagcctgggtgattccgggtacgcttcccagcacaagaagcggcagcacttcgctaaggcacgcaaggtgccatcggacactttgcctctgaagaaaagaaggacagagaaacccccagaatccgatgacgaggagatgaaagaggctgcagggagccttctgcacctcgccggaatccgcagctgcctgaacaatatcacaaaccggacggccaaaggacaaaaagagcaaaaggagaccaccaaaaattag

SEQ ID NO: 153776 - DNA, 165 bp, Artificial Sequence
  derived and/or modified sequence
atgggccccgtgatgccccccagcaagaagcccgagagcagcggcatcagcgtgagcagcggcctgagccagtgctacggcggcagcggcttcagcaaggccctgcaggaggacgacgacctggacttcagcctgcccgacatcagactggaggagggcgcctag

SEQ ID NO: 153777 - DNA, 282 bp, Artificial Sequence
  derived and/or modified sequence
atgggccccgtgatgccccccagcaagaagcccgagagcagcggcatcagcgtgagcagcggcctgagccagtgctacggcggcagcggcttcagcaaggccctgcaggaggacgacgacctggacttcagcctgcccgacatcagactggaggagggcgccatggaggacgaggagctgaccaacctgaactggctgcacgagagcaagaacctgctgaagagcttcggcgagagcgtgctgagaagcgtgagccccgtgcaggacctggacgacgactag

SEQ ID NO: 153778 - DNA, 1407 bp, Artificial Sequence
  derived and/or modified sequence
atgggccccgtgatgccccccagcaagaagcccgagagcagcggcatcagcgtgagcagcggcctgagccagtgctacggcggcagcggcttcagcaaggccctgcaggaggacgacgacctggacttcagcctgcccgacatcagactggaggagggcgccatggaggacgaggagctgaccaacctgaactggctgcacgagagcaagaacctgctgaagagcttcggcgagagcgtgctgagaagcgtgagccccgtgcaggacctggacgacgacaccccccccagccccgcccacagcgacatgccctacgacgccagacagaaccccaactgcaagcccccctacagcttcagctgcctgatcttcatggccatcgaggacagccccaccaagagactgcccgtgaaggacatctacaactggatcctggagcacttcccctacttcgccaacgcccccaccggctggaagaacagcgtgagacacaacctgagcctgaacaagtgcttcaagaaggtggacaaggagagaagccagagcatcggcaagggcagcctgtggtgcatcgaccccgagtacagacagaacctgatccaggccctgaagaagaccccctaccacccccacccccacgtgttcaacaccccccccacctgcccccaggcctaccagagcaccagcggcccccccatctggcccggcagcaccttcttcaagagaaacggcgccctgctgcaggtgccccccggcgtgatccagaacggcgccagagtgctgagcagaggcctgttccccggcgtgagacccctgcccatcacccccatcggcgtgaccgccgccatgagaaacggcatcaccagctgcagaatgagaaccgagagcgagcccagctgcggcagccccgtggtgagcggcgaccccaaggaggaccacaactacagcagcgccaagagcagcaacgccagaagcaccagccccaccagcgacagcatcagcagcagcagcagcagcgccgacgaccactacgagttcgccaccaagggcagccaggagggcagcgagggcagcgagggcagcttcagaagccacgagagccccagcgacaccgaggaggacgacagaaagcacagccagaaggagcccaaggacagcctgggcgacagcggctacgccagccagcacaagaagagacagcacttcgccaaggccagaaaggtgcccagcgacaccctgcccctgaagaagagaagaaccgagaagccccccgagagcgacgacgaggagatgaaggaggccgccggcagcctgctgcacctggccggcatcagaagctgcctgaacaacatcaccaacagaaccgccaagggccagaaggagcagaaggagaccaccaagaactag

SEQ ID NO: 153779 - DNA, 627 bp, Artificial Sequence
  derived and/or modified sequence
atgggccccgtgatgccccccagcaagaagcccgagagcagcggcatcagcgtgagcagcggcctgagccagtgctacggcggcagcggcttcagcaaggccctgcaggaggacgacgacctggacttcagcctgcccgacatcagactggaggagggcgccatggaggacgaggagctgaccaacctgaactggctgcacgagagcaagaacctgctgaagagcttcggcgagagcgtgctgagaagcgtgagccccgtgcaggacctggacgacgacaccccccccagccccgcccacagcgacatgccctacgacgccagacagaaccccaactgcaagcccccctacagcttcagctgcctgatcttcatggccatcgaggacagccccaccaagagactgcccgtgaaggacatctacaactggatcctggagcacttcccctacttcgccaacgcccccaccggctggaagaacagcgtgagacacaacctgagcctgaacaagtgcttcaagaaggtggacaaggagagaagccagagcatcggcaagggcagcctgtggtgcatcgaccccgagtacagacagaacctgatccaggccctgaagaagaccccctactag

SEQ ID NO: 153780 - protein, 395 aa, Artificial Sequence
  derived and/or modified sequence
MAAEATAVAGSGAVGGCLAKDGLQQSKCPDTTPKRRRASSLSRDAERRAYQWCREYLGGAWRRVQPEELRVYPVSGGLSNLLFRCSLPDHLPSVGEEPREVLLRLYGAILQGVDSLVLESVMFAILAERSLGPQLYGVFPEGRLEQYIPSRPLKTQELREPVLSAAIATKMAQFHGMEMPFTKEPHWLFGTMERYLKQIQDLPPTGLPEMNLLEMYSLKDEMGNLRKLLESTPSPVVFCHNDIQEGNILLLSEPENADSLMLVDFEYSSYNYRGFDIGNHFCEWVYDYTHEEWPFYKARPTDYPTQEQQLHFIRHYLAEAKKGETLSQEEQRKLEEDLLVEVSRYALASHFFWGLWSILQASMSTIEFGYLDYAQSRFQFYFQQKGQLTSVHSSS

SEQ ID NO: 153781 - DNA, 1188 bp, Artificial Sequence
  derived and/or modified sequence
atggcagctgaggcaaccgcagtggccggcagcggcgctgttggagggtgcctggccaaggatgggctgcagcagtctaagtgcccagacactactcccaagcgcagaagggcctcgtccctgagccgggacgccgaacgcagggcctaccagtggtgcagagagtacctcgggggagcttggagaagggtgcagcccgaggagctgagagtttacccagtctcaggcggcctatctaatctgctctttagatgttcccttcctgaccacctgccttcagtgggtgaggaacccagggaagtcctgctgcgtctttacggggcaatcctccagggagtggacagtttggttctggagtcggtcatgtttgctatcttagccgagagatctctgggaccgcaactgtacggcgtgttcccagaaggacgactcgagcaatacatcccgtcccgacccctgaaaacccaggagctccgggaacccgtcttgtctgccgccattgccaccaagatggctcagttccacgggatggagatgccttttaccaaggaacctcactggctatttgggacaatggagcgatacctcaagcagatacaggacctgccaccaacaggcctacccgagatgaatctcttagaaatgtatagcttaaaggatgaaatgggaaacttgagaaagttgctcgagtccacaccaagcccagtcgtcttctgccacaacgatatacaggaggggaatatcctcctccttagcgaaccagagaacgccgattccttgatgctcgtggattttgaatatagttcctacaattatcggggatttgatatcggaaatcatttttgcgagtgggtgtatgactacactcacgaagaatggcctttctacaaagcacggcctaccgactatccaacgcaagagcagcagcttcacttcataagacactacttagccgaagccaagaagggcgaaaccctctcccaagaggaacagcggaaattagaggaggacctcttggtcgaagtgtctcggtatgccttggcctctcattttttttgggggttgtggtctatcctccaggcctccatgtcaacaattgagtttgggtatctggactacgcccaaagcagattccagttttacttccagcaaaagggccagctgaccagtgtgcatagttctagctag

SEQ ID NO: 153782 - DNA, 1188 bp, Artificial Sequence
  derived and/or modified sequence
atggctgctgaggccacagctgtggccggcagcggggctgtgggcggctgcctggccaaggatggcctgcagcagagcaaatgtcctgacaccacccccaagagaagaagagccagcagcctgagcagagatgctgagcggcgggcctaccagtggtgccgggagtacctgggcggggcctggaggagagtgcagcctgaggagctgcgggtgtaccctgtgtctgggggcctgagcaacctgctcttccgctgcagcctgcctgaccacctgcccagcgtgggggaggagccccgggaggtgctgctgcggctgtatggagccatcctgcagggcgtggacagcctggtgctggagagcgtgatgtttgccatcctggccgagaggagcctgggcccccagctgtatggagtcttccctgagggccgcctggagcagtacatccccagccggcccctgaagacccaggagctgcgggagcctgtgctgtctgctgccatcgccaccaagatggcccagttccacggcatggagatgcccttcaccaaggagccccactggctgtttggcaccatggagcgctacctgaagcagatccaggacctgcccccaacaggcctgcctgagatgaacctgctggagatgtacagcctgaaggatgagatgggcaacctgaggaagctgctggagagcacccccagccctgtggtgttctgccacaatgacatccaggagggcaacatcctgctgctgtctgagccagaaaatgctgacagcctgatgctggtggactttgagtacagcagctacaactaccggggctttgatattggcaaccacttctgtgagtgggtgtatgactacacccatgaggagtggcccttctacaaggcccggcccacagactaccccacccaggagcagcagctgcacttcatccgccactacctggccgaggccaagaagggggagaccctgagccaggaggagcagaggaagctggaggaggacctgctggtggaggtgagccgctatgccctggccagccacttcttctggggcctgtggagcatcctgcaggcctccatgagcaccatcgagtttggctacctggactatgcccagagccgcttccagttctacttccagcagaagggccagctgacctctgtgcacagcagcagctag

SEQ ID NO: 153783 - DNA, 1188 bp, Artificial Sequence
  derived and/or modified sequence
atggccgccgaggccaccgccgtggccggcagcggcgccgtgggcggctgtctggccaaggacggcctccaacagtccaagtgccccgacactacccctaaacgcaggcgggctagctcgttaagtcgggatgcggagcgcagggcataccaatggtgtcgggagtatctaggtggagcctggcgaagagttcagcccgaagagctgcgggtgtatcctgtctctggtgggctttcaaacctgctcttcaggtgtagcctcccagaccatctccctagtgtgggcgaggaaccgagagaagttctgctgaggctgtacggagctatcttgcagggtgtggacagtctggtactggaaagcgtgatgttcgccattctcgcggagcgttcactgggtccccagctgtacggagtcttccccgagggaaggctggagcaatacatcccaagccgccctcttaaaacgcaagagctgcgggaacccgttttaagtgccgccatcgccaccaaaatggcgcagtttcacggcatggaaatgccctttacaaaggagcctcattggctgttcgggacaatggagcgatacctgaagcagatccaggaccttccccctaccgggcttccagaaatgaatttactcgagatgtattccttgaaagacgagatgggtaatctacgcaagctgctggagagtaccccatcacccgtggttttttgccataacgacatccaggaaggtaacatactccttttgtccgagcccgagaacgccgactcacttatgcttgtggacttcgaatacagttcctacaactacagaggctttgatatagggaaccacttctgtgagtgggtatacgactacacccatgaggagtggcccttttataaggccaggccgacggactatcctacacaagaacagcaattgcactttatccgacattacctggccgaagccaaaaagggcgaaaccttgagtcaggaggagcagagaaagctcgaagaggatctactcgttgaggtctcaagatacgcactcgcctcccacttcttttggggactgtggagtattctgcaggcctctatgagcactattgaatttggttacctcgattacgctcagtctcgtttccaattctactttcagcagaagggccaacttactagtgtacatagcagctcttag

SEQ ID NO: 153784 - DNA, 1188 bp, Artificial Sequence
  derived and/or modified sequence
atggcggctgaagccaccgccgtggccggatcaggcgctgttggtggatgtctcgcaaaggatggtctgcaacagagtaaatgccctgacaccacaccaaagcgcagacgagcgtcttccctatcacgggacgccgagcgcagggcgtatcaatggtgccgagaatatctggggggtgcctggcgacgtgtgcagcctgaggaactacgggtgtatcccgtctctgggggattgtccaacctgttatttcgttgcagcctgccagatcacttgccttcggtcggcgaggagcctagggaggtcctcctgaggctgtacggagccatactgcagggagtcgatagcctggtcttggagagtgtgatgttcgccattctggccgagcgctccttgggcccacaattgtatggggtctttccggaaggcagactggagcagtatataccgagcagacctctgaaaacccaggaacttcgggagccggtcctgtctgccgctattgcaacaaagatggcacagttccatggcatggagatgccgttcaccaaagagccccattggctgtttggcacaatggaacgctacctgaaacagattcaggatcttccccctaccggactacctgaaatgaaccttctcgagatgtactcgttgaaagatgaaatgggcaatctaagaaaactcctcgagagtaccccatctccagttgttttttgccacaacgacatacaggagggcaacattctgttgctgtcagagccagagaacgccgacagcttaatgctcgtggactttgaatatagctcttacaattaccgcggattcgacatcgggaaccacttttgtgaatgggtgtatgattacactcatgaggaatggcccttttataaggctcgtcctacagattatccgactcaggaacagcaactacatttcattaggcattacctggccgaggccaagaaaggcgaaacgctgagccaagaggagcaacgcaagcttgaggaggacctcctggtggaagtgtctcggtacgcactggcatcgcatttcttttggggactctggtccattctccaagctagtatgtcaaccattgaatttggctacctggactacgcgcaatcgcgattccaattttatttccagcagaagggacagcttaccagcgtgcattcctctagctag

SEQ ID NO: 153785 - DNA, 1638 bp, Artificial Sequence
  derived and/or modified sequence
agagatctgcggaattcggccttcggaaagagcccccgggccggggcacggagagagccgagcgccgcagccgtgagccgaatagagccggagagacccgagtatgaccggagaagcccaggccggccggaagaggagccgagcgcggccggaaggaaccgagcccgtccgaagggagcggagcgcagcctggcctggggcccggtcgagcccgcgccatggcggccgaggcgacagctgtggccggaagcggggctgttggcggctgcctggccaaagacggcttgcagcagtctaagtgcccggacactaccccaaaacggcggcgcgcctcgtcgctgtcgcgtgacgccgagcgccgagcctaccaatggtgccgggagtacttgggcggggcctggcgccgagtgcagcccgaggagctgagggtttaccccgtgagcggaggcctcagcaacctgctcttccgctgctcgctcccggaccacctgcccagcgttggcgaggagccccgggaggtgcttctgcggctgtacggagccatcttgcagggcgtggactccctggtgctagaaagcgtgatgttcgccatacttgcggagcggtcgctggggccccagctgtacggagtcttcccagagggccggctggaacagtacatcccaagtcggccattgaaaactcaagagcttcgagagccagtgttgtcagcagccattgccacgaagatggcgcaatttcatggcatggagatgcctttcaccaaggagccccactggctgtttgggaccatggagcggtacctaaaacagatccaggacctgcccccaactggcctccctgagatgaacctgctggagatgtacagcctgaaggatgagatgggcaacctcaggaagttactagagtctaccccatcgccagtcgtcttctgccacaatgacatccaggaagggaacatcttgctgctctcagagccagaaaatgctgacagcctcatgctggtggacttcgagtacagcagttataactataggggctttgacattgggaaccatttttgtgagtgggtttatgattatactcacgaggaatggcctttctacaaagcaaggcccacagactaccccactcaagaacagcagttgcattttattcgtcattacctggcagaggcaaagaaaggtgagaccctctcccaagaggagcagagaaaactggaagaagatttgctggtagaagtcagtcggtatgctctggcatcccatttcttctggggtctgtggtccatcctccaggcatccatgtccaccatagaatttggttacttggactatgcccagtctcggttccagttctacttccagcagaaggggcagctgaccagtgtccactcctcatcctgactccaccctcccactccttggatttctcctggagcctccagggcaggaccttggagggaggaacaacgagcagaaggccctggcgactgggctgagcccccaagtgaaactgaggttcaggagaccggcctgttcctgagtttgagtaggtccccatggctggcaggccagagccccgtgctgtgtatgtaacacaataaacaagcttcttcttcccaccctgtcctggccc

SEQ ID NO: 153786 - DNA, 1188 bp, Artificial Sequence
  derived and/or modified sequence
atggccgccgaggccaccgccgtggccggcagcggcgccgtgggcggctgcctggccaaggacggcctgcagcagagcaagtgccccgacaccacccccaagagaagaagagccagcagcctgagcagagacgccgagagaagagcctaccagtggtgcagagagtacctgggcggcgcctggagaagagtgcagcccgaggagctgagagtgtaccccgtgagcggcggcctgagcaacctgctgttcagatgcagcctgcccgaccacctgcccagcgtgggcgaggagcccagagaggtgctgctgagactgtacggcgccatcctgcagggcgtggacagcctggtgctggagagcgtgatgttcgccatcctggccgagagaagcctgggcccccagctgtacggcgtgttccccgagggcagactggagcagtacatccccagcagacccctgaagacccaggagctgagagagcccgtgctgagcgccgccatcgccaccaagatggcccagttccacggcatggagatgcccttcaccaaggagccccactggctgttcggcaccatggagagatacctgaagcagatccaggacctgccccccaccggcctgcccgagatgaacctgctggagatgtacagcctgaaggacgagatgggcaacctgagaaagctgctggagagcacccccagccccgtggtgttctgccacaacgacatccaggagggcaacatcctgctgctgagcgagcccgagaacgccgacagcctgatgctggtggacttcgagtacagcagctacaactacagaggcttcgacatcggcaaccacttctgcgagtgggtgtacgactacacccacgaggagtggcccttctacaaggccagacccaccgactaccccacccaggagcagcagctgcacttcatcagacactacctggccgaggccaagaagggcgagaccctgagccaggaggagcagagaaagctggaggaggacctgctggtggaggtgagcagatacgccctggccagccacttcttctggggcctgtggagcatcctgcaggccagcatgagcaccatcgagttcggctacctggactacgcccagagcagattccagttctacttccagcagaagggccagctgaccagcgtgcacagcagcagctag

SEQ ID NO: 153787 - protein, 517 aa, Artificial Sequence
  derived and/or modified sequence
MHGGQGPLLLLLLLAVCLGAQGRNQEERLLADLMQNYDPNLRPAERDSDVVNVSLKLTLTNLISLNEREEALTTNVWIEMQWCDYRLRWDPRDYEGLWVLRVPSTMVWRPDIVLENNVDGVFEVALYCNVLVSPDGCIYWLPPAIFRSACSISVTYFPFDWQNCSLIFQSQTYSTNEIDLQLSQEDGQTIEWIFIDPEAFTENGEWAIQHRPAKMLLDPAAPAQEAGHQKVVFYLLIQRKPLFYVINIIAPCVLISSVAILIHFLPAKAGGQKCTVAINVLLAQTVFLFLVAKKVPETSQAVPLISKYLTFLLVVTILIVVNAVVVLNVSLRSPHTHSMARGVRKVFLRLLPQLLRMHVRPLAPAAVQDTQSRLQNGSSGWSITTGEEVALCLPRSELLFQQWQRQGLVAAALEKLEKGPELGLSQFCGSLKQAAPAIQACVEACNLIACARHQQSHFDNGNEEWFLVGRVLDRVCFLAMLSLFICGTAGIFLMAHYNRVPALPFPGDPRPYLPSPD

SEQ ID NO: 153788 - DNA, 1554 bp, Artificial Sequence
  derived and/or modified sequence
atgcatggcgggcagggccctcttctgctgctgctgcttctcgccgtttgtttgggcgcccagggccgcaaccaggaggagcgacttttggccgatcttatgcagaactacgaccccaatttgcgccctgcagagagggactccgacgtggtgaacgtaagcctcaaactgacactaactaacctgattagcctgaatgaacgtgaagaggctctgactacaaatgtatggatcgaaatgcaatggtgtgactatcgactcagatgggatcctagagattatgagggcctgtgggtgttacgagttccgtctaccatggtgtggcggcccgacatcgtcctggaaaacaatgtagatggcgtctttgaggtggccctgtactgcaatgttctcgtctcgcctgatggatgtatctactggttacccccagccatattcagaagcgcatgttcgatctcagtgacatatttcccattcgactggcaaaactgctctctaatctttcagagccaaacatactcaaccaatgaaattgatctgcaactctctcaggaagatggacagacaattgagtggatatttattgaccctgaggcctttaccgagaatggggaatgggccatccaacatcggcccgctaagatgctgctcgatcctgccgcgcccgcccaggaggccggccaccagaaagtggtgttctatctgctgattcagaggaagcccctcttttatgttatcaacatcattgccccgtgcgttctgatctcctctgtggctattttgatccacttcctcccggcaaaagcaggtggccagaagtgcactgtggccatcaacgtgctccttgctcaaacagtgtttttgtttttggtggccaagaaggtccccgaaaccagtcaggcagtacccctcatctctaaataccttacattcctgctcgtagtgaccatcttgatcgtggtcaatgctgtggtagtactgaacgtgtccttgcgatcacctcacacgcatagcatggctaggggggtcagaaaggtatttcttagactcctcccgcagctactgcgaatgcatgtgaggcccctcgccccagccgcagtgcaggatacacagtccagattgcagaatggtagttccggttggtctattacaaccggggaagaagtagccttatgtttgccacgctccgagctgcttttccaacagtggcaaaggcaaggactggtggccgcggcactggaaaagttggaaaagggccccgagctggggctaagccaattctgcggaagcctcaagcaggctgcgccggccatacaggcttgtgtcgaggcatgtaacctcatagcttgcgcccgtcatcagcagtctcactttgataacggaaatgaggaatggtttctagtcggtagagtccttgatcgggtgtgctttcttgcgatgctgtccttatttatatgcggcactgccggtattttcctcatggcccactataatagggtacctgccctcccattccccggggatcccaggccgtacttgcctagtcctgattag

SEQ ID NO: 153789 - DNA, 1554 bp, Artificial Sequence
  derived and/or modified sequence
atgcacggcggacaaggcccactcctgttactcctccttcttgccgtctgcctgggcgctcaggggcgtaatcaagaggaacgcctacttgctgatctgatgcagaattatgatcctaacttgcgccctgcagaaagagactcagatgttgtgaacgtgtctcttaaactgactctgactaatctgataagtttaaatgagcgggaagaggccttaaccactaacgtgtggattgagatgcagtggtgcgactacaggctgagatgggatccacgcgattacgagggactgtgggtgctgagggttccttccactatggtgtggcgccccgacattgtgttagagaacaacgtcgacggagtgttcgaggtggcactgtactgcaatgtgttagtgtcacccgatggatgcatctactggttaccacctgccatctttcgcagtgcttgttctatcagcgtgacctacttcccttttgactggcagaattgcagtttaatttttcagagtcagacatattctacaaacgagatcgatcttcagctgtcacaagaggacggccagacaatcgaatggatttttatcgaccccgaggccttcactgagaacggagagtgggcgatccagcatcgtcccgccaagatgctccttgatccagcagcacccgcacaggaagccggtcaccagaaagtcgtgttttaccttcttattcagcggaagccattattctatgtgatcaatattatcgccccttgtgtccttatttcttcagtggcaatactaattcactttttacccgctaaagcaggcggccagaagtgcaccgtagcaataaacgtgcttcttgcccagaccgtgttcctcttcctggtagccaagaaggtacccgaaacatctcaggctgtcccgctcatctctaagtatcttaccttcctcctggtcgtgacaatactgatcgttgtgaatgctgtggtggtgttaaacgtgtccctccgtagcccgcatacccattccatggctagaggtgtcaggaaagtgtttttaagattgctgccacagctcctgcgtatgcacgtccggcccctggctcctgctgccgtccaggacactcagtcacggttacaaaacggaagcagcggttggtctatcacaacaggagaggaggtggcgctctgtctgccacgatcggagctgctattccagcaatggcagcggcagggcctggtggctgctgcccttgagaaactcgagaaaggaccagagctgggacttagccagttctgtggctccctcaagcaggccgcacctgccattcaagcctgtgtcgaagcttgcaatctgatcgcatgtgctcgacatcagcagtcacactttgacaacgggaatgaagagtggttccttgtaggaagagtgctggatagagtttgttttctggccatgctgagtttatttatttgcgggactgcgggcatttttttgatggctcattacaacagagtacccgctctccccttcccaggagaccccagaccctatctgccaagccccgattag

SEQ ID NO: 153790 - DNA, 1554 bp, Artificial Sequence
  derived and/or modified sequence
atgcacggcggccagggccccctgctgctgctgctgctgctggccgtgtgcctgggcgcccagggcaggaaccaggaggagcggctgctggccgacctgatgcagaactatgaccccaacctgcggcctgctgagcgggacagtgatgtggtgaatgtgtccctgaagctgaccctgaccaacctgatcagcctgaatgaaagagaggaggccctgaccaccaacgtgtggattgagatgcagtggtgtgactaccgcctgcgctgggacccccgggactatgagggcctgtgggtgctgcgggtgcccagcaccatggtgtggaggccagacatcgtgctggagaacaacgtggatggagtgtttgaggtggccctgtactgcaatgtgctggtgtccccagatggctgcatctactggctgcccccagccatcttccgcagcgcctgcagcatctctgtgacctacttcccctttgactggcagaactgcagcctcatcttccagagccagacctacagcaccaatgaaattgacctgcagctgagccaggaggatggccagaccatcgagtggatcttcattgatcctgaggccttcacagaaaatggagagtgggccatccagcacaggcctgccaagatgctgctggaccctgctgccccagcccaggaggccggccaccagaaggtggtgttctacctgctgatccagaggaagcccctcttctacgtgatcaacatcatcgccccctgtgtgctgatcagctctgtggccatcctgatccacttcctgcctgccaaggccggcggccagaagtgcaccgtggccatcaacgtgctgctggcccagacagtgttcctgttcctggtggccaagaaggtgcctgagaccagccaggccgtgcccctcatcagcaagtacctgaccttcctgctggtggtgaccatcctgattgtggtgaatgctgtggtggtgctgaatgtgtccctgcggagcccccacacccacagcatggcccggggcgtgaggaaggtgttcctgcggctgctgccccagctgctgaggatgcacgtgcggcccctggccccagctgctgtgcaggacacccagagccggctgcagaatggcagcagcggctggagcatcaccactggagaggaggtggccctgtgcctgcccaggtctgagctgctcttccagcagtggcagaggcagggcctggtggccgccgccctggagaagctggagaagggccctgagctgggcctgagccagttctgtggcagcctgaagcaggccgccccagccatccaggcctgtgtggaggcctgcaacctgattgcctgtgcccggcaccagcagagccactttgacaatggaaatgaggagtggttcctggtgggccgggtgctggacagagtgtgcttcctggccatgctgagcctcttcatctgtggcacagctggcatcttcctgatggcccactacaacagagtgcctgccctgcccttccctggggacccccggccctacctgcccagcccagactag

SEQ ID NO: 153791 - DNA, 1554 bp, Artificial Sequence
  derived and/or modified sequence
atgcacggcggccagggccccctgctgctgctgctgctgctggccgtgtgtctgggggctcagggacgaaatcaagaggagcggctgctagcagatctcatgcaaaattacgacccaaacctgcgtcctgccgaacgagattctgacgtagtaaacgtgagcctcaaactgacccttactaacctcataagcttgaacgaaagagaggaagcccttaccactaatgtgtggattgaaatgcagtggtgtgattaccgtttacggtgggatccccgtgattacgaggggctatgggtgctacgggtcccgtccacaatggtgtggcggcccgacattgtcctggagaacaacgtggatggggtttttgaagtcgcgctgtattgtaatgtgttggttagccctgacgggtgtatatattggctgcctccagccatctttaggtccgcttgttcaatttcagtgacatattttccgttcgattggcaaaactgcagtctcattttccaaagccaaacatattccacgaacgaaattgatctacagctgagccaggaagacggacagacaatcgaatggatttttatagatccagaagctttcactgagaacggggagtgggcaattcaacaccggcccgctaagatgctgctcgatcctgccgcccccgcacaggaggccgggcaccagaaggtggtgttttatctattaatccagagaaagcctctgttctatgttataaacattattgcaccctgtgtgctgatttcctcagttgctattcttatccacttcctccccgccaaagcaggagggcagaagtgtactgtggccattaacgtcttgcttgcccagactgtgttcctttttttggtcgccaagaaggttccagagacgtcccaggccgtgccgctaatctctaaatacctgacattcctattggtagttaccattctaatagtcgtgaacgcggtggtggttctaaatgtgagccttcgtagtccccatactcacagcatggccagaggggtgaggaaagtattccttaggctgttgccacagctgcttaggatgcatgttagaccacttgctcctgcagccgtgcaggatacacagagccgactacaaaacggttcaagtggatggagtatcaccacgggcgaagaggtcgctctctgtctcccccgttcggagctactattccaacagtggcagagacaaggactcgttgccgcagcgctggagaagctggaaaagggccccgaactggggctttcacaattctgcggctcccttaagcaggccgccccagctattcaggcctgcgtggaagcgtgcaacctgatcgcctgcgctcgtcatcagcagagtcactttgacaatggaaacgaggagtggtttctggtggggcgcgtgctggatcgcgtttgcttcctcgctatgctgtctctgtttatttgtgggactgccggcatattccttatggctcactataatcgtgttccagccttaccattcccaggggatccacgtccatatttgccctctcccgactag

SEQ ID NO: 153792 - DNA, 1554 bp, Artificial Sequence
  derived and/or modified sequence
atgcacggcggccagggccccctgctgctgctgctgctgctggccgtttgtctgggcgctcaggggcgcaaccaggaggagcgactgcttgccgatctcatgcagaattacgacccaaacctgcgtccagcagagcgggatagcgatgttgttaacgtcagtctgaaactgactctcactaacctgataagcctgaatgagagagaggaggcactgactaccaacgtgtggattgagatgcagtggtgtgactataggctgcgctgggatcccagagactatgagggcttgtgggtactaagggtgcccagtactatggtgtggcgtcctgacattgtgctcgagaacaatgtggatggtgtgttcgaggtcgctctgtactgtaatgttctcgtttctcccgacggctgtatctattggcttcctccagcaattttccgatcagcttgttccatttcggtgacctattttccctttgattggcagaactgtagcttaatcttccagagccaaacctattccacgaacgaaatcgacctgcagttgtcgcaggaagacggtcagaccattgaatggatctttatagaccctgaagccttcactgagaatggagaatgggcgatccagcaccgaccggccaaaatgctcctggaccccgcagcccctgcccaagaggccggccaccagaaagtcgtcttctatctgctgattcagagaaagccgctgttttatgtgatcaatattatagccccatgcgtgctcattagctccgttgctattcttatacatttcttgcccgccaaagctgggggacaaaaatgtactgtggccattaacgtcctgctcgcccaaaccgtatttctgttcttagttgccaagaaggtaccagagacaagccaggcggtgcctttgatttccaagtatctcacgttccttctcgtggtcacgattctgatagtggtcaatgcagtagttgttctgaatgtgagcttaaggtcaccacatacgcactctatggcacggggcgttcggaaggtattcctccgattactgccacagctgctgcgcatgcatgtcagaccacttgcgccagctgcggttcaggacacccagagcaggctccagaacggctcttctggctggtcgatcactactggggaggaggttgctctttgtctgccccgctcagaactgctgttccagcagtggcagcggcaagggctggtggccgccgccttagagaagcttgagaagggccccgagctcggtctgtcgcaattctgtgggtcgcttaagcaggctgcacctgcaatccaagcatgtgtcgaggcatgcaatctgatagcatgtgccaggcaccagcagtcacactttgataacggtaacgaagaatggttcctggtcggccgggtcctggatcgggtatgtttcctggctatgctcagtttatttatctgtggtaccgcgggcattttccttatggcccactacaatagggtgcctgcacttcctttccctggcgaccctcgcccttatcttccctcacccgattag

SEQ ID NO: 153793 - DNA, 1554 bp, Artificial Sequence
  derived and/or modified sequence
atgcacggcggacaagggcctttgttattgctcctgctcctcgcagtttgcctcggcgcacaaggacgcaaccaggaggaaaggttgctggccgacttgatgcagaattatgatcctaatctgagacctgctgagcgtgatagcgatgtagtgaacgtctctcttaaacttacactgacgaatctaatctccctgaacgaaagagaagaagcactgaccacgaatgtttggatcgagatgcagtggtgtgactatagactccgctgggatcccagggattatgagggactctgggtgctgagggtcccgtctaccatggtgtggagaccagacatcgtgttagaaaacaacgtggatggtgttttcgaggttgctctctactgcaatgtgcttgtctcccccgacggctgtatttattggctccccccagcaattttccggtctgcatgctcaatctctgtgacctacttccctttcgattggcaaaattgcagtctcatcttccagtcccagacatattctacaaatgaaatcgaccttcagttgtcccaagaggatggccagactatagaatggatctttatcgatcctgaagccttcactgagaacggcgagtgggcaatccagcacagacccgcaaaaatgcttctggacccagcagcaccggcacaggaagcgggtcaccagaaggtggtattttatttacttatccaacgcaagcctctgttctacgtcattaacatcatagcgccttgcgtactgatctctagcgtggctatccttatccacttcttgcccgcaaaggccggtgggcagaagtgcaccgttgccattaacgtattgcttgcccaaacagttttcctcttcctcgtcgcgaaaaaagtgcctgagacgagtcaggccgttcccctgatctccaaatacctcaccttcctgctcgtggtcactattctcatcgtggtgaacgccgtggtcgtcctgaacgtatcacttcgaagcccccacacacattcaatggcccgtggcgtaaggaaagtgttcctgcgcttattacctcagcttcttagaatgcatgttcgacccttggctccagccgctgtgcaggacacccaatcacgcttacagaatggatcatccggctggtctattactactggtgaggaagtggccctctgccttccgaggtccgaactgttgttccaacagtggcagcgccagggattggtggccgctgctctcgagaagctcgaaaaggggccagagctgggcctatcccagttttgtgggtcactgaagcaggcagcgcctgctatccaagcctgtgtcgaggcatgcaatctcattgcatgtgcgagacaccaacagagccattttgataacggcaacgaggagtggttccttgtcggaagggttctggaccgcgtttgttttctcgccatgttgtctctgtttatttgcgggacagcgggtattttcttgatggcccactacaatagggtgcctgctctcccatttcccggtgaccccagaccgtatctgccgagcccagattag

SEQ ID NO: 153794 - DNA, 1554 bp, Artificial Sequence
  derived and/or modified sequence
atgcacggcggtcaggggccattactattgctgctgctgctggcggtgtgtctgggagcccaagggagaaaccaggaagagcggcttttggccgacctgatgcaaaattatgaccctaacctccgtcctgcggaaagagattccgacgttgtaaacgtgagcctgaaactcacccttacaaaccttataagtctgaatgaacgcgaggaggctctcacaacgaacgtatggatagagatgcagtggtgcgactaccggctgcgctgggatcctcgggattatgaggggctgtgggtgttacgagtgccgagcaccatggtgtggagacctgacattgttctggagaacaatgtggatggggtattcgaggtcgccctgtattgcaacgtcttggtgagccccgacggatgcatttattggctgccgccagcaatttttcggtccgcctgttcaatctcagtcacatacttcccgtttgattggcagaactgctccctgatattccagagtcagacctacagcaccaatgaaatagacttacagttgtcacaggaggacggccagactattgagtggattttcatcgatcctgaagcctttaccgaaaatggcgagtgggccatccagcatagaccagctaagatgcttctggatcccgcagcccctgcccaggaggcaggccaccaaaaggtggtgttctatctgcttatccaacgaaagcccctcttctacgtgatcaatatcatcgcaccctgcgtgctgatatcctcggtggcaattctgatacactttctccccgctaaagccggaggacaaaagtgtacagttgctattaacgtgttactcgcacagacagtttttctcttccttgtggctaagaaagtgcctgaaaccagccaggctgtccctctgattagcaagtatctcaccttcctgcttgtcgtcaccattcttatcgtggtgaacgctgtggtagtgcttaacgtgagcttgagaagcccacatacacactcaatggctcgtggcgtgcgtaaggtctttttgagactccttcctcaactcctaagaatgcacgtgcgccctttagcccctgccgctgtgcaggacacgcagtctaggttacaaaatggctccagcggatggagtatcactaccggggaggaggttgctttatgccttccaagaagcgaactactcttccaacagtggcagcgtcaggggctggtggccgctgctctggaaaaactggagaagggcccagaactcggtttaagccagttctgcggcagcctcaagcaggctgcccctgcgatacaggcatgcgtggaagcctgtaacctcatcgcttgcgcacggcaccagcaaagccactttgacaacggtaacgaagagtggtttttggtgggccgtgtcctggatagggtgtgcttcctcgctatgctctccctgtttatctgcggtaccgcaggcatatttctgatggcccattacaatagagtgccagctcttccattcccgggtgacccacgcccttatctcccatcgcctgattag

SEQ ID NO: 153795 - DNA, 2262 bp, Artificial Sequence
  derived and/or modified sequence
actgcagagagctgaggcaccatgcatgggggccaggggccgctgctcctcctgctgctgctggctgtctgcctgggggcccagggccggaaccaggaggagcgcctgctcgcagacctgatgcaaaactacgaccccaacctgcggcccgcggaacgagactcggatgtggtcaatgtcagcctgaagctaaccctcaccaacctcatctccctgaacgagcgagaggaagccctcaccaccaatgtctggatagagatgcagtggtgcgactatcgcctgcgctgggatccgcgagactacgaaggcctgtgggtgctgagggtgccgtccaccatggtgtggcggccggatatcgtgctggagaacaacgtggacggtgtcttcgaggtggccctctactgcaatgtgctcgtgtcccctgacggctgtatctactggctgccgcctgccatcttccgttccgcctgctctatctcagtcacctacttccccttcgactggcagaactgctcccttatcttccagtcccagacttacagcaccaatgagattgatctgcagctgagtcaggaagatggccagaccatcgagtggattttcattgaccctgaggccttcacagagaatggggagtgggccatccagcaccgaccagccaagatgctcctggacccagcggcgccagcccaggaagcaggccaccagaaggtggtgttctacctgctcatccagcgcaagcccctcttctacgtcatcaacatcatcgccccctgtgtgctcatctcctctgtcgccatcctcatccacttccttcctgccaaggctgggggccagaagtgtaccgtcgccatcaacgtgctcctggcccagactgtcttcctcttccttgtggccaagaaggtgcctgaaacctcccaggcggtgccactcatcagcaagtacctgaccttcctcctggtggtgaccatcctcattgtcgtgaatgctgtggttgtgctcaatgtctccttgcggtctccacacacacactccatggcccgaggggtccgcaaggtgttcctgaggctcttgccccagctgctgaggatgcacgttcgcccgctggccccggcagctgtgcaggacacccagtcccggctacagaatggctcctcgggatggtcgatcacaactggggaggaggtggccctctgcctgcctcgcagtgaactcctcttccagcagtggcagcggcaagggctggtggcggcagcgctggagaagctagagaaaggcccggagttagggctgagccagttctgtggcagcctgaagcaggctgccccagccatccaggcctgtgtggaagcctgcaacctcattgcctgtgcccggcaccagcagagtcactttgacaatgggaatgaggagtggttcctggtgggccgagtgctggaccgcgtctgcttcctggccatgctctcgctcttcatctgtggcacagctggcatcttcctcatggcccactacaaccgggtgccggccctgccattccctggagatccacgcccctacctgccctcaccagactgagccaaccaaccactgtggggcatgtgggagtcacacacgtgggtcacactgagtcttatcagccacgttctcctactgaggtcctaagtgtgctctttgggaagtgcccttcaggactgtgtgagccaaacagccctgagaaaagctggggaaacagtctgagctggagtccgagagtggttgggggtgggccgtggctagtgtcctgctgcagtcagcacacacgtgggattggctagctcatcctggcaccagccacccctccactcagtgcactcccctcacttaggcaaagcattattcattcccatcagtctgaagcccgaaggactgttttgtataataccttcggacttgggactggctccccttttacaagttctccctgaaagagggcagtcacaagaggtgtgaagagtagcagccgatgctctctccaaagcagggcagcagcccataccagctggcatctcccccccgtgccttctgggtacaataagcacccaattctcaacagccccagtggcctttccattcatgtgcatttttctgccactgaccacaagacgatttcctgagttttgtaatcctcttttttttttttttttttttagtttttgatgtgttgttgttgttttgtttagttttgagatagagcctcactcttgtcatgcaagttggagtgga

SEQ ID NO: 153796 - DNA, 2739 bp, Artificial Sequence
  derived and/or modified sequence
actgcagagagctgaggcaccatgcatgggggccaggggccgctgctcctcctgctgctgctggctgtctgcctgggggcccagggccggaaccaggaggagcgcctgctcgcagacctgatgcaaaactacgaccccaacctgcggcccgcggaacgagactcggatgtggtcaatgtcagcctgaagctaaccctcaccaacctcatctccctgaacgagcgagaggaagccctcaccaccaatgtctggatagagatgcagtggtgcgactatcgcctgcgctgggatccgcgagactacgaaggcctgtgggtgctgagggtgccgtccaccatggtgtggcggccggatatcgtgctggagaacaacgtggacggtgtcttcgaggtggccctctactgcaatgtgctcgtgtcccctgacggctgtatctactggctgccgcctgccatcttccgttccgcctgctctatctcagtcacctacttccccttcgactggcagaactgctcccttatcttccagtcccagacttacagcaccaatgagattgatctgcagctgagtcaggaagatggccagaccatcgagtggattttcattgaccctgaggccttcacagagaatggggagtgggccatccagcaccgaccagccaagatgctcctggacccagcggcgccagcccaggaagcaggccaccagaaggtggtgttctacctgctcatccagcgcaagcccctcttctacgtcatcaacatcatcgccccctgtgtgctcatctcctctgtcgccatcctcatccacttccttcctgccaaggctgggggccagaagtgtaccgtcgccatcaacgtgctcctggcccagactgtcttcctcttccttgtggccaagaaggtgcctgaaacctcccaggcggtgccactcatcagcaagtacctgaccttcctcctggtggtgaccatcctcattgtcgtgaatgctgtggttgtgctcaatgtctccttgcggtctccacacacacactccatggcccgaggggtccgcaaggtgttcctgaggctcttgccccagctgctgaggatgcacgttcgcccgctggccccggcagctgtgcaggacacccagtcccggctacagaatggctcctcgggatggtcgatcacaactggggaggaggtggccctctgcctgcctcgcagtgaactcctcttccagcagtggcagcggcaagggctggtggcggcagcgctggagaagctagagaaaggcccggagttagggctgagccagttctgtggcagcctgaagcaggctgccccagccatccaggcctgtgtggaagcctgcaacctcattgcctgtgcccggcaccagcagagtcactttgacaatgggaatgaggagtggttcctggtgggccgagtgctggaccgcgtctgcttcctggccatgctctcgctcttcatctgtggcacagctggcatcttcctcatggcccactacaaccgggtgccggccctgccattccctggagatccacgcccctacctgccctcaccagactgagccaaccaaccactgtggggcatgtgggagtcacacacgtgggtcacactgagtcttatcagccacgttctcctactgaggtcctaagtgtgctctttgggaagtgcccttcaggactgtgtgagccaaacagccctgagaaaagctggggaaacagtctgagctggagtccgagagtggttgggggtgggccgtggctagtgtcctgctgcagtcagcacacacgtgggattggctagctcatcctggcaccagccacccctccactcagtgcactcccctcacttaggcaaagcattattcattcccatcagtctgaagcccgaaggactgttttgtataataccttcggacttgggactggctccccttttacaagttctccctgaaagagggcagtcacaagaggtgtgaagagtagcagccgatgctctctccaaagcagggcagcagcccataccagctggcatctcccccccgtgccttctgggtacaataagcacccaattctcaacagccccagtggcctttccattcatgtgcatttttctgccactgaccacaagacgatttcctgagttttgtaatcctcttttttttttttttttttttagtttttgatgtgttgttgttgttttgtttagttttgagatagagcctcactcttgtcatgcaagttggagtggagtgagctgtgatcatgtgactgcactccagcctgatgacacagtaagaccctgtctcaaaaaaaataaaaaaattacaaaactgaaaaaagaaaagtgaaagtgccacataaaggcctgacgacaggatatgctggcaggaggggaccttggaaatatgccctccctccaagcacaggattgctgtctttgggattcaatcaccagcaagttcgtattatttactccagtgtgagtctgtgtctgtgcatgcacagtgtgtttgaagcaagagcagagtcagagctatagagaactagaggagttagggagagtgggggagaacttcaatcagggagggaatctgatgacagtggggccatttccggttcccaccagccccttactagttgtgtatctggcacaagtctctcaacctctctgaaagcctcagagggcagaggattagctccttgtacacaataaacactcaaatgtt

SEQ ID NO: 153797 - DNA, 1554 bp, Artificial Sequence
  derived and/or modified sequence
atgcacggcggccagggccccctgctgctgctgctgctgctggccgtgtgcctgggcgcccagggcagaaaccaggaggagagactgctggccgacctgatgcagaactacgaccccaacctgagacccgccgagagagacagcgacgtggtgaacgtgagcctgaagctgaccctgaccaacctgatcagcctgaacgagagagaggaggccctgaccaccaacgtgtggatcgagatgcagtggtgcgactacagactgagatgggaccccagagactacgagggcctgtgggtgctgagagtgcccagcaccatggtgtggagacccgacatcgtgctggagaacaacgtggacggcgtgttcgaggtggccctgtactgcaacgtgctggtgagccccgacggctgcatctactggctgccccccgccatcttcagaagcgcctgcagcatcagcgtgacctacttccccttcgactggcagaactgcagcctgatcttccagagccagacctacagcaccaacgagatcgacctgcagctgagccaggaggacggccagaccatcgagtggatcttcatcgaccccgaggccttcaccgagaacggcgagtgggccatccagcacagacccgccaagatgctgctggaccccgccgcccccgcccaggaggccggccaccagaaggtggtgttctacctgctgatccagagaaagcccctgttctacgtgatcaacatcatcgccccctgcgtgctgatcagcagcgtggccatcctgatccacttcctgcccgccaaggccggcggccagaagtgcaccgtggccatcaacgtgctgctggcccagaccgtgttcctgttcctggtggccaagaaggtgcccgagaccagccaggccgtgcccctgatcagcaagtacctgaccttcctgctggtggtgaccatcctgatcgtggtgaacgccgtggtggtgctgaacgtgagcctgagaagcccccacacccacagcatggccagaggcgtgagaaaggtgttcctgagactgctgccccagctgctgagaatgcacgtgagacccctggcccccgccgccgtgcaggacacccagagcagactgcagaacggcagcagcggctggagcatcaccaccggcgaggaggtggccctgtgcctgcccagaagcgagctgctgttccagcagtggcagagacagggcctggtggccgccgccctggagaagctggagaagggccccgagctgggcctgagccagttctgcggcagcctgaagcaggccgcccccgccatccaggcctgcgtggaggcctgcaacctgatcgcctgcgccagacaccagcagagccacttcgacaacggcaacgaggagtggttcctggtgggcagagtgctggacagagtgtgcttcctggccatgctgagcctgttcatctgcggcaccgccggcatcttcctgatggcccactacaacagagtgcccgccctgcccttccccggcgaccccagaccctacctgcccagccccgactag

SEQ ID NO: 153798 - protein, 355 aa, Artificial Sequence
  derived and/or modified sequence
MDYTLDLSVTTVTDYYYPDIFSSPCDAELIQTNGKLLLAVFYCLLFVFSLLGNSLVILVLVVCKKLRSITDVYLLNLALSDLLFVFSFPFQTYYLLDQWVFGTVMCKVVSGFYYIGFYSSMFFITLMSVDRYLAVVHAVYALKVRTIRMGTTLCLAVWLTAIMATIPLLVFYQVASEDGVLQCYSFYNQQTLKWKIFTNFKMNILGLLIPFTIFMFCYIKILHQLKRCQNHNKTKAIRLVLIVVIASLLFWVPFNVVLFLTSLHSMHILDGCSISQQLTYATHVTEIISFTHCCVNPVIYAFVGEKFKKHLSEIFQKSCSQIFNYLGRQMPRESCEKSSSCQQHSSRSSSVDYIL

SEQ ID NO: 153799 - protein, 272 aa, Artificial Sequence
  derived and/or modified sequence
MRNLFRQMTYYLLDQWVFGTVMCKVVSGFYYIGFYSSMFFITLMSVDRYLAVVHAVYALKVRTIRMGTTLCLAVWLTAIMATIPLLVFYQVASEDGVLQCYSFYNQQTLKWKIFTNFKMNILGLLIPFTIFMFCYIKILHQLKRCQNHNKTKAIRLVLIVVIASLLFWVPFNVVLFLTSLHSMHILDGCSISQQLTYATHVTEIISFTHCCVNPVIYAFVGEKFKKHLSEIFQKSCSQIFNYLGRQMPRESCEKSSSCQQHSSRSSSVDYIL

SEQ ID NO: 153800 - DNA, 1068 bp, Artificial Sequence
  derived and/or modified sequence
atggattacacgctggatctgtctgtcacaacggtaacagactactactatcctgacatcttttcttctccctgcgatgcggagttgatccagactaacggcaaactgttgcttgccgtgttttactgcctcttatttgtgttttcgctccttgggaactccctggtgatattagtgttagtggtatgtaagaaactgcgatccattaccgacgtgtacttattaaaccttgctctgagtgatcttctcttcgtcttttctttcccttttcagacctactacttgctcgatcagtgggtctttggcacagtgatgtgtaaggtggtctcaggtttttactatatcgggttttatagttcaatgttttttatcaccttgatgagtgtcgaccggtatctcgctgtggtccatgcggtctacgcgctaaaggtcaggactatacggatgggcacaacactgtgcttggctgtgtggctgaccgccattatggcaaccattcccctgctcgtcttttatcaggtcgccagcgaggacggtgtactccaatgttactcgttttataaccaacagaccttaaaatggaagatcttcaccaactttaagatgaatatcctcggtctgctgattcccttcactattttcatgttttgttatattaagatactccatcagttaaagcgatgtcagaaccataacaagaccaaagcaattcgactggtcttaattgtggttatagcatcccttttgttctgggttccgttcaatgttgtgctgttcttgactagcctgcatagtatgcacatcttggacggatgttccatttcacagcagctcacgtatgcgactcatgtcacggaaattatttcctttacacattgttgcgtcaatcccgtcatctatgccttcgtcggcgagaaattcaagaagcatctgtctgagatctttcagaaatcctgctcacagatctttaattacctcggccgccagatgccccgtgagagttgtgaaaagagcagttcatgccagcagcattcgtcaagatctagctcagtagattacattctttag

SEQ ID NO: 153801 - DNA, 819 bp, Artificial Sequence
  derived and/or modified sequence
atgaggaacttattcagacaaatgacgtattacctgcttgatcagtgggttttcggcacagtgatgtgtaaagtagtgtcgggattttactatatagggttctatagcagcatgttcttcattactctaatgtctgtcgaccgctatctggccgtcgtgcacgccgtatacgctctgaaggtgcgtaccatccgaatgggaactactctgtgtctcgccgtgtggctgaccgccataatggctaccatccctttgctagtgttttaccaagtcgctagcgaagacggcgtcttgcagtgctactccttttacaaccagcagaccctcaagtggaaaatcttcaccaactttaagatgaatatcttagggctgttgatcccgttcaccattttcatgttttgttacataaagatcttacaccaactgaagaggtgtcagaaccataataaaacaaaagccatccggctggtactaatagtagtgatcgcctctctgttgttttgggtaccttttaatgtggtgctgtttctcacaagtctgcactccatgcatatcctcgatggatgtagtatatctcaacagctgacgtacgccacccacgtaactgagattatttccttcactcattgctgcgttaatcccgtcatctacgcgttcgtaggcgaaaaattcaagaagcacttatctgaaatctttcaaaaatcttgctctcagattttcaactacctcgggcgtcaaatgccacgcgagagttgtgaaaaatcttctagctgccaacagcattcctctagatcttcaagtgtggactacatcctctag

SEQ ID NO: 153802 - DNA, 1068 bp, Artificial Sequence
  derived and/or modified sequence
atggactacaccctggacctgtctgtgaccaccgtgacagactactactacccagacatcttcagcagcccctgtgatgctgagctgatccagaccaacgggaagctgctgctggccgtgttctactgcctgctgtttgtgttcagcctgctgggcaacagcctggtgatcctggtgctggtggtgtgcaagaagctgcggagcatcacagatgtgtacctgctgaacctggccctgagtgacctgctgtttgtgttctccttccccttccagacctactacctgctggaccagtgggtgtttggaacagtgatgtgcaaggtggtgtctggcttctactacatcggcttctacagctccatgttcttcatcaccctgatgtctgtggaccgctacctggccgtggtgcatgctgtgtatgccctgaaggtgaggaccatccgcatgggcaccaccctgtgcctggccgtgtggctgacagccatcatggccaccatccccctgctggtgttctaccaggtggcctctgaagatggagtgctgcagtgctacagcttctacaaccagcagaccctgaagtggaagatcttcaccaacttcaagatgaacatcctgggcctgctgatccccttcaccatcttcatgttctgctacatcaagatcctgcaccagctgaagcgctgccagaaccacaacaagaccaaggccatccggctggtgctgattgtggtgattgccagcctgctcttctgggtgcccttcaacgtggtgctcttcctgaccagcctgcacagcatgcacatcctggatggctgcagcatcagccagcagctgacctacgccacccacgtgacagagatcatctccttcacccactgctgcgtgaaccctgtgatctatgcctttgtgggggagaagttcaagaagcacctgtctgagatcttccagaagagctgcagccagatcttcaactacctgggccggcagatgccccgggagagctgtgagaagagcagcagctgccagcagcacagcagccgcagcagctctgtggactacatcctgtag

SEQ ID NO: 153803 - DNA, 819 bp, Artificial Sequence
  derived and/or modified sequence
atgaggaacctcttccggcagatgacctactacctgctggaccagtgggtgtttggcaccgtgatgtgcaaggtggtgtctggcttctactacatcggcttctacagctccatgttcttcatcaccctgatgtctgtggaccgctacctggccgtggtgcatgctgtgtatgccctgaaggtgaggaccatccgcatgggcaccaccctgtgcctggccgtgtggctgacagccatcatggccaccatccccctgctggtgttctaccaggtggcctctgaagatggagtgctgcagtgctacagcttctacaaccagcagaccctgaagtggaagatcttcaccaacttcaagatgaacatcctgggcctgctgatccccttcaccatcttcatgttctgctacatcaagatcctgcaccagctgaagcgctgccagaaccacaacaagaccaaggccatccggctggtgctgattgtggtgattgccagcctgctcttctgggtgcccttcaacgtggtgctcttcctgaccagcctgcacagcatgcacatcctggatggctgcagcatcagccagcagctgacctacgccacccacgtgacagagatcatctccttcacccactgctgcgtgaaccctgtgatctatgcctttgtgggggagaagttcaagaagcacctgtctgagatcttccagaagagctgcagccagatcttcaactacctgggccggcagatgccccgggagagctgtgagaagagcagcagctgccagcagcacagcagccgcagcagctctgtggactacatcctgtag

SEQ ID NO: 153804 - DNA, 1068 bp, Artificial Sequence
  derived and/or modified sequence
atggactacaccctggacctgagcgtgaccaccgtgaccgactactactatcccgatatcttcagttcaccttgtgatgctgaactgatccagacaaatggtaaactgttgctcgccgtgttttactgtctgctgtttgtctttagcttgctgggcaactccttagtaatactggtgctggtggtctgcaagaagctccgcagcattacagatgtttaccttctgaatctagcactatcagatctcttgttcgttttttcatttccttttcaaacgtattacctgctggaccagtgggttttcggcacagttatgtgcaaagtggtatccggtttttactatatcggcttctatagttcaatgttcttcataactcttatgagcgttgatagatacctggccgtggtgcatgctgtgtacgctctgaaggtgcggacgattcggatgggcaccacattgtgtctggccgtctggctgacagcaattatggctacaatcccactgcttgtattttaccaggtggcatctgaggacggggtgctacagtgttacagtttttataatcagcagaccctgaaatggaagatctttacaaactttaagatgaacatcctgggactgctcataccgtttacaatattcatgttttgctatattaagatactccatcagcttaaacgatgtcagaaccacaacaagactaaagcaatccgtcttgttctgattgtcgtgatcgcaagtttactgttttgggtgccgttcaatgttgttttattccttacttctctgcactctatgcacatcttggacggctgctcaatatcccagcaactcacatatgccacccacgtgactgagattataagttttacgcactgttgtgtgaaccctgttatttacgcatttgttggcgaaaagttcaaaaagcacttgtctgagattttccagaaaagctgtagccaaatattcaactatctgggacggcagatgccccgggagtcctgtgaaaagagttctagctgccagcaacactcttccagatcgtctagcgtggactatatcctatag

SEQ ID NO: 153805 - DNA, 819 bp, Artificial Sequence
  derived and/or modified sequence
atgcggaacctgttccggcagatgacctactacctgctggaccagtgggtgttcgggactgtgatgtgcaaagtagtgtcgggcttctactacatcggtttctactcatcgatgttttttattaccctgatgagcgtagatcgatacctcgcggtcgtccatgctgtgtatgctctcaaggttcgtaccataagaatgggaacgaccctctgtctcgctgtgtggttgactgccattatggctaccattcccctgcttgtcttttatcaggttgcctcagaggacggcgtgctccagtgttatagtttctacaaccagcagaccctcaaatggaagattttcactaacttcaagatgaacatattgggcctgcttatccctttcacaatattcatgttttgctatatcaagattttacatcagctcaaacgctgtcagaatcataataagactaaggcaatacgcctggttctgatcgtagtcattgcatctttgcttttctgggtgccgttcaatgtggtattatttctcacgtccctccacagcatgcacatacttgacggatgttctattagccagcagttgacgtatgctactcacgtaacggagatcatttcattcactcattgctgcgttaatcctgttatctacgcattcgtaggcgaaaaatttaaaaaacatctaagtgagatcttccagaaatcatgtagccagatcttcaattatctaggccggcagatgccgcgggagagttgcgaaaaaagctcctcttgccagcagcatagctctaggtccagctccgttgattacatcttgtag

SEQ ID NO: 153806 - DNA, 1068 bp, Artificial Sequence
  derived and/or modified sequence
atggattatacactggacttgtcggtgactacagtcacagactactactaccctgacatattcagttccccgtgcgacgctgaacttatccaaaccaacggcaaattactgctggctgtgttctactgtctcctgtttgtgttcagtttattgggcaattctctcgtgatactcgtcctggtcgtgtgtaagaagcttcgcagtatcacagacgtttacctgctcaatttagccctatcggatctgctgtttgtgttcagctttcctttccagacatactatctgttggaccaatgggtttttggaactgttatgtgcaaggtcgtgagcgggttttactacattggtttttactcttctatgttcttcatcaccttgatgagcgtggacagatatctggccgttgtgcacgctgtgtatgcattgaaggtgcggacaattcgtatgggcacgactctgtgcctcgcggtttggctgaccgcaatcatggcaactatccctctgttagtattctaccaggtcgccagcgaggacggtgtcctgcagtgttactccttctataaccagcagaccctgaagtggaagatctttacaaactttaaaatgaatatccttgggctcctgatcccgttcacaatcttcatgttctgctatatcaagattctgcaccagttaaagcgatgccagaaccacaataaaaccaaggccataaggttagtgctgattgtggttattgcctccctacttttctgggttccttttaacgtggtcctgtttctgaccagcctgcattctatgcacatcttagacggctgctcaatatcacagcaactaacatacgccacgcatgtgacagaaataatctcatttacccattgctgtgtcaacccagtgatctatgcctttgtgggcgaaaagtttaaaaaacacctgagtgagattttccagaaaagttgttcacagattttcaactacctcggtaggcagatgccaagggagtcgtgcgagaagtcttccagttgccagcagcactctagtcgaagttccagcgtggactatattctctag

SEQ ID NO: 153807 - DNA, 819 bp, Artificial Sequence
  derived and/or modified sequence
atgaggaatttgttcaggcagatgacctactacttgctagatcaatgggtgtttggcaccgtaatgtgcaaggttgtgagcggcttttattatatcgggttttatagctccatgtttttcatcaccttaatgagtgtcgatcgatatctagctgtggttcacgcagtgtatgccttaaaagttagaaccatacgtatgggaaccaccttatgcctggcagtgtggctgaccgccatcatggcaaccatccccctcctcgtgttttatcaggtggccagtgaagatggagtactccagtgctactccttctataatcagcagaccttgaagtggaaaatatttactaactttaagatgaatatcttgggattactgatccccttcacgatttttatgttttgctatattaagattctacatcagttgaagagatgtcaaaatcataataaaactaaggcaatccgtctggtcctaatcgtcgtgatcgcctccctgctgttctgggtgccgtttaatgtcgtgttgttccttacaagtctgcactccatgcatattctggatggatgcagcataagtcagcagctcacatacgctacacatgtgaccgaaataatcagctttacccattgttgtgtcaatcctgtgatctacgcctttgttggcgaaaaattcaaaaaacacctgtctgaaatcttccagaaaagctgcagccagatttttaactatctgggacgtcagatgcccagagaaagctgtgagaagagctcttcatgtcagcagcattctagccggtcttcatccgttgactatatcctgtag

SEQ ID NO: 153808 - DNA, 1253 bp, Artificial Sequence
  derived and/or modified sequence
tttgtagtgggaggatacctccagagaggctgctgctcattgagctgcactcacatgaggatacagactttgtgaagaaggaattggcaacactgaaacctccagaacaaaggctgtcactaaggtcccgctgccttgatggattatacacttgacctcagtgtgacaacagtgaccgactactactaccctgatatcttctcaagcccctgtgatgcggaacttattcagacaaatggcaagttgctccttgctgtcttttattgcctcctgtttgtattcagtcttctgggaaacagcctggtcatcctggtccttgtggtctgcaagaagctgaggagcatcacagatgtatacctcttgaacctggccctgtctgacctgctttttgtcttctccttcccctttcagacctactatctgctggaccagtgggtgtttgggactgtaatgtgcaaagtggtgtctggcttttattacattggcttctacagcagcatgtttttcatcaccctcatgagtgtggacaggtacctggctgttgtccatgccgtgtatgccctaaaggtgaggacgatcaggatgggcacaacgctgtgcctggcagtatggctaaccgccattatggctaccatcccattgctagtgttttaccaagtggcctctgaagatggtgttctacagtgttattcattttacaatcaacagactttgaagtggaagatcttcaccaacttcaaaatgaacattttaggcttgttgatcccattcaccatctttatgttctgctacattaaaatcctgcaccagctgaagaggtgtcaaaaccacaacaagaccaaggccatcaggttggtgctcattgtggtcattgcatctttacttttctgggtcccattcaacgtggttcttttcctcacttccttgcacagtatgcacatcttggatggatgtagcataagccaacagctgacttatgccacccatgtcacagaaatcatttcctttactcactgctgtgtgaaccctgttatctatgcttttgttggggagaagttcaagaaacacctctcagaaatatttcagaaaagttgcagccaaatcttcaactacctaggaagacaaatgcctagggagagctgtgaaaagtcatcatcctgccagcagcactcctcccgttcctccagcgtagactacattttgtgaggatcaatgaagactaaatataaaaaacattttcttgaatggcatgc

SEQ ID NO: 153809 - DNA, 1247 bp, Artificial Sequence
  derived and/or modified sequence
ctttgtgaagaaggaattggcaacactgaaacctccagaacaaaggctgtcactaaggtcccgctgccttgatggattatacacttgacctcagtgtgacaacagtgaccgactactactaccctgatatcttctcaagcccctgtgatgcggaacttattcagacaaatgacctactatctgctggaccagtgggtgtttgggactgtaatgtgcaaagtggtgtctggcttttattacattggcttctacagcagcatgtttttcatcaccctcatgagtgtggacaggtacctggctgttgtccatgccgtgtatgccctaaaggtgaggacgatcaggatgggcacaacgctgtgcctggcagtatggctaaccgccattatggctaccatcccattgctagtgttttaccaagtggcctctgaagatggtgttctacagtgttattcattttacaatcaacagactttgaagtggaagatcttcaccaacttcaaaatgaacattttaggcttgttgatcccattcaccatctttatgttctgctacattaaaatcctgcaccagctgaagaggtgtcaaaaccacaacaagaccaaggccatcaggttggtgctcattgtggtcattgcatctttacttttctgggtcccattcaacgtggttcttttcctcacttccttgcacagtatgcacatcttggatggatgtagcataagccaacagctgacttatgccacccatgtcacagaaatcatttcctttactcactgctgtgtgaaccctgttatctatgcttttgttggggagaagttcaagaaacacctctcagaaatatttcagaaaagttgcagccaaatcttcaactacctaggaagacaaatgcctagggagagctgtgaaaagtcatcatcctgccagcagcactcctcccgttcctccagcgtagactacattttgtgaggatcaatgaagactaaatataaaaaacattttcttgaatggcatgctagtagcagtgagcaaaggtgtgggtgtgaaaggtttccaaaaaaagttcagcatgaaggatgccatatatgttgttgccaacacttggaacacaatgactaaagacatagttgtgcatgcctggcacaacatcaagcctgtgattgtgtttattgatgatgttgaacaagtggtaactttaaaggattctgtatgccaagtgaaaaaaaaagatgtctgacctccttacatat

SEQ ID NO: 153810 - DNA, 1068 bp, Artificial Sequence
  derived and/or modified sequence
atggactacaccctggacctgagcgtgaccaccgtgaccgactactactaccccgacatcttcagcagcccctgcgacgccgagctgatccagaccaacggcaagctgctgctggccgtgttctactgcctgctgttcgtgttcagcctgctgggcaacagcctggtgatcctggtgctggtggtgtgcaagaagctgagaagcatcaccgacgtgtacctgctgaacctggccctgagcgacctgctgttcgtgttcagcttccccttccagacctactacctgctggaccagtgggtgttcggcaccgtgatgtgcaaggtggtgagcggcttctactacatcggcttctacagcagcatgttcttcatcaccctgatgagcgtggacagatacctggccgtggtgcacgccgtgtacgccctgaaggtgagaaccatcagaatgggcaccaccctgtgcctggccgtgtggctgaccgccatcatggccaccatccccctgctggtgttctaccaggtggccagcgaggacggcgtgctgcagtgctacagcttctacaaccagcagaccctgaagtggaagatcttcaccaacttcaagatgaacatcctgggcctgctgatccccttcaccatcttcatgttctgctacatcaagatcctgcaccagctgaagagatgccagaaccacaacaagaccaaggccatcagactggtgctgatcgtggtgatcgccagcctgctgttctgggtgcccttcaacgtggtgctgttcctgaccagcctgcacagcatgcacatcctggacggctgcagcatcagccagcagctgacctacgccacccacgtgaccgagatcatcagcttcacccactgctgcgtgaaccccgtgatctacgccttcgtgggcgagaagttcaagaagcacctgagcgagatcttccagaagagctgcagccagatcttcaactacctgggcagacagatgcccagagagagctgcgagaagagcagcagctgccagcagcacagcagcagaagcagcagcgtggactacatcctgtag

SEQ ID NO: 153811 - DNA, 819 bp, Artificial Sequence
  derived and/or modified sequence
atgagaaacctgttcagacagatgacctactacctgctggaccagtgggtgttcggcaccgtgatgtgcaaggtggtgagcggcttctactacatcggcttctacagcagcatgttcttcatcaccctgatgagcgtggacagatacctggccgtggtgcacgccgtgtacgccctgaaggtgagaaccatcagaatgggcaccaccctgtgcctggccgtgtggctgaccgccatcatggccaccatccccctgctggtgttctaccaggtggccagcgaggacggcgtgctgcagtgctacagcttctacaaccagcagaccctgaagtggaagatcttcaccaacttcaagatgaacatcctgggcctgctgatccccttcaccatcttcatgttctgctacatcaagatcctgcaccagctgaagagatgccagaaccacaacaagaccaaggccatcagactggtgctgatcgtggtgatcgccagcctgctgttctgggtgcccttcaacgtggtgctgttcctgaccagcctgcacagcatgcacatcctggacggctgcagcatcagccagcagctgacctacgccacccacgtgaccgagatcatcagcttcacccactgctgcgtgaaccccgtgatctacgccttcgtgggcgagaagttcaagaagcacctgagcgagatcttccagaagagctgcagccagatcttcaactacctgggcagacagatgcccagagagagctgcgagaagagcagcagctgccagcagcacagcagcagaagcagcagcgtggactacatcctgtag

SEQ ID NO: 153812 - protein, 97 aa, Artificial Sequence
  derived and/or modified sequence
MALPLRPLTRGLASAAKGGHGGAGARTWRLLTFVLALPSVALCTFNSYLHSGHRPRPEFRPYQHLRIRTKPYPWGDGNHTLFHNSHVNPLPTGYEHP

SEQ ID NO: 153813 - DNA, 294 bp, Artificial Sequence
  derived and/or modified sequence
atggccctgcccctgagacccctgaccagaggcctggccagcgccgccaagggcggccacggcggcgccggcgccagaacctggagactgctgaccttcgtgctggccctgcccagcgtggccctgtgcaccttcaacagctacctgcacagcggccacagacccagacccgagttcagaccctaccagcacctgagaatcagaaccaagccctacccctggggcgacggcaaccacaccctgttccacaacagccacgtgaaccccctgcccaccggctacgagcacccctag

SEQ ID NO: 153814 - DNA, 419 bp, Artificial Sequence
  derived and/or modified sequence
ggtgattggcccagagaggggaggtgaccccaggccccaggaaagggagcgaggacagcgctggttcccggctccccgcaccatcatggctttgcctctgaggcccctgacccggggcttggccagcgctgccaaaggaggccacggaggagcaggagctcgtacctggcgtctgctgaccttcgtgctggcgctgcccagcgtggccctctgcaccttcaactcctatctccactcgggccaccgcccgcgccccgagttccgtccctaccaacacctccgcatccgcaccaagccctacccctggggggacggcaaccacactctgttccacaatagccacgtgaaccctctgcccacgggctacgaacacccctgaggccccggacgcccccggacacaataaaggtgtgaagctt

SEQ ID NO: 153815 - DNA, 294 bp, Artificial Sequence
  derived and/or modified sequence
atggccttgcctttaaggcccctgacacgtggattagcttctgctgccaagggcggccacggtggagcaggcgctagaacttggcgacttctcaccttcgtgctcgcgctaccatcagtggctttgtgcacgttcaattcctatctccactccggacaccgtccgagaccagagttccgcccctaccaacatctgcggatcagaaccaaaccctacccttggggcgatggcaaccatacactcttccacaacagccacgttaacccactgcctacaggttacgaacacccatag

SEQ ID NO: 153816 - DNA, 294 bp, Artificial Sequence
  derived and/or modified sequence
atggccctgcccctgcggcccctgacccggggcctggccagcgctgccaagggcggccacggcggggccggggcccggacctggaggctgctgacctttgtgctggccctgcccagcgtggccctgtgcaccttcaacagctacctgcacagcggccaccggcccaggcctgagttccggccctaccagcacctgcgcatccgcaccaagccctacccctggggagatggcaaccacaccctcttccacaacagccacgtgaaccccctgcccaccggctatgagcacccctag

SEQ ID NO: 153817 - DNA, 294 bp, Artificial Sequence
  derived and/or modified sequence
atggccctgcccctgcggcccctgacccggggcctggccagcgccgctaaaggcggtcacggaggggccggcgctcgcacatggcgccttctgacctttgtgcttgcccttccctcggtggccctctgcacctttaactcttacctgcatagcgggcaccggccaagaccagagttccgcccttaccagcacctgcggatcagaacaaagccctatccctggggtgacggaaatcatacactcttccacaattcccacgtcaaccctcttccaacaggctatgagcatccttag

SEQ ID NO: 153818 - DNA, 294 bp, Artificial Sequence
  derived and/or modified sequence
atggccctcccgctcagacctctcacgcggggactcgcatctgccgctaagggtggacatggaggtgccggtgctcgtacctggcggcttcttacattcgttctcgcactcccgagcgtggccttgtgcactttcaattcgtacttgcatagcggtcaccgcccacgtccagagtttaggccatatcaacacctgcgcataagaactaagccttatccctggggcgacggtaatcatactctattccataactcccacgttaacccacttcccaccgggtatgaacatccgtag

SEQ ID NO: 153819 - protein, 204 aa, Artificial Sequence
  derived and/or modified sequence
MAGNFDSEERSSWYWGRLSRQEAVALLQGQRHGVFLVRDSSTSPGDYVLSVSENSRVSHYIINSSGPRPPVPPSPAQPPPGVSPSRLRIGDQEFDSLPALLEFYKIHYLDTTTLIEPVSRSRQGSGVILRQEEAEYVRALFDFNGNDEEDLPFKKGDILRIRDKPEEQWWNAEDSEGKRGMIPVPYVEKYRPASASVSALIGGR

SEQ ID NO: 153820 - DNA, 615 bp, Artificial Sequence
  derived and/or modified sequence
atggccggcaacttcgacagcgaggagagaagcagctggtactggggcagactgagcagacaggaggccgtggccctgctgcagggccagagacacggcgtgttcctggtgagagacagcagcaccagccccggcgactacgtgctgagcgtgagcgagaacagcagagtgagccactacatcatcaacagcagcggccccagaccccccgtgccccccagccccgcccagcccccccccggcgtgagccccagcagactgagaatcggcgaccaggagttcgacagcctgcccgccctgctggagttctacaagatccactacctggacaccaccaccctgatcgagcccgtgagcagaagcagacagggcagcggcgtgatcctgagacaggaggaggccgagtacgtgagagccctgttcgacttcaacggcaacgacgaggaggacctgcccttcaagaagggcgacatcctgagaatcagagacaagcccgaggagcagtggtggaacgccgaggacagcgagggcaagagaggcatgatccccgtgccctacgtggagaagtacagacccgccagcgccagcgtgagcgccctgatcggcggcagatag

SEQ ID NO: 153821 - DNA, 615 bp, Artificial Sequence
  derived and/or modified sequence
atggccggtaactttgactctgaagagagaagctcgtggtactgggggcgtctgagcagacaggaggctgttgcgctactgcaggggcagaggcatggcgtattcttagttcgggacagttccacatcacccggagactacgttctatctgtgtccgaaaactcacgggtgagtcattacattatcaacagcagcggtcctcgtccgcctgtccctccctcaccagctcagccgccacccggggtgtccccttcaagactgagaatcggcgatcaggaattcgattctctacccgcactgctggaattttataagatccattatcttgataccacaacccttatcgagccagttagtcggtcccggcaaggctctggcgtgattctacggcaggaggaggctgagtacgtgcgcgcactgttcgattttaacggcaatgacgaagaggacttgccctttaagaagggcgatattcttcgcatacgagacaagccggaggaacaatggtggaatgccgaagattccgaaggcaaacgcggcatgattcctgtcccctatgtcgagaaatatcggccagccagcgcttccgtgagcgccctcattgggggtcgatag

SEQ ID NO: 153822 - DNA, 615 bp, Artificial Sequence
  derived and/or modified sequence
atggccggcaactttgattctgaggagaggagctcctggtactggggccgcctgagccggcaggaggccgtggccctgctgcagggccagagacatggagtcttcctggtgcgggacagcagcaccagccctggggactatgtgctgtctgtgtctgagaacagccgggtgagccactacatcatcaacagcagcggccccaggcctcctgtgccccccagccctgcccagcccccacctggggtgagccccagccggctgagaattggagaccaggagtttgacagcctgcctgccctgctggagttctacaagatccactacctggacaccaccaccctgattgagcctgtgagccgcagccggcagggcagcggggtcatcctgcggcaggaggaggccgagtatgtgcgggccctgtttgacttcaatggaaatgatgaggaggacctgcccttcaagaagggggacatcctgcgcatccgggacaagccagaggagcagtggtggaatgcagaagattctgagggcaagaggggcatgatccctgtgccctacgtggagaagtacagacctgccagcgcctctgtgtctgccctgattggaggccgctag

SEQ ID NO: 153823 - DNA, 615 bp, Artificial Sequence
  derived and/or modified sequence
atggccggcaacttcgacagcgaggagcggagcagctggtactgggggagacttagccgtcaagaagccgtggcccttctgcaagggcagcgccacggtgtgtttcttgtccgcgatagttccacctcaccgggggattatgtgctgtcggtttctgagaattcccgagtgtcccactacataatcaacagttctggcccgcgccctcccgtccccccaagccccgcacagccaccacccggtgtttccccatcgcgtctccgcatcggggaccaggaatttgattctctccctgctctgctggagttctataagattcactacttagacaccaccacactcattgaaccagttagccgcagccgtcaggggtctggtgtgatcctgcgccaagaagaggctgagtacgtgagggctctctttgatttcaatggtaatgatgaggaagacctgccttttaagaagggtgatattctaagaattcgggataagcccgaggaacaatggtggaacgctgaggattccgaagggaagcgcggaatgattccagttccttatgtggagaagtaccgccccgcaagcgcctctgtttctgctctgatcggagggagatag

SEQ ID NO: 153824 - DNA, 615 bp, Artificial Sequence
  derived and/or modified sequence
atggcgggaaacttcgacagcgaagagagaagcagttggtattgggggaggctcagccgccaagaggcagtcgcgctgctgcagggccagcgccatggtgtgttcctggtgcgggacagctctacatcccccggagactatgtcctctcagtgtcagagaactcacgggtttcacactacatcatcaatagctccggcccaagacccccagtccctcctagtcccgcacagccaccacccggtgtgtcccccagccgccttaggattggggaccaggagttcgactctttacccgctctgctggagttttataagatccactacctggacaccactacgctgatagaaccagtctcacggtctcggcagggaagcggggtcatcctgcgccaggaggaggcagagtatgtccgtgccttatttgacttcaatggaaatgatgaggaagaccttccatttaaaaagggagacattctgaggattcgtgacaaacctgaagaacagtggtggaacgctgaggactcagagggcaagagaggtatgatacccgttccctatgtggagaaataccggccagcgtctgcctcggtgagcgctttaattgggggtcgctag

SEQ ID NO: 153825 - DNA, 2218 bp, Artificial Sequence
  derived and/or modified sequence
gctgctgtgaagctgaaaccggagccggtccgctgggcggcgggcgccgggggccggaggggcgcgcgcggcggcggcaccccagcgtttaggcgcggaggcagccatggcgggcaacttcgactcggaggagcggagtagctggtactgggggaggttgagtcggcaggaggcggtggcgctgctgcagggccagcggcacggggtgttcctggtgcgggactcgagcaccagccccggggactatgtgctcagcgtctcagagaactcgcgcgtctcccactacatcatcaacagcagcggcccgcgcccgccggtgccaccgtcgcccgcccagcctccgcccggggtgagcccctccagactccgaataggagatcaagagtttgattcattgcctgctttactggaattctacaaaatacactatttggacactacaacgttgatagaaccagtttccagatccaggcagggtagtggagtgattctcaggcaggaggaggcggagtatgtgcgagccctctttgactttaatgggaatgatgaggaagatcttccctttaagaaaggagacatcttgagaatccgggacaagcctgaagagcagtggtggaatgcggaggacagcgaaggcaagagagggatgattccagtcccttacgtcgagaagtatagacctgcctccgcctcagtatcggctctgattggaggtcggtgagctggtaaaggttacgaagattaatgtgagtggtcagtgggaaggggagtgtaatggcaaacgaggtcacttcccattcacacatgtccgtctgctggatcaacagaatcccgatgaggacttcagctgagtatagttcaacagttttgctgacagatgggaacaatcttttttttttttttccaactgccatctatacaattttcttacagatgtcaaaagcagtctagtttatataagcattctgttacctgtgatattttttagactgaactgctccattcctagtcttaattaccatattcagggtacgaactggagggcttgtgtgttagcttctgaattggcaattggaggcggtagtggtcgtgcctgtgtgtatcagaagggataggtatcttgcctcctttctctcaggcagtgcaaatcaccctgtggaaaaccgatggacaggaaggagtgttacacactgcttaccctgatttattcagtggttttgttttcattctggaaccatactatcaaatggcgacagactgttccgttccacccccgtgaagtaatcatgcaccgtgtgaatagtatcaagcaggattgctttcattgtatggagcatgaccagcgtgtgactcattctgacatttcagatcctaagaattctaagaacactactagaagcatttgttccctcctagtcaatgcttcatactttttcttgggattcttttagcccttgacattcttgtcccccaaacctgtaagtaggtgaattcctaagataagtgtgtattttcattccaggtgaaaagcaggatgtaccgagcactttattcagtgcatagctttaagccagtgttggattcactaagtggacagccagtctcccagctctctgccttccccaaaagggtcgtagtaggtcacccttctacagcagctaactagagtcctaactaatgggatccagcagggccatttctccagagggccagtatcctattaggagactcttggaattcttaggttctactcaagagtggaaggaccaatcacctctgatattctgtggaaggttttggggtcaaattctgccctctgcattctgtgcaacttgtataaaagtcaagttagtattacatgaatttggggtagggttagtgctttgaaaaaatgttgaaccggctgggcgcggtggctcacgtctgtaatcccagcactttgggaggccgaggcgggtggatcatgaggtcaggagttcgagaccagcctggccaacatagtgaaaccccatctctgctaaagatataaaaaattagcccggcgtggtggtgcacgcctgtaatcccagctactcgggaggctgaggcaggagaattgcttcaacctgggaggtggaggctgcagtgagccgagatcgcaccactgcgttccagcctgagcgacagggcaagactcagtctcaaaaaaaaaaaaaaggaaaaaaaaaagaaaaaaaaa

SEQ ID NO: 153826 - protein, 303 aa, Artificial Sequence
  derived and/or modified sequence
MSSARFDSSDRSAWYMGPVSRQEAQTRLQGQRHGMFLVRDSSTCPGDYVLSVSENSRVSHYIINSLPNRRFKIGDQEFDHLPALLEFYKIHYLDTTTLIEPAPRYPSPPMGSVSAPNLPTAEDNLEYVRTLYDFPGNDAEDLPFKKGEILVIIEKPEEQWWSARNKDGRVGMIPVPYVEKLVRSSPHGKHGNRNSNSYGIPEPAHAYAQPQTTTPLPAVSGSPGAAITPLPSTQNGPVFAKAIQKRVPCAYDKTALALEVGDIVKVTRMNINGQWEGEVNGRKGLFPFTHVKIFDPQNPDENE

SEQ ID NO: 153827 - DNA, 912 bp, Artificial Sequence
  derived and/or modified sequence
atgagcagcgccagattcgacagcagcgacagaagcgcctggtacatgggccccgtgagcagacaggaggcccagaccagactgcagggccagagacacggcatgttcctggtgagagacagcagcacctgccccggcgactacgtgctgagcgtgagcgagaacagcagagtgagccactacatcatcaacagcctgcccaacagaagattcaagatcggcgaccaggagttcgaccacctgcccgccctgctggagttctacaagatccactacctggacaccaccaccctgatcgagcccgcccccagataccccagcccccccatgggcagcgtgagcgcccccaacctgcccaccgccgaggacaacctggagtacgtgagaaccctgtacgacttccccggcaacgacgccgaggacctgcccttcaagaagggcgagatcctggtgatcatcgagaagcccgaggagcagtggtggagcgccagaaacaaggacggcagagtgggcatgatccccgtgccctacgtggagaagctggtgagaagcagcccccacggcaagcacggcaacagaaacagcaacagctacggcatccccgagcccgcccacgcctacgcccagccccagaccaccacccccctgcccgccgtgagcggcagccccggcgccgccatcacccccctgcccagcacccagaacggccccgtgttcgccaaggccatccagaagagagtgccctgcgcctacgacaagaccgccctggccctggaggtgggcgacatcgtgaaggtgaccagaatgaacatcaacggccagtgggagggcgaggtgaacggcagaaagggcctgttccccttcacccacgtgaagatcttcgacccccagaaccccgacgagaacgagtag

SEQ ID NO: 153828 - DNA, 912 bp, Artificial Sequence
  derived and/or modified sequence
atgtctagcgccaggtttgattcctctgatcgtagtgcctggtatatgggccccgtgagccggcaggaggcgcaaactcgactgcaaggtcagcgacacgggatgtttctggtacgcgattccagcacttgtcctggcgactatgtgctctctgtctctgagaatagtcgcgtttcccactatatcattaactccctgcctaatcgccgtttcaaaattggagatcaggagtttgatcacctccctgccctgctcgagttctataaaatccattaccttgatacaacgactctgatcgaacccgcacctcggtatccttctccacccatgggatctgtatcagcaccgaacctgcctacggcagaagataatctggagtatgtacgcaccctatatgacttcccagggaacgatgcagaggatttgccttttaagaagggcgagattctcgtgatcattgaaaagcctgaagagcaatggtggtctgcgagaaacaaagacggccgagtgggcatgattcccgtgccttacgtggagaagctggtccgctcaagccctcacggcaagcatggcaacagaaactccaattcttacggcatcccagaacctgcccacgcctacgctcagccacagacgacaactccactacccgctgttagcggatcaccaggagctgcaattactccgctgcctagtacccagaacggacccgtcttcgcaaaggcaatccagaagagggtgccatgtgcttacgataagaccgcgttggcacttgaggtcggggacattgttaaggttaccaggatgaatatcaacggtcaatgggagggggaagtgaacggtcggaaaggcctcttcccttttacccacgtgaagatctttgatccccagaacccagatgagaacgaatag

SEQ ID NO: 153829 - DNA, 912 bp, Artificial Sequence
  derived and/or modified sequence
atgtcaagtgccagatttgacagcagtgaccgcagcgcatggtacatgggtcccgtttctagacaagaggctcaaacgcggctccagggacagcgccacgggatgtttctcgtgcgcgacagctccacctgtcccggagactacgtgctctcagtctcagaaaatagcagggtgagtcattacatcattaactctctgccaaaccgtaggtttaaaattggagatcaggaatttgaccaccttccagcgctccttgagttctataagatccactacctggatacaactacgttgatcgagcctgccccgcgataccctagtccacctatgggatcagtgagtgcaccgaacctacctacagccgaagataatctagaatacgtgagaacgctctacgattttcccggtaacgatgccgaggatctgccttttaagaagggtgaaattctggtcataatcgaaaaacctgaagagcaatggtggtcggcgaggaataaggacggaagagtgggaatgatccctgtaccttatgttgaaaagctggtgcgatcgagcccccatgggaagcacggaaatcggaattcaaactcttatgggatccccgaacctgctcatgcatatgctcagccccaaacgaccacacctctgccagccgtgtcaggctccccgggggccgcaatcacccctttgccatccacacagaatggacccgtgttcgcaaaggcaattcagaagcgcgtgccatgtgcatacgacaagacggcactcgctttggaggtaggtgatatcgtgaaggtgacgcgcatgaatatcaatggccagtgggaaggtgaagtgaacggccgcaagggcctgttcccttttactcacgtcaagatattcgaccctcaaaatccagacgagaatgaatag

SEQ ID NO: 153830 - DNA, 912 bp, Artificial Sequence
  derived and/or modified sequence
atgagcagcgccaggtttgacagcagtgacagaagtgcctggtacatgggccctgtgtcccggcaggaggcccagacccggctgcagggccagagacatggcatgttcctggtgcgggacagcagcacctgccctggggactatgtgctgtctgtgtctgagaacagccgggtgagccactacatcatcaacagcctgcccaacagacgcttcaagattggagaccaggagtttgaccacctgcctgccctgctggagttctacaagatccactacctggacaccaccaccctgattgaaccagccccccgctaccccagcccccccatgggctctgtgtctgcccccaacctgcccacagctgaggacaacctggagtatgtgaggaccctgtatgacttccctggaaatgatgctgaggacctgcccttcaagaagggggagatcctggtgatcatcgagaagccagaggagcagtggtggagcgccaggaacaaggatggccgggtgggcatgatccctgtgccctacgtggagaagctggtgcgcagcagcccccacggcaagcacggcaacagaaacagcaacagctatggcatccctgagcccgcccacgcctatgcccagccccagaccaccacccccctgcctgctgtgtctggcagccctggagctgccatcacccccctgcccagcacccagaatggacctgtgtttgccaaggccatccagaagagggtgccctgtgcctatgacaagacagccctggccctggaggtgggggacatcgtgaaggtgaccaggatgaacatcaatggccagtgggagggggaggtgaatggaaggaagggcctcttccccttcacccacgtgaagatctttgacccccagaacccagatgaaaatgaatag

SEQ ID NO: 153831 - DNA, 912 bp, Artificial Sequence
  derived and/or modified sequence
atgagcagcgcccggttcgacagcagcgaccggagcgcctggtacatgggtccagtctctcgtcaggaagcccagacacggctgcagggccaaagacacgggatgttcctggtgcgagatagctccacctgccccggtgattacgtcctcagcgtgtcggagaattcaagagtttcacactatataattaattccctccccaatcggaggttcaaaatcggagaccaagagttcgaccacttgccagctctgctggaattctacaaaatccattatctggacaccaccaccctgattgagcccgcaccccgctatccatcaccccctatggggagtgtttccgctcctaacctacccactgctgaagataatctggagtatgtccggacgctctacgacttccctggaaatgatgctgaggacctgccctttaagaaaggtgagatactggtaattattgagaaacctgaggagcagtggtggtctgcccggaacaaggacgggcgcgttggtatgattcctgtaccatatgtcgagaaactcgttcgaagcagcccacatggaaaacacggtaaccggaactccaacagctatggtatcccggagcctgcacacgcctacgcgcagccccaaaccacaacacctctgcctgccgtgtctggtagtccaggagcagccatcacccccctgcctagtactcaaaacggacctgtgttcgccaaagctattcaaaagcgagtgccatgcgcctacgacaagaccgcattggccttggaagtaggcgacattgtgaaagttactcgtatgaatatcaacggacagtgggaaggggaggtgaatggccgaaaggggctcttccccttcacacacgtgaagatttttgatcctcagaatcccgacgagaacgagtag

SEQ ID NO: 153832 - DNA, 912 bp, Artificial Sequence
  derived and/or modified sequence
atgagcagcgcccggttcgacagcagcgaccggagcgcctggtacatgggacccgtgtcgagacaggaagcccaaacaaggcttcaggggcaaaggcatggaatgtttcttgtgcgagattcatcgacatgcccaggggactatgtcctgagtgtgtctgaaaattcccgagtcagtcattacatcatcaatagcctcccaaacagacgatttaagattggcgaccaggagtttgaccacctacctgcgctgctcgaattttataaaatccattatctggatacaaccacactgatagagcccgccccgcggtatccatcccctccaatgggatcggtctccgcacctaacctgcctacagccgaagacaacttggaatatgtgcggaccctctacgacttcccaggaaatgatgctgaagatctgcctttcaaaaagggagaaatattggttatcattgaaaagccagaggaacagtggtggtccgcaagaaataaagatggccgggtggggatgatccctgtgccctacgtggaaaaactggtgaggagttcacctcacggcaagcatggtaatcgaaacagcaactcatatggtataccagagcctgcacatgcatatgcccagccgcagactacaacaccgctgcccgctgtatcaggctcccccggcgccgccatcaccccccttccctctacacagaacggaccagtgttcgccaaggcaatccagaaaagagtgccttgcgcctatgataagaccgcattagctctcgaagtgggcgacatcgttaaagtaacacggatgaacatcaacggccagtgggaaggagaggtcaacggccggaaaggcctcttcccttttacacatgtgaagatctttgatccacagaacccagacgagaatgaatag

SEQ ID NO: 153833 - DNA, 912 bp, Artificial Sequence
  derived and/or modified sequence
atgtcttcagctcggtttgattcaagcgacaggagcgcctggtacatggggccagtgtctcgccaggaggcccagacacggttacaaggacaacgccacggcatgtttctggtgcgtgactcctcaacatgccccggtgattatgtgttgtctgtgtctgagaatagccgcgttagtcactacatcattaactccctaccgaaccgtaggttcaagatcggggatcaggaattcgaccacctgcccgctctgttagaattttataagattcattacctggatacaactaccctcattgagcctgcacctaggtacccaagccctcccatgggctcagtcagcgccccaaatctgccgacggctgaagataacctggaatacgttaggaccttatatgattttcccggaaatgatgctgaggatctgcccttcaaaaagggggaaatcttggtcatcatcgagaaaccagaggagcagtggtggtctgccagaaacaaggatggaagggtgggtatgatacctgtgccttatgttgaaaagctggtgaggagctccccgcatggcaagcacggaaacaggaactcgaactcttacggcattccagagccggcacatgcatacgcccagccgcagaccacaacaccgttgcctgctgtgtcaggctcccccggtgcggctataactcctctgccttcaactcagaacggaccagtgttcgcaaaggccattcaaaagagggtcccatgcgcgtatgataaaactgcattagctcttgaagtgggcgacatcgtcaaagtgacgcgaatgaacatcaacgggcaatgggagggggaagtcaatgggaggaagggactgtttcccttcacacacgtaaagatcttcgacccacaaaaccccgatgagaatgaatag

SEQ ID NO: 153834 - DNA, 912 bp, Artificial Sequence
  derived and/or modified sequence
atgagctctgcaaggtttgactctagcgatagaagtgcctggtatatgggaccggtgtcgcgtcaggaggctcagactcggctccagggccagcgtcatggtatgtttctcgtccgggattctagcacttgcccaggagactacgtgctctccgtcagtgagaactcacgcgtgtcccactatattatcaactccctaccaaatcggagattcaaaattggagaccaggagtttgatcatctccctgcactgctcgaattctacaaaatccactacctggacaccaccaccctgatcgagcccgctccacggtatccgagcccacctatgggatccgtatccgcaccaaatcttcctaccgcggaggacaacctagagtatgtacggactttgtacgacttccccggaaacgacgctgaggatttgcccttcaagaaaggtgaaattctagttataattgaaaaacctgaggagcagtggtggtcagcccgaaacaaagacggccgagttgggatgattcctgtgccttatgtcgagaaattggtgaggagttcaccccacggcaagcacgggaaccggaactcaaatagttatggtatcccggagccagcccacgcttatgctcagcctcaaaccacaactcccctgccagcagtgtcaggaagccccggagctgctatcacccctctacccagcacccaaaacgggcctgtgttcgcgaaggcgattcagaagcgagtcccctgcgcttacgacaagaccgccctcgcactcgaggtgggcgacatcgttaaagtgacacggatgaacataaatggccagtgggagggcgaggtgaacgggagaaaggggttgtttccattcacgcatgttaagatctttgatccccagaatccagatgagaatgaatag

SEQ ID NO: 153835 - DNA, 5325 bp, Artificial Sequence
  derived and/or modified sequence
cggagggggaggtggctgccgcttctcccgcgtccgccattttgttgctgtggctattgggaacaagctgggcaaaagcaccccggaggcgcgacgctccttcgagttcggtgcctcgtgtgacggcgggggtcggtgaagacccgtcgagctgcggcgccggcgcgttccaggccgggagtcactggaggcacccctgggacgccgagcagcccgagaaccccggggtggcctccgctgcggctcgggtttgcctgccccgaccccccggctctgccgtgcattcccgggcggctctctccgtgtggcggccccggagcaggcgggcggcgtcggaggatgctgcgggcccggagccgagaggaaagtgctggcccagccctctgagcgctcctcgaggtgtgcgagaggcccttcctcggccccaaagccgtctgccgggctaaggcgtgcagagcaggcgaggacagccgccgcccctaccgccgcagagtccccggtccaacaccatgtcctccgccaggttcgactcctcggaccgctccgcctggtatatggggccggtgtctcgccaggaggcgcagacccggctccagggccagcgccacggtatgttcctcgtccgcgattcttccacctgccctggggactatgtgctgtcggtgtccgagaactcgcgggtctcccactacatcatcaactcgctgcccaaccgccgttttaagatcggggaccaggaatttgaccatttgccggccctgctggagttttacaagatccactacctggacaccaccaccctcatcgagcctgcgcccaggtatccaagcccaccaatgggatctgtctcagcacccaacctgcctacagcagaagataacctggaatatgtacggactctgtatgattttcctgggaatgatgccgaagacctgccctttaaaaagggtgagatcctagtgataatagagaagcctgaagaacagtggtggagtgcccggaacaaggatggccgggttgggatgattcctgtcccttatgtcgaaaagcttgtgagatcctcaccacacggaaagcatggaaataggaattccaacagttatgggatcccagaacctgctcatgcatacgctcaacctcagaccacaactcctctacctgcagtttccggttctcctggggcagcaatcacccctttgccatccacacagaatggacctgtctttgcgaaagcaatccagaaaagagtaccctgtgcttatgacaagactgccttggcattagaggttggtgacatcgtgaaagtcacaaggatgaatataaatggccagtgggaaggcgaagtgaacgggcgcaaagggcttttcccctttacgcacgtcaaaatctttgaccctcaaaacccagatgaaaacgagtgattgctgttgccctgtttcctgctgctttgttgttctgcctgtcctagtctcctttgaagtgggaaagcattttctctcataggcaagtcacactgcattgccgaagtccagctttctgcagactggcagtcgcacacacatttggaatgcacacagcggctgcctcctgatgtttgtatcatagtcgtattgtcaaagagtagccgattttagagttcttttggatcataaactggaaatactgatggaagcacacaagtggagagaagttgacatggaaagggtcttccttctcattgctgcccgtttgtacatgggactgattctgttgtgttcaccagagaaagcttgaggccatggcgagatactgcatgtttgctgttccacaaagcagtggcttagctgccatcttgcttttctttggacaacaggaagtgaaccttaaggaagagagaattctgttctaaaactccaaaatctggcttttttttttcttttgttttggtttggttttggaaaactaattaattagacttgtgtgggggtttttttttgttttgttttgtttgttttgttttgtttttttgagacggtgtctcgctgcatcacccaggctggagtgcagtggcgcaatctcgccttcctgcagtctccgcctcctgagttcaagcgattctcctgcctcagcctcccaagtagctgggactgcaggcgcgcacaccacgcccagctaatttttgtatttttagtagagacggggtttcatcatgttgaccaggctggtctcaaactcctgacttcaggtgatccacccgccttcagcctcccaacgtgctgggattacagccgtgagccgccgcgcctggcctagacttgtgtgttctaaacaggttaagtagcaggttgggtttttatgatagtgcaaggaatgactcatgcctctgagcttctaaactgaagctgctgtaactaaaggaatctgaaaagaacaaccctgaagcagaggcctttattgtcttggttgccagtagtaccttgttttgccatgtagcagacaacacacaaaataatgcagttgtggtgtgccatgctatgtgcacagccccttggattactttgttttaaaaagcatcagagttgggggtactttagggaaacctttgcttaccttgttttgccagtgataagagcagtgggttggagggcacttggccagttttctgttcagcttttcagtgaatgtacccctttaaggttcagacttaaacttccttaaaaagtggcgttgttcatagaatcgttggactcattaatgaatcgttcaactccactcactgaagcccagacctccgtgcccaggcccaatctcgtcaggctgccagagaaagttggtgctgctcatactggtctcacagtctaagtaagtgtctgtgatgctcccaagcaaaggaaatgcaagctctggaaattcgttaatgtatttgatgtcttagtgttttagtgactagggagaccattaactagtttatcattaaccacttatcagtgtattgatgttaaagcatttccctgttagctaaaagaggcctgttcatacaagccaactggtatatacgtgtggttcatccatcatctgctgcacatagcagactagaattctgggaaccctgtgcaattcagtctgctctcccttgtggaccctggtaaagaaaagcctcagctcatagtgaacacagcagacctagaaatgtagcagcagcctactgagtagctttcatttactgatcatctgctgtgactgtggccctgtctggaggttcctaggttttgagatttagagcaatgcattctggagacagaaccagcagaacagccatttttcaatttttctttaaatcagtattccatcaggcagataactgctgtattcatgaatcttgagagtgttcctgagacagaattaatggtcatttgggaaaactatcgccatggcttcccatctgtggttttcctctaaaagccttggagattagcccttccttgccagtgagaacggtgaccgcctcctgctctgcacggtctgcggcagttgccgcttctggttaggtgtgtcaggttggcttattttgggttcaggcctggcgtagcacccacaagtggcagacatatcacaagagtccccagactctgcctagaaacagtgtttgccctttggccagtgacgtggttcatcccggcccatgttgagccatgagtggagtttccaacagagggaggaatgtgtgccttgttcaaggagggcacgacccttaggcctttttcaaccagatttagctgaagggcttgacacctttgaattacagcagttgactcagagtgcaagaagtctggccattttggaaagcaaggtttcctttcagccctgtctactgaccaataccccgactcaccttgtgtggcgcacttcagaatcagatatacctagagtatacctgtggtttggttttataattaatcagctcgttacttcagcccatgaaaatggcatccagggctgccaggagattcagagctcaaaacaaggcgagcttgagttctgcactccagatatgtgccaaaactagtaaaacttaacggacttacaaccttgtcagtttttttaatgaggcagggatactctgtttttcacactaaacatatgaatgcagcactgctgcctcagctcagcttcgtgcctgggttccccactggtctgggaagactgttgtgctccatagagcagtgcacatctgacccagagggtgggtgttcataactgctacttgctctgctctaccatgtttaaagaaatatttggatgttaaattaactcactatggtttttcacctgggaaggaaacaaattacgtactagagggcattgactggttaaaaacttgtgtatcccgggaaggacctgcggtacaggagtcagccatgtctgtgctgtgtggaaccacctgatgacatggttaacgaggaagacgatgtgttgaccggctgccgtttgaggactttggtcacccagactagacaccttctgtgctcatgtttggaaagctgaaagggaaggacagctgtgccctcctgggagctcatgtgtccctggcgctgtgctagctttcctttacagctgtttacagacaaggcaggcctgaggcagatggccactgctcttgtgatgtttgctcagaggaatatgaacattttatttttgaaaagggatgatgtggttttttgccaggtgtttataattaatcctttaatattatggttattaacctcttaaacatgaatgaattcttgattgttttaacacagtacctaagactaatgctttctgtggacaccactgagctctgcctcaactccaccctctgcgaccggaggactatgcccctagtaactgctgtcggtgtggacgctgtgctggttctgttttctaaaggagcagaaggacaggtctctgagacaggatcgttgtccctacaggaggaacagtggccttgcttcttagacggtcttcactgtgtgttttaaaacaacaacaacaacaacaacaacaacataaaactcttttgacctgtaacttaaagatcataaacttcaggcaataatattttctgtgtaagcttttaaaattatttttggggatcatagcttgttttattttgtgctataaaattaacagtattaaatgacttatattcttagaatacatcgagtgtcttttcttaacagattagtgcctttttatttttgtattccgttttacgttactggtcccagcatcaaaacccttgtttccatggcctgtttgtatattgtctcaataaaacttgcatcagccggtggtggcggcagc

SEQ ID NO: 153836 - DNA, 2037 bp, Artificial Sequence
  derived and/or modified sequence
gaggtggctgccgcttctcccgcgtccgccattttgttgctgtggctattgggaacaagctgggcaaaagcaccccggaggcgcgacgctccttcgagttcggtgcctcgtgtgacggcgggggtcggtgaagacccgtcgagctgcggcgccggcgcgttccaggccgggagtcactggaggcacccctgggacgccgagcagcccgagaaccccggggtggcctccgctgcggctcgggtttgcctgccccgaccccccggctctgccgtgcattcccgggcggctctctccgtgtggcggccccggagcaggcgggcggcgtcggaggatgctgcgggcccggagccgagaggaaagtgctggcccagccctctgagcgctcctcgaggtgtgcgagaggcccttcctcggccccaaagccgtctgccgggctaaggcgtgcagagcaggcgaggacagccgccgcccctaccgccgcagagtccccggtccaacaccatgtcctccgccaggttcgactcctcggaccgctccgcctggtatatggggccggtgtctcgccaggaggcgcagacccggctccagggccagcgccacggtatgttcctcgtccgcgattcttccacctgccctggggactatgtgctgtcggtgtccgagaactcgcgggtctcccactacatcatcaactcgctgcccaaccgccgttttaagatcggggaccaggaatttgaccatttgccggccctgctggagttttacaagatccactacctggacaccaccaccctcatcgagcctgcgcccaggtatccaagcccaccaatgggatctgtctcagcacccaacctgcctacagcagaagataacctggaatatgtacggactctgtatgattttcctgggaatgatgccgaagacctgccctttaaaaagggtgagatcctagtgataatagagaagcctgaagaacagtggtggagtgcccggaacaaggatggccgggttgggatgattcctgtcccttatgtcgaaaagcttgtgagatcctcaccacacggaaagcatggaaataggaattccaacagttatgggatcccagaacctgctcatgcatacgctcaacctcagaccacaactcctctacctgcagtttccggttctcctggggcagcaatcacccctttgccatccacacagaatggacctgtctttgcgaaagcaatccagaaaagagtaccctgtgcttatgacaagactgccttggcattagaggttggtgacatcgtgaaagtcacaaggatgaatataaatggccagtgggaaggcgaagtgaacgggcgcaaagggcttttcccctttacgcacgtcaaaatctttgaccctcaaaacccagatgaaaacgagtgattgctgttgccctgtttcctgctgctttgttgttctgcctgtcctagtctcctttgaagtgggaaagcattttctctcatagtacctaagactaatgctttctgtggacaccactgagctctgcctcaactccaccctctgcgaccggaggactatgcccctagtaactgctgtcggtgtggacgctgtgctggttctgttttctaaaggagcagaaggacaggtctctgagacaggatcgttgtccctacaggaggaacagtggccttgcttcttagacggtcttcactgtgtgttttaaaacaacaacaacaacaacaacaacaacataaaactcttttgacctgtaacttaaagatcataaacttcaggcaataatattttctgtgtaagcttttaaaattatttttggggatcatagcttgttttattttgtgctataaaattaacagtattaaatgacttatattcttagaatacatcgagtgtcttttcttaacagattagtgcctttttatttttgtattccgttttacgttactggtcccagcatcaaaacccttgtttccatggcctgtttgtatattgtctcaataaaacttgcatcagccggtggtggcggca

SEQ ID NO: 153837 - protein, 215 aa, Artificial Sequence
  derived and/or modified sequence
METQAEQQELETLPTTKMAQTNPTPGSLGPWKITIYDQENFQGKRMEFTSSCPNVSERSFDNVRSLKVESGAWIGYEHTSFCGQQFILERGEYPRWDAWSGSNAYHIERLMSFRPICSANHKESKMTIFEKENFIGRQWEISDDYPSLQAMGWFNNEVGSMKIQSGAWVCYQYPGYRGYQYILECDHHGGDYKHWREWGSHAQTSQIQSIRRIQQ

SEQ ID NO: 153838 - DNA, 648 bp, Artificial Sequence
  derived and/or modified sequence
atggaaacgcaggcagagcagcaggagcttgagacactccctacaaccaagatggcacagaccaatcccacccctggctccctggggccctggaaaattaccatttacgaccaggagaactttcagggaaaaagaatggaatttacttcttcctgcccaaacgtttcggaacgttcatttgacaacgtgcgctctctgaaggtagaatcaggcgcctggattgggtacgagcacactagtttttgcggccagcaattcatcctcgagcgcggtgaatacccgcggtgggacgcctggagcggcagcaatgcctaccacatcgaacggctgatgagtttccggccgatttgctctgccaaccacaaggagagcaagatgacaattttcgaaaaagaaaacttcatcgggagacaatgggaaatatccgatgattacccttctttacaggctatgggctggttcaataacgaagtgggcagcatgaagattcagtcgggggcctgggtctgctaccagtaccccggttatcgtgggtatcaatacattctggagtgcgaccaccacggcggagactacaaacattggcgagagtggggtagccatgctcaaacctcacagattcaaagcatccggagaatacagcagtag

SEQ ID NO: 153839 - DNA, 648 bp, Artificial Sequence
  derived and/or modified sequence
atggagacccaggccgagcagcaggagctggagaccctgcccaccaccaagatggcccagaccaaccccaccccaggcagcctgggcccctggaagatcaccatctatgaccaggagaacttccagggcaagaggatggagttcaccagcagctgccccaacgtgtctgagaggagctttgacaacgtgcgcagcctgaaggtggagagcggggcctggattggctatgagcacaccagcttctgtggccagcagttcatcctggagcggggggagtacccccgctgggatgcctggagcggcagcaatgcctaccacatcgagcggctgatgtccttccggcccatctgcagcgccaaccacaaggagagcaagatgaccatctttgagaaggagaacttcatcggccggcagtgggagatcagtgatgactaccccagcctgcaggccatgggctggttcaacaatgaggtgggctccatgaagatccagagcggggcctgggtgtgctaccagtacccaggctaccggggctaccagtacatcctggagtgtgaccaccacggcggggactacaagcactggagggagtggggcagccacgcccagaccagccagatccagagcatccgccgcatccagcagtag

SEQ ID NO: 153840 - DNA, 648 bp, Artificial Sequence
  derived and/or modified sequence
atggagacccaggccgagcagcaggagctggagaccctgcccaccactaagatggcccagacgaacccgactcctggcagtttgggcccatggaaaatcactatctacgatcaggaaaatttccagggcaagaggatggaattcacatcgtcctgtccaaatgtgtctgagcgttctttcgacaatgttaggagcctgaaggtggaaagcggcgcttggatcggttatgaacatacctcgttctgtggccaacagttcattctcgaacgcggcgaatacccccgatgggatgcttggtccgggagcaatgcttaccatatcgagcgactgatgtcgttcaggcctatttgcagcgccaatcacaaagagtcaaagatgactatttttgagaaggagaatttcatcggacgccagtgggagatcagcgatgattaccctagcctgcaggcgatgggctggtttaacaatgaggtcggaagtatgaagatccagtcaggcgcatgggtatgctaccaatatcctggctatagaggttaccagtatattctggaatgtgaccatcatggaggcgattacaaacattggcgagagtggggctctcatgcccaaacttcccaaattcagtccatccgccgaatccagcagtag

SEQ ID NO: 153841 - DNA, 648 bp, Artificial Sequence
  derived and/or modified sequence
atggaaacccaggctgaacagcaggaactggagactctgccaactaccaaaatggcccagacaaatcccacacccggaagcctgggaccatggaaaatcactatttatgatcaggaaaactttcagggtaaacggatggagtttactagcagttgtccaaatgtgtcagagcgaagctttgacaacgtgcgatccctcaaggtggagagcggtgcatggatcggctatgagcacacttcattttgcgggcaacagttcatactagaaaggggcgagtatcccagatgggacgcctggtctggcagcaatgcataccacatcgagagattaatgtcttttcgtccgatatgcagcgctaatcacaaggagtccaagatgacgatttttgaaaaagagaactttatcggcaggcagtgggagatttccgacgattatccctccctgcaagctatgggctggtttaataatgaagtgggatccatgaaaattcagagcggagcgtgggtatgctaccaataccccggataccgcggatatcagtatatcctggaatgtgatcaccacgggggagattataagcactggcgggagtggggctcccatgcccagaccagtcagatacaaagcatccgacgcatccagcagtag

SEQ ID NO: 153842 - DNA, 798 bp, Artificial Sequence
  derived and/or modified sequence
accagatggagacccaggctgagcagcaggagctggaaacccttccaaccaccaagatggctcagaccaaccctacgccggggtccctggggccatggaagataaccatctatgatcaggagaactttcagggcaagaggatggagttcaccagctcctgtccaaatgtctctgagcgcagttttgataatgtccggtccctgaaggtggaaagtggcgcctggattggttatgagcataccagcttctgtgggcaacagtttatcctggagagaggagaataccctcgctgggatgcctggagtgggagtaatgcctaccacattgagcgtctcatgtccttccgccccatctgttcagctaatcataaggagtctaagatgaccatctttgagaaggaaaactttattggacgccagtgggagatctctgacgactacccctccttgcaagccatgggctggttcaacaacgaagtcggctccatgaagatacaaagtggggcctgggtttgctaccaatatcctggatatcgtgggtatcagtatatcttggaatgtgaccatcatggaggagactataaacattggagagagtggggctctcatgcccagacttcgcagatccaatcgattcgccgaatccaacagtagctgattaaaagctccaagtacgataattcctcaagcatgagaccttgctaagcactctagaataagttttatgttctgctcacagacattgctttcaaatgttagctgctgaaatccacaataaacgtcatttaaaaaaaaaaaa

SEQ ID NO: 153843 - DNA, 648 bp, Artificial Sequence
  derived and/or modified sequence
atggagacccaggccgagcagcaggagctggagaccctgcccaccaccaagatggcccagaccaaccccacccccggcagcctgggcccctggaagatcaccatctacgaccaggagaacttccagggcaagagaatggagttcaccagcagctgccccaacgtgagcgagagaagcttcgacaacgtgagaagcctgaaggtggagagcggcgcctggatcggctacgagcacaccagcttctgcggccagcagttcatcctggagagaggcgagtaccccagatgggacgcctggagcggcagcaacgcctaccacatcgagagactgatgagcttcagacccatctgcagcgccaaccacaaggagagcaagatgaccatcttcgagaaggagaacttcatcggcagacagtgggagatcagcgacgactaccccagcctgcaggccatgggctggttcaacaacgaggtgggcagcatgaagatccagagcggcgcctgggtgtgctaccagtaccccggctacagaggctaccagtacatcctggagtgcgaccaccacggcggcgactacaagcactggagagagtggggcagccacgcccagaccagccagatccagagcatcagaagaatccagcagtag

SEQ ID NO: 153844 - protein, 175 aa, Artificial Sequence
  derived and/or modified sequence
MGKITFYEDRAFQGRSYECTTDCPNLQPYFSRCNSIRVESGCWMIYERPNYQGHQYFLRRGEYPDYQQWMGLSDSIRSCCLIPPHSGAYRMKIYDRDELRGQMSELTDDCISVQDRFHLTEIHSLNVLEGSWILYEMPNYRGRQYLLRPGEYRRFLDWGAPNAKVGSLRRVMDLY

SEQ ID NO: 153845 - DNA, 528 bp, Artificial Sequence
  derived and/or modified sequence
atgggcaagattacattttacgaggatcgggcatttcagggccggtcttatgaatgcactactgattgtcctaaccttcaaccatattttagcaggtgtaattccatcagggtggaaagtgggtgctggatgatctacgaacgccccaattaccaaggacaccagtattttctcaggcggggcgagtacccagactaccagcagtggatggggctgtccgacagtatccggtcctgctgcctgataccaccacactcgggggcataccgtatgaagatttatgacagagatgagctcagaggtcagatgtcagagctgaccgatgattgcatcagcgttcaggacaggtttcacctgaccgagattcatagcctcaacgttctggagggatcttggatcctgtatgagatgccgaattacagaggacgacaatatctgttacggcccggagaataccgacgtttcctagactggggggcacccaatgctaaggtgggctcactcaggcgcgtgatggacctctattag

SEQ ID NO: 153846 - DNA, 528 bp, Artificial Sequence
  derived and/or modified sequence
atgggcaagatcaccttctatgaggaccgggccttccagggccgctcctatgagtgcaccacagactgccccaacctgcagccctacttcagccgctgcaacagcatccgggtggagagcggctgctggatgatctatgaaagacccaactaccagggccaccagtacttcctgcggcggggggagtacccagactaccagcagtggatgggcctgagtgacagcatccgcagctgctgcctgatccccccccacagcggggcctacaggatgaagatctatgacagagatgagctgcggggccagatgtctgagctgacagatgactgcatctctgtgcaggaccgcttccacctgacagagatccacagcctgaatgtgctggagggctcctggatcctgtatgagatgcccaactaccggggccggcagtacctgctgcggcctggagagtaccgccgcttcctggactggggcgccccaaatgccaaggtgggcagcctgcggcgggtgatggacctgtactag

SEQ ID NO: 153847 - DNA, 528 bp, Artificial Sequence
  derived and/or modified sequence
atgggcaagatcaccttctacgaggaccgggccttccagggccggtcatatgaatgcaccaccgactgtccgaacctgcagccatacttctcacggtgcaatagcatcagggtggaatccggatgctggatgatttacgagcgccctaactaccaaggtcaccagtactttctccggcgcggcgagtacccagactatcagcagtggatgggactgtccgattctattcggtcatgctgcctgatcccgccccactccggtgcataccggatgaagatctacgacagggacgaacttcgaggacagatgtcagagctgacagacgattgcatctcagtgcaagaccgctttcatttgactgaaattcactctctgaatgtgctcgaggggtcctggatcctgtacgagatgccaaactataggggtcggcaataccttctgagacctggcgaatatagaaggtttctggactggggagcacccaacgccaaagtgggtagtttgcggagagtaatggacctatattag

SEQ ID NO: 153848 - DNA, 528 bp, Artificial Sequence
  derived and/or modified sequence
atgggaaagattaccttttacgaggaccgagccttccaaggcaggtcctatgaatgtactacggactgtccaaacttacaaccctacttttccaggtgcaatagtattcgggtcgagagtggctgctggatgatttacgagcggccaaattatcaggggcaccagtattttctgagacggggtgagtaccctgattatcagcagtggatgggcttgtctgattcgatccgaagctgctgtctgataccacctcactctggggcataccgaatgaagatctacgaccgagacgagctgaggggacaaatgtccgagctaacagacgattgcatttctgtgcaagatcggttccatctcaccgagattcatagcttgaacgtgctggaagggtcctggattttgtacgagatgcccaactatcggggtcgacagtatctgctgaggcctggggaatacaggcgctttctggactggggtgcccctaatgctaaggtagggtcactgaggcgcgttatggatctttactag

SEQ ID NO: 153849 - DNA, 641 bp, Artificial Sequence
  derived and/or modified sequence
ccgcagtcccacacagcaaccagaaaacatctgctcacttccttcaaaatgggaaagatcaccttctacgaggacagggccttccagggccgcagctacgaatgcaccactgactgccccaacctacaaccctatttcagccgctgcaactccatcagggtggagagcggctgctggatgatctatgagcgccccaactaccagggccaccagtacttcctgcggcgtggggagtaccctgactaccagcaatggatgggcctcagcgactccatccgctcctgctgcctcatccccccgcactctggcgcttacagaatgaagatctacgacagagatgaattgaggggacaaatgtcagagctcacagacgactgtatctctgttcaggaccgcttccacctcactgaaattcactccctcaatgtgctggagggcagctggatcctctatgagatgcccaactacagggggaggcagtatctgctgaggccgggggagtacaggaggtttcttgattggggggctccaaatgccaaagttggctctcttagacgagtcatggatttgtactgaagtatttacgttttccacttttctcctttaaaatctaataaaatatttagcttgtgtttctggca

SEQ ID NO: 153850 - DNA, 528 bp, Artificial Sequence
  derived and/or modified sequence
atgggcaagatcaccttctacgaggacagagccttccagggcagaagctacgagtgcaccaccgactgccccaacctgcagccctacttcagcagatgcaacagcatcagagtggagagcggctgctggatgatctacgagagacccaactaccagggccaccagtacttcctgagaagaggcgagtaccccgactaccagcagtggatgggcctgagcgacagcatcagaagctgctgcctgatccccccccacagcggcgcctacagaatgaagatctacgacagagacgagctgagaggccagatgagcgagctgaccgacgactgcatcagcgtgcaggacagattccacctgaccgagatccacagcctgaacgtgctggagggcagctggatcctgtacgagatgcccaactacagaggcagacagtacctgctgagacccggcgagtacagaagattcctggactggggcgcccccaacgccaaggtgggcagcctgagaagagtgatggacctgtactag

SEQ ID NO: 153851 - protein, 972 aa, Artificial Sequence
  derived and/or modified sequence
MGPGVLLLLLVATAWHGQGIPVIEPSVPELVVKPGATVTLRCVGNGSVEWDGPPSPHWTLYSDGSSSILSTNNATFQNTGTYRCTEPGDPLGGSAAIHLYVKDPARPWNVLAQEVVVFEDQDALLPCLLTDPVLEAGVSLVRVRGRPLMRHTNYSFSPWHGFTIHRAKFIQSQDYQCSALMGGRKVMSISIRLKVQKVIPGPPALTLVPAELVRIRGEAAQIVCSASSVDVNFDVFLQHNNTKLAIPQQSDFHNNRYQKVLTLNLDQVDFQHAGNYSCVASNVQGKHSTSMFFRVVESAYLNLSSEQNLIQEVTVGEGLNLKVMVEAYPGLQGFNWTYLGPFSDHQPEPKLANATTKDTYRHTFTLSLPRLKPSEAGRYSFLARNPGGWRALTFELTLRYPPEVSVIWTFINGSGTLLCAASGYPQPNVTWLQCSGHTDRCDEAQVLQVWDDPYPEVLSQEPFHKVTVQSLLTVETLEHNQTYECRAHNSVGSGSWAFIPISAGAHTHPPDEFLFTPVVVACMSIMALLLLLLLLLLYKYKQKPKYQVRWKIIESYEGNSYTFIDPTQLPYNEKWEFPRNNLQFGKTLGAGAFGKVVEATAFGLGKEDAVLKVAVKMLKSTAHADEKEALMSELKIMSHLGQHENIVNLLGACTHGGPVLVITEYCCYGDLLNFLRRKAEAMLGPSLSPGQDPEGGVDYKNIHLEKKYVRRDSGFSSQGVDTYVEMRPVSTSSNDSFSEQDLDKEDGRPLELRDLLHFSSQVAQGMAFLASKNCIHRDVAARNVLLTNGHVAKIGDFGLARDIMNDSNYIVKGNARLPVKWMAPESIFDCVYTVQSDVWSYGILLWEIFSLGLNPYPGILVNSKFYKLVKDGYQMAQPAFAPKNIYSIMQACWALEPTHRPTFQQICSFLQEQAQEDRRERDYTNLPSSSRSGGSGSSSSELEEESSSEHLTCCEQGDIAQPLLQPNNYQFC

SEQ ID NO: 153852 - protein, 501 aa, Artificial Sequence
  derived and/or modified sequence
MRHTNYSFSPWHGFTIHRAKFIQSQDYQCSALMGGRKVMSISIRLKVQKVIPGPPALTLVPAELVRIRGEAAQIVCSASSVDVNFDVFLQHNNTKLAIPQQSDFHNNRYQKVLTLNLDQVDFQHAGNYSCVASNVQGKHSTSMFFRVVESAYLNLSSEQNLIQEVTVGEGLNLKVMVEAYPGLQGFNWTYLGPFSDHQPEPKLANATTKDTYRHTFTLSLPRLKPSEAGRYSFLARNPGGWRALTFELTLRYPPEVSVIWTFINGSGTLLCAASGYPQPNVTWLQCSGHTDRCDEAQVLQVWDDPYPEVLSQEPFHKVTVQSLLTVETLEHNQTYECRAHNSVGSGSWAFIPISAGAHTHPPDEFLFTPVVVACMSIMALLLLLLLLLLYKYKQKPKYQVRWKIIESYEGNSYTFIDPTQLPYNEKWEFPRNNLQFGKTLGAGAFGKVVEATAFGLGKEDAVLKVAVKMLKSTAHADEKEASGLYQSAEQQQKRWQRQQQQ

SEQ ID NO: 153853 - protein, 671 aa, Artificial Sequence
  derived and/or modified sequence
MGPGVLLLLLVATAWHGQGIPVIEPSVPELVVKPGATVTLRCVGNGSVEWDGPPSPHWTLYSDGSSSILSTNNATFQNTGTYRCTEPGDPLGGSAAIHLYVKDPARPWNVLAQEVVVFEDQDALLPCLLTDPVLEAGVSLVRVRGRPLMRHTNYSFSPWHGFTIHRAKFIQSQDYQCSALMGGRKVMSISIRLKVQKVIPGPPALTLVPAELVRIRGEAAQIVCSASSVDVNFDVFLQHNNTKLAIPQQSDFHNNRYQKVLTLNLDQVDFQHAGNYSCVASNVQGKHSTSMFFRVVESAYLNLSSEQNLIQEVTVGEGLNLKVMVEAYPGLQGFNWTYLGPFSDHQPEPKLANATTKDTYRHTFTLSLPRLKPSEAGRYSFLARNPGGWRALTFELTLRYPPEVSVIWTFINGSGTLLCAASGYPQPNVTWLQCSGHTDRCDEAQVLQVWDDPYPEVLSQEPFHKVTVQSLLTVETLEHNQTYECRAHNSVGSGSWAFIPISAGAHTHPPDEFLFTPVVVACMSIMALLLLLLLLLLYKYKQKPKYQVRWKIIESYEGNSYTFIDPTQLPYNEKWEFPRNNLQFGKTLGAGAFGKVVEATAFGLGKEDAVLKVAVKMLKSTAHADEKEALMSELKIMSHLGQHENIVNLLGACTHGGTVASPARVWTPMWR

SEQ ID NO: 153854 - protein, 306 aa, Artificial Sequence
  derived and/or modified sequence
MGPGVLLLLLVATAWHGQGIPVIEPSVPELVVKPGATVTLRCVGNGSVEWDGPPSPHWTLYSDGSSSILSTNNATFQNTGTYRCTEPGDPLGGSAAIHLYVKDPARPWNVLAQEVVVFEDQDALLPCLLTDPVLEAGVSLVRVRGRPLMRHTNYSFSPWHGFTIHRAKFIQSQDYQCSALMGGRKVMSISIRLKVQKVIPGPPALTLVPAELVRIRGEAAQIVCSASSVDVNFDVFLQHNNTKLAIPQQSDFHNNRYQKVLTLNLDQVDFQHAGNYSCVASNVQGKHSTSMFFRVVGTPSPSLCPA

SEQ ID NO: 153855 - DNA, 2919 bp, Artificial Sequence
  derived and/or modified sequence
atgggccctggagtgcttctgttgcttctagtcgctactgcgtggcatgggcagggaattcccgtgatcgaacccagcgtgccagagcttgttgtaaagccgggcgcaaccgtcaccctaaggtgtgtgggaaacgggtcagtggagtgggacggacccccatcccctcactggaccctgtattctgatgggtccagcagtattctttcgaccaacaatgctaccttccagaacactggcacatatcggtgcacagagccgggtgacccactagggggatcagctgctattcacctgtatgtcaaggatcccgcccgaccctggaacgtcctggctcaggaagtggttgtcttcgaagatcaggacgccctgttgccatgtttgctgaccgaccctgtgttggaggctggagtgtctctcgtgcgcgttagaggacgcccactcatgcgccatacaaattacagcttctccccttggcacgggtttaccatccaccgggccaagttcatccagagtcaggattatcagtgttctgcactgatgggggggaggaaggtgatgagtattagcatcagactgaaggtgcagaaggtgatcccaggcccacctgcactcaccctcgtgcctgcggaattagtgagaattcgaggagaggcggcccaaatcgtctgcagtgctagctccgtggacgtgaacttcgatgtgtttctgcaacacaataacaccaaacttgcgatcccgcagcagtctgacttccacaacaaccggtatcaaaaggtgctgaccctgaacttagaccaagtagactttcagcatgccgggaactatagctgtgtggcctctaatgttcaggggaaacacagtacttccatgttctttcgtgttgtggaaagtgcttacctcaacctgtcttccgagcagaacttgatccaggaggtcacagttggtgaaggattgaacctcaaggtgatggttgaggcttatcccggcttacaggggttcaactggacctacttaggacccttcagtgaccaccagccagagccaaagctggcaaatgcgacgactaaggatacctacagacacacatttacactctccctgcccagactcaaaccttctgaggcaggtcgatacagctttctcgcaaggaatccaggcggctggcgggccttgacattcgagttgacacttcgttacccaccagaggtgtctgtgatctggacatttatcaacgggagcggcaccctcttgtgcgctgccagcggatatccccagcccaacgtcacgtggctacagtgctccggacacacagatcgctgtgatgaggcacaggtgctgcaggtgtgggatgacccgtatcccgaagtgttatcacaagaaccttttcacaaggtaacagtgcagagcctgttgaccgttgagacactggaacacaaccagacctatgagtgtagggcccataatagtgttgggtcagggagctgggcgtttatccccatctcagctggcgctcacacccatccgcctgatgagtttctgtttacacccgtggtggtggcctgtatgagcataatggctctcttactgctgctgcttctgctgctcctctacaaatataagcagaagcccaaataccaagtccgctggaagatcattgagtcctatgagggaaactcctacacctttattgatcccacacagctaccctacaacgaaaagtgggagttcccacgcaacaacctccagttcggtaaaaccttaggcgccggcgccttcggaaaggtcgtagaagctactgccttcggtttgggcaaagaagacgcagttctgaaggttgcggtcaagatgctcaagtcaactgcacatgccgatgagaaggaggcactaatgagtgagctgaagattatgagccacctaggacagcacgagaatatcgtgaatctgctgggcgcttgtacgcatggggggcctgtgctcgtaattacagagtattgttgctatggggacttgttaaattttctccggcgaaaagccgaggctatgttaggccctagtctttctcctgggcaagaccccgaagggggggttgattacaagaacatccacctggagaaaaaatacgtccgaagagactctgggttctccagtcagggagttgatacatacgtcgaaatgagacctgttagcacttcctctaacgacagctttagcgaacaggacttggataaggaggatggccgacccctggagcttagggacctgctgcatttttctagccaagtagcacaggggatggccttcttggcctcaaagaactgcatacatcgagacgtggcagctcgtaacgtcctattaactaatgggcatgtcgccaaaatcggcgacttcggcttggcccgggatatcatgaatgactctaactatatagtgaaaggtaatgctcggctgccagtcaaatggatggcaccagaaagtatttttgattgtgtgtatacagtgcagtctgatgtgtggtcgtacgggatcttgctttgggaaatcttctcactggggctcaacccttatcccggcattctggtcaattctaagttctataaactggtgaaggacggctaccagatggctcaacctgcttttgcccctaagaacatttactctatcatgcaggcatgttgggctctggagcccacccacagaccgaccttccagcagatttgttcttttctgcaagaacaggcccaggaggatcggcgcgaacgagattacaccaacctgcccagcagtagccgctccggtggatccggttcttcctccagcgaacttgaagaggagagcagcagcgaacatctcacatgttgcgaacaaggcgatatcgcccagccactcctccaaccaaacaattaccagttttgttag

SEQ ID NO: 153856 - DNA, 1506 bp, Artificial Sequence
  derived and/or modified sequence
atgagacacaccaactactcttttagtccctggcacgggtttactattcatagggccaaattcattcaaagtcaggattatcaatgctctgccttaatggggggaaggaaagtgatgagcatctctattcgcttgaaagtccagaaagtcatcccagggcccccagccttgaccttggtgccggctgagcttgtcaggattcggggtgaggctgcccagatcgtttgctccgctagttcagtggatgtgaactttgatgtgttcctgcagcataataatacaaagctcgccattcctcagcagtcagatttccataataatcggtaccagaaggttctcactctgaacttggaccaggttgacttccaacacgccgggaactactcctgtgtcgcctcaaatgtccagggtaagcacagcacaagcatgtttttccgggtggtcgaatctgcatacttaaacctgtcttctgagcagaatctgatccaagaggtgaccgtaggtgaagggcttaatctgaaggtcatggtggaagcctaccccgggctgcaagggtttaactggacataccttggccccttctctgaccaccagccagaacccaaactggccaacgctacgacaaaagatacatatcggcatacctttactctgtcactgcccagattgaagccaagcgaggctggcaggtacagctttcttgccagaaaccccggtggatggagggcccttacgtttgaacttactttaaggtatccacccgaggtgtccgttatctggactttcatcaatggctcaggcaccctcctgtgtgccgcaagcggctacccacagccaaatgtaacttggctgcagtgctctggacacaccgacaggtgtgatgaggcccaagtgctccaagtctgggatgacccctaccctgaggtactgagccaggagcctttccataaggtgacagtgcaaagccttcttactgtggagactctcgaacataaccagacttacgagtgtcgagcccataattctgttggttctggcagctgggccttcatcccgatctcagcaggggctcacacccatccaccggatgagttcctctttacccccgtcgtggtcgcttgtatgtcaatcatggctctgctcctcctgttgctgcttctgctcttgtacaaatacaagcagaagccaaaataccaggtgcggtggaagataattgaaagctatgagggtaactcctacactttcattgaccccacccaactgccatataacgagaagtgggaattcccacgaaataatctgcaattcggaaagacactcggtgccggagctttcggaaaggtagtcgaggccacagcatttggcctcggtaaagaggatgctgtgctgaaggtggcggttaagatgttgaagtccacagctcacgcggacgaaaaggaagcctccggattgtaccagagcgctgaacagcagcagaagcgctggcagcgacaacagcagcagtag

SEQ ID NO: 153857 - DNA, 2016 bp, Artificial Sequence
  derived and/or modified sequence
atggggcccggggtgttactgctgctcttggtcgcaaccgcctggcacgggcagggcatcccggttatcgaaccttctgtgcctgaactggtggtaaaacccggtgctaccgtcacactacggtgcgtgggcaatggcagcgttgagtgggatggaccgccctcaccacactggaccctgtactccgacggtagctccagcatacttagtaccaacaatgcaaccttccaaaatactggcacctatcgctgtaccgagcctggagatccattgggcggtagcgctgccattcacctatacgtgaaggatccagcccggccctggaacgtgcttgcccaagaggttgtggttttcgaggatcaggacgcgttgctgccctgtctcctaaccgatcccgtgctggaggccggcgtcagtctcgttcgcgttagaggcaggcctttaatgcgacacacaaactactccttttctccttggcatggctttaccatccatagagctaaattcatacagtcccaggattaccagtgctcagcactgatgggcggtaggaaggtgatgtcaatcagcatcaggctcaaagtgcagaaagtgatcccagggccacctgctttgactctggtgcctgcagagctagttcggatcaggggtgaagctgcacagatcgtgtgctcagcttctagtgtagatgtcaactttgatgtctttctgcagcacaataataccaaattggccatcccacagcagagcgacttccataacaatcgataccagaaagtcctgaccctcaatctcgatcaggtggactttcagcacgcaggaaattactcatgtgttgccagcaacgtgcagggcaaacattcaacgtccatgttctttcgcgtcgtggaatccgcctacctcaacctatctagtgaacagaacctcattcaggaagtcacagtgggagaggggttgaacctaaaggtcatggttgaggcttatcctggactccaagggtttaattggacctacctgggccccttctctgaccatcagcctgagccaaaactcgcaaacgcaaccacaaaagacacttatagacatacttttactctttctctaccccggctgaagccatcagaggccggtcgttattcttttttggctcggaaccccggcgggtggcgcgcactgacttttgagctgactctccgctatccaccagaggtcagcgtgatctggactttcatcaacggttccggaactctgctttgcgccgcgagtgggtacccacaacccaacgtgacgtggctccagtgcagcgggcacacagaccgctgcgacgaggcacaggtgctgcaagtctgggatgatccctaccccgaagtcctaagccaggagccttttcacaaagttacagtgcagagcctgttgacagtggagaccctggagcacaatcagacctatgagtgtcgcgcacacaacagcgtggggtccggaagctgggcatttatcccaatctcggcaggagcccatacccaccctcctgacgagttcctgtttacacctgtggtggtggcctgcatgtctattatggccctcctgctgctgctgctgctcttgctcctctataagtataagcagaagccgaaataccaagttcgctggaaaattatagagtcatatgagggaaactcatatacctttattgatccaactcagttgccgtacaacgaaaaatgggaatttccacgcaataacctccaattcggtaaaaccctaggggcaggtgcctttggtaaagtggtagaggcaaccgccttcggtctggggaaggaagacgctgtgctgaaggtggctgtaaaaatgctgaaaagtaccgcccacgcagacgagaaggaggctcttatgtctgagctaaaaatcatgagccacctcggacaacacgagaacatcgtcaacctcttgggagcctgtactcacggtggaacggtggccagccctgccagggtctggacgcccatgtggagatag

SEQ ID NO: 153858 - DNA, 921 bp, Artificial Sequence
  derived and/or modified sequence
atgggccctggtgtgctactcctgctcctggtcgcgactgcttggcacggacagggaattcccgtaatcgaacccagcgttccagaactggtggtcaagccgggagccacagtcacccttcgttgcgtcggtaatggatctgtggagtgggatgggccgccttctcctcactggaccttatactccgatggctcaagtagtattctatccaccaacaacgccaccttccagaacaccggcacctaccgctgcactgagcccggggacccgctggggggatcagccgctatccacctctacgtgaaagatccggctagaccttggaatgtcctcgcccaagaggtggtcgtttttgaagaccaggacgcactgctgccatgtttgctgacagatccagtactggaagctggtgtgagcctcgtgagggtgcgcgggcgaccattgatgcgccataccaattactctttttccccctggcacgggtttaccatccatagagccaagttcattcaatctcaggactaccagtgttccgcattgatgggtggtaggaaggtaatgtccatcagtattcggcttaaggtgcagaaggtgatcccgggacctcctgccctgactctcgtaccggcggaattggttagaattcggggagaagcggcccaaatcgtttgttcggccagtagtgtggacgttaatttcgacgtcttcctgcagcacaacaacactaagctagctattcctcagcagtccgacttccataacaaccggtaccagaaggtgctgactctcaacttggaccaggtggatttccagcacgcaggtaattacagctgtgttgcatctaatgttcaaggaaaacactcaactagtatgttcttcagagtcgtcggaaccccttccccgtcattgtgtccggcgtag

SEQ ID NO: 153859 - DNA, 2919 bp, Artificial Sequence
  derived and/or modified sequence
atgggccctggggtgctgctgctgctgctggtggccacagcctggcacggccagggcatccctgtgattgagcccagcgtgcctgagctggtggtgaagccaggggccaccgtgaccctgcgctgtgtgggcaatggatctgtggagtgggatggcccccccagcccccactggaccctgtacagtgatggcagcagcagcatcctgagcaccaacaatgccaccttccagaacacaggcacctaccgctgcacagagcccggggaccccctgggcggcagcgctgccatccacctgtatgtgaaggaccctgcccggccctggaatgtgctggcccaggaggtggtggtgtttgaggaccaggatgccctgctgccctgcctgctgacagatcctgtgctggaggccggcgtgtccctggtgcgggtgcggggccggcccctgatgaggcacaccaactacagcttcagcccctggcacggcttcaccatccaccgggccaagttcatccagagccaggactaccagtgcagcgccctgatgggcggcaggaaggtgatgagcatcagcatccggctgaaggtgcagaaggtgattcctggccccccagccctgaccctggtgcctgctgagctggtgcgcatccggggggaggccgcccagatcgtgtgcagcgccagctctgtggatgtgaactttgatgtgttcctgcagcacaacaacaccaagctggccatcccccagcagagcgacttccacaacaaccgctaccagaaggtgctgaccctgaacctggaccaggtggacttccagcacgccggcaactacagctgtgtggccagcaatgtgcagggcaagcacagcacctccatgttcttccgggtggtggagagcgcctacctgaacctgagcagcgagcagaacctgatccaggaggtgacagtgggggagggcctgaacctgaaggtgatggtggaggcctacccaggcctgcagggcttcaactggacctacctgggccccttcagtgaccaccagcctgagcccaagctggccaatgccaccaccaaggacacctaccgccacaccttcaccctgagcctgccccggctgaagcccagcgaggccggccgctacagcttcctggccaggaaccctgggggctggagggccctgacctttgagctgaccctgcgctacccacctgaggtgtctgtcatctggaccttcatcaatggcagcggcaccctgctgtgtgccgccagcggctacccccagcccaacgtgacctggctgcagtgcagcggccacacagacagatgtgatgaggcccaggtgctgcaggtgtgggatgacccctacccagaggtgctgagccaggagcccttccacaaggtgacagtgcagagcctgctgactgtggagaccctggagcacaaccagacctatgagtgccgggcccacaacagcgtgggcagcggctcctgggccttcatccccatctctgctggggcccacacccaccccccagatgagttcctgttcacccctgtggtggtggcctgcatgagcatcatggccctgctgctgctgctgctgctgctgctgctgtacaagtacaagcagaagcccaagtaccaggtgcgctggaagatcatcgagagctatgagggcaacagctacaccttcatcgaccccacccagctgccctacaatgagaagtgggagttccccaggaacaacctgcagtttgggaagaccctgggcgctggggccttcggcaaggtggtggaggccacagccttcggcctgggcaaggaggatgctgtgctgaaggtggccgtgaagatgctgaagagcacagcccacgcagatgagaaggaggccctgatgtctgagctgaagatcatgagccacctgggccagcacgagaacatcgtgaacctgctgggcgcctgcacccatggaggccctgtgctggtgatcacagagtactgctgctacggggacctgctgaacttcctgcggaggaaggccgaggccatgctgggccccagcctgagccctggccaggaccctgagggcggcgtggactacaagaacatccacctggagaagaagtatgtgcggcgggacagcggcttcagcagccagggcgtggacacctacgtggagatgaggcctgtgtccaccagcagcaatgacagcttcagcgagcaggacctggacaaggaggatggccggcccctggagctgcgggacctgctgcacttcagcagccaggtggcccagggcatggccttcctggccagcaagaactgcatccacagagatgtggccgccagaaatgtgctgctgaccaacggccacgtggccaagatcggggactttggcctggcccgggacatcatgaatgacagcaactacatcgtgaagggaaatgcccggctgcctgtgaagtggatggcccctgagagcatctttgactgtgtgtacacagtgcagagtgatgtgtggagctatggcatcctgctgtgggagatcttcagcctgggcctgaacccctacccaggcatcctggtgaacagcaagttctacaagctggtgaaggatggctaccagatggcccagcctgcctttgcccccaagaacatctacagcatcatgcaggcctgctgggccctggagcccacccaccggcccaccttccagcagatctgcagcttcctgcaggagcaggcccaggaggaccggcgggagcgggactacaccaacctgcccagcagcagccgcagcggcggcagcggcagcagcagcagcgagctggaggaggagagcagcagcgagcacctgacctgctgtgagcagggcgacatcgcccagcccctgctgcagcccaacaactaccagttctgctag

SEQ ID NO: 153860 - DNA, 1506 bp, Artificial Sequence
  derived and/or modified sequence
atgaggcacaccaactacagcttcagcccctggcacggcttcaccatccaccgggccaagttcatccagagccaggactaccagtgcagcgccctgatgggcggcaggaaggtgatgagcatcagcatccggctgaaggtgcagaaggtgattcctggccccccagccctgaccctggtgcctgctgagctggtgcgcatccggggggaggccgcccagatcgtgtgcagcgccagctctgtggatgtgaactttgatgtgttcctgcagcacaacaacaccaagctggccatcccccagcagagcgacttccacaacaaccgctaccagaaggtgctgaccctgaacctggaccaggtggacttccagcacgccggcaactacagctgtgtggccagcaatgtgcagggcaagcacagcacctccatgttcttccgggtggtggagagcgcctacctgaacctgagcagcgagcagaacctgatccaggaggtgacagtgggggagggcctgaacctgaaggtgatggtggaggcctacccaggcctgcagggcttcaactggacctacctgggccccttcagtgaccaccagcctgagcccaagctggccaatgccaccaccaaggacacctaccgccacaccttcaccctgagcctgccccggctgaagcccagcgaggccggccgctacagcttcctggccaggaaccctgggggctggagggccctgacctttgagctgaccctgcgctacccacctgaggtgtctgtcatctggaccttcatcaatggcagcggcaccctgctgtgtgccgccagcggctacccccagcccaacgtgacctggctgcagtgcagcggccacacagacagatgtgatgaggcccaggtgctgcaggtgtgggatgacccctacccagaggtgctgagccaggagcccttccacaaggtgacagtgcagagcctgctgactgtggagaccctggagcacaaccagacctatgagtgccgggcccacaacagcgtgggcagcggctcctgggccttcatccccatctctgctggggcccacacccaccccccagatgagttcctgttcacccctgtggtggtggcctgcatgagcatcatggccctgctgctgctgctgctgctgctgctgctgtacaagtacaagcagaagcccaagtaccaggtgcgctggaagatcatcgagagctatgagggcaacagctacaccttcatcgaccccacccagctgccctacaatgagaagtgggagttccccaggaacaacctgcagtttgggaagaccctgggcgctggggccttcggcaaggtggtggaggccacagccttcggcctgggcaaggaggatgctgtgctgaaggtggccgtgaagatgctgaagagcacagcccacgcagatgagaaggaggccagcggcctgtaccagagcgctgagcagcagcagaagcgctggcagaggcagcagcagcagtag

SEQ ID NO: 153861 - DNA, 2016 bp, Artificial Sequence
  derived and/or modified sequence
atgggccctggggtgctgctgctgctgctggtggccacagcctggcacggccagggcatccctgtgattgagcccagcgtgcctgagctggtggtgaagccaggggccaccgtgaccctgcgctgtgtgggcaatggatctgtggagtgggatggcccccccagcccccactggaccctgtacagtgatggcagcagcagcatcctgagcaccaacaatgccaccttccagaacacaggcacctaccgctgcacagagcccggggaccccctgggcggcagcgctgccatccacctgtatgtgaaggaccctgcccggccctggaatgtgctggcccaggaggtggtggtgtttgaggaccaggatgccctgctgccctgcctgctgacagatcctgtgctggaggccggcgtgtccctggtgcgggtgcggggccggcccctgatgaggcacaccaactacagcttcagcccctggcacggcttcaccatccaccgggccaagttcatccagagccaggactaccagtgcagcgccctgatgggcggcaggaaggtgatgagcatcagcatccggctgaaggtgcagaaggtgattcctggccccccagccctgaccctggtgcctgctgagctggtgcgcatccggggggaggccgcccagatcgtgtgcagcgccagctctgtggatgtgaactttgatgtgttcctgcagcacaacaacaccaagctggccatcccccagcagagcgacttccacaacaaccgctaccagaaggtgctgaccctgaacctggaccaggtggacttccagcacgccggcaactacagctgtgtggccagcaatgtgcagggcaagcacagcacctccatgttcttccgggtggtggagagcgcctacctgaacctgagcagcgagcagaacctgatccaggaggtgacagtgggggagggcctgaacctgaaggtgatggtggaggcctacccaggcctgcagggcttcaactggacctacctgggccccttcagtgaccaccagcctgagcccaagctggccaatgccaccaccaaggacacctaccgccacaccttcaccctgagcctgccccggctgaagcccagcgaggccggccgctacagcttcctggccaggaaccctgggggctggagggccctgacctttgagctgaccctgcgctacccacctgaggtgtctgtcatctggaccttcatcaatggcagcggcaccctgctgtgtgccgccagcggctacccccagcccaacgtgacctggctgcagtgcagcggccacacagacagatgtgatgaggcccaggtgctgcaggtgtgggatgacccctacccagaggtgctgagccaggagcccttccacaaggtgacagtgcagagcctgctgactgtggagaccctggagcacaaccagacctatgagtgccgggcccacaacagcgtgggcagcggctcctgggccttcatccccatctctgctggggcccacacccaccccccagatgagttcctgttcacccctgtggtggtggcctgcatgagcatcatggccctgctgctgctgctgctgctgctgctgctgtacaagtacaagcagaagcccaagtaccaggtgcgctggaagatcatcgagagctatgagggcaacagctacaccttcatcgaccccacccagctgccctacaatgagaagtgggagttccccaggaacaacctgcagtttgggaagaccctgggcgctggggccttcggcaaggtggtggaggccacagccttcggcctgggcaaggaggatgctgtgctgaaggtggccgtgaagatgctgaagagcacagcccacgcagatgagaaggaggccctgatgtctgagctgaagatcatgagccacctgggccagcacgagaacatcgtgaacctgctgggcgcctgcacccatggaggcaccgtggccagccctgcccgggtgtggacccccatgtggaggtag

SEQ ID NO: 153862 - DNA, 921 bp, Artificial Sequence
  derived and/or modified sequence
atgggccctggggtgctgctgctgctgctggtggccacagcctggcacggccagggcatccctgtgattgagcccagcgtgcctgagctggtggtgaagccaggggccaccgtgaccctgcgctgtgtgggcaatggatctgtggagtgggatggcccccccagcccccactggaccctgtacagtgatggcagcagcagcatcctgagcaccaacaatgccaccttccagaacacaggcacctaccgctgcacagagcccggggaccccctgggcggcagcgctgccatccacctgtatgtgaaggaccctgcccggccctggaatgtgctggcccaggaggtggtggtgtttgaggaccaggatgccctgctgccctgcctgctgacagatcctgtgctggaggccggcgtgtccctggtgcgggtgcggggccggcccctgatgaggcacaccaactacagcttcagcccctggcacggcttcaccatccaccgggccaagttcatccagagccaggactaccagtgcagcgccctgatgggcggcaggaaggtgatgagcatcagcatccggctgaaggtgcagaaggtgattcctggccccccagccctgaccctggtgcctgctgagctggtgcgcatccggggggaggccgcccagatcgtgtgcagcgccagctctgtggatgtgaactttgatgtgttcctgcagcacaacaacaccaagctggccatcccccagcagagcgacttccacaacaaccgctaccagaaggtgctgaccctgaacctggaccaggtggacttccagcacgccggcaactacagctgtgtggccagcaatgtgcagggcaagcacagcacctccatgttcttccgggtggtgggcacccccagccccagcctgtgcccagcctag

SEQ ID NO: 153863 - DNA, 2919 bp, Artificial Sequence
  derived and/or modified sequence
atgggccccggcgtgctgctgctgctgctggtggccaccgcctggcacggccaaggaatccccgtcattgaaccctccgttcccgagctcgtcgtgaaacccggggctaccgttacacttcgctgcgtgggaaacgggtcagtcgaatgggatggcccacccagtccccattggactttgtacagcgatgggtcctccagtattctgagcacaaacaacgctacgttccagaacaccgggacatatcggtgtaccgagccgggagaccctttggggggatcggctgcaatccatctgtacgtgaaggatcccgctagaccatggaacgtcttggcacaggaggtggttgtcttcgaggaccaggatgcattgctgccctgcctgttaacggatcccgtgttggaggcaggcgttagcttggtccgagttaggggacggcccttgatgaggcataccaattacagttttagcccatggcacggattcactattcaccgggccaagtttatacagtcgcaggattatcaatgttccgcactgatgggaggtaggaaagtgatgtcaatctctatccgattgaaagtgcagaaggtaattcccggaccacccgctctgactctggtgccggccgaactggtacgcatacgtggtgaagccgcacagatcgtatgttctgcctccagtgtggacgtgaattttgacgtgtttttgcagcataacaacactaaactagccatccctcaacaatccgattttcataacaacagatatcagaaagtgctcactctgaacttggatcaggtggattttcagcatgccggaaattattcctgcgtggcctcaaatgttcagggaaagcacagcacgtctatgttcttcagagtggtggagagtgcctaccttaacttgagctctgagcagaatctgattcaagaggttactgtaggcgaggggcttaacttgaaggttatggtggaagcttatccaggtctgcagggatttaattggacatatttaggccctttctcggatcatcaacctgagccaaaactggcaaatgccaccaccaaagatacgtacaggcacacatttactttgtctctgcctaggttgaagccttccgaggccgggcggtactcttttttggctcggaacccagggggatggcgcgctcttacgttcgagctcacactgaggtatccgcccgaagttagtgtgatttggacctttatcaatggctctggaaccctgctgtgcgcggcctctgggtatccccagccaaatgttacatggttacagtgcagtgggcacaccgatcggtgtgatgaggcccaggtgctccaggtttgggatgatccatatcctgaggttctcagccaagagccatttcacaaagtgaccgtgcagtcgctcctgacagtcgagacgctggaacataaccagacatacgagtgtagagcccataactctgtgggctccggaagttgggctttcatccctatttctgccggggcccatactcacccccctgacgagttcctcttcacccccgtcgtcgtggcatgtatgagcattatggctctcctgctgctcctgctgctgctgcttctgtataaatataagcagaagcccaagtatcaggtgaggtggaagatcattgagagctacgaaggaaacagctatactttcatcgatcccacccaactgccttacaacgaaaagtgggagtttcctcgaaataacctccagtttgggaaaacccttggggccggagcttttggtaaggtcgttgaagccacagcctttgggctggggaaagaggacgctgtgctgaaggttgccgttaaaatgctgaagtcgactgcccacgccgacgagaaggaggcgctcatgtctgaactgaaaatcatgagtcatctgggacaacacgagaatatcgtgaatctgcttggagcatgcacacatggggggccggtcctggtaattactgagtattgttgctatggcgacctcctgaacttcttacggcgaaaagcagaggccatgcttggcccgtctctcagccccggacaggacccagaaggcggcgtggattacaagaacatccacctcgaaaagaaatatgtgcgcagggactccggcttttcctctcaaggggttgatacctatgtggaaatgcgcccagtgagtacaagttccaatgattcattcagtgagcaggacctggataaagaagatggaaggccactggagttgcgggacctgctgcacttctccagccaagtggctcaggggatggcttttttggcatcaaagaattgtatccatagggatgtggcagcccgcaatgtcctcctcactaatggacatgttgcaaagatcggcgacttcggtctcgcacgggatattatgaacgattcgaattacatcgtcaagggaaatgcacgccttccagtgaagtggatggcccccgagtctattttcgattgcgtgtacacggtccaaagtgatgtgtggagctacggcatcctgctgtgggaaatcttcagtctgggactgaacccataccctgggatcctcgtaaattcaaagttctacaagctggttaaggatggttatcagatggctcagcctgcctttgccccgaagaatatttacagcatcatgcaagcttgctgggccctggagcctactcaccgtcccaccttccagcagatctgcagcttcctgcaggaacaggcccaggaagaccgccgagagcgggattacacaaaccttccatcctcctctcggagcggaggaagtggttcctcaagctcagaactggaggaagagagctcttccgaacatctaacctgctgtgagcagggagacatagcccagcccctactgcaacccaataactaccagttttgctag

SEQ ID NO: 153864 - DNA, 1506 bp, Artificial Sequence
  derived and/or modified sequence
atgcggcacaccaactacagcttcagcccctggcacggcttcaccatacatagggccaaatttattcagtcacaagactaccagtgttcagccctgatgggcggtcgaaaagtgatgagcatttctattaggctgaaagtgcagaaggtgatccccgggccccctgctctcactctcgtgcctgccgaacttgtgaggattcgtggggaggccgctcagattgtgtgttctgctagttctgtagacgttaatttcgatgtcttcctgcagcataataacacgaagctcgccatcccccaacagtctgattttcataacaatcggtatcagaaggtgctcacgctgaatttggaccaggtcgactttcagcatgcgggcaactatagctgcgtcgcctcgaacgtccagggcaagcattctactagtatgttctttcgggtggtggagtcggcgtacctgaatttaagctccgaacagaatcttatacaagaagtgactgtaggagaagggttgaaccttaaggttatggtagaggcctaccctggcttacagggatttaattggacgtacctggggcccttctcagatcaccagcctgaaccaaaattggccaatgccacaactaaggatacgtaccggcacaccttcacactttccctgccaaggctgaagcctagcgaggccgggagatactcattcttagcacggaacccgggggggtggagagccctaacatttgaactcaccttgcggtatccacctgaagtcagcgtgatttggaccttcatcaatggttctggcaccttattgtgtgccgcctcggggtatccgcaacctaacgtaacttggctccagtgctccgggcacacagatcggtgcgatgaggctcaggttctgcaggtgtgggacgatccttaccccgaggtgctgtctcaggagcccttccacaaggtgaccgtgcaaagcttgctgacagttgagaccttagagcataaccagacatatgaatgtagagctcataatagcgttggctctgggtcatgggcattcatccccatcagcgcaggtgcccacactcatcctccagacgagtttctcttcacccctgtggtggtggcctgtatgagtattatggcactgttgctgctcctcctactcctactcctttacaagtacaaacaaaaacctaagtatcaggttcggtggaaaattatcgagagttatgaagggaattcatatacatttatcgatccaacacagttgccgtacaacgagaagtgggagtttcccagaaataatctccagtttggcaaaacactcggcgccggagcttttgggaaagtggtggaagcaaccgcttttgggttaggcaaagaggacgccgtgctgaaagtcgccgtcaaaatgctgaagagtaccgcccacgcagacgaaaaggaggcctccggtctttaccagtcagcagagcagcagcagaagagatggcagcgccagcagcagcagtag

SEQ ID NO: 153865 - DNA, 2016 bp, Artificial Sequence
  derived and/or modified sequence
atgggccccggcgtgctgctgctgctgctggtggccaccgcctggcacggacagggcattcccgtcatagaaccctctgtgcccgaactggtggtgaagcctggggctacagtgacgctgagatgcgtgggcaacggcagcgtggagtgggatgggccaccctctccacactggaccctttattccgacggttcttctagcattctgtccactaataacgcgaccttccaaaacaccggcacatatcgctgtacggaaccgggcgacccactggggggaagcgcagcaattcacctctatgtgaaggaccctgctaggccatggaacgtcctggcacaggaggtggtggttttcgaagatcaggacgccctcttgccgtgtctgctcactgacccggtcctggaggcgggcgtgagcctcgtgagagtgcgaggccgtcccctgatgcgacacacaaattattccttctctccgtggcacgggtttacgattcatcgtgccaagttcatccagagccaagattaccaatgcagtgccctgatgggtgggcggaaggtgatgtccatctcaattagactaaaggtccaaaaggtgatcccaggccctcctgctctcaccttggtccctgccgaacttgttaggattcgcggcgaagccgcccagattgtgtgttctgctagttccgtggacgtaaatttcgatgtatttcttcagcataacaacaccaagctggcaatcccgcaacagtcagactttcacaataacagataccagaaggttttgactcttaatctggaccaggtggattttcagcacgctgggaattattcctgcgtcgcttcaaacgtgcaaggaaagcacagcacaagtatgtttttcagggtggtggaaagtgcatatttgaacctgagtagcgaacagaatcttattcaagaggttacggtgggcgagggactgaacctgaaggttatggtggaggcttacccaggcttacaaggatttaattggacctatctaggcccattttctgatcaccaacctgagcctaaactggcgaatgctacgactaaggatacctaccgtcacactttcactctgtccctgccgaggctcaaaccatccgaagcaggccggtactcattcctggcaagaaatcccggggggtggcgtgccttgacgtttgaacttaccctgagatacccacctgaggtatccgtcatttggacattcatcaatggatccggcacgttgctgtgtgctgccagtggatatccgcagcccaatgtcacatggctgcagtgcagcggacacactgacaggtgcgacgaggcccaagtgctgcaagtatgggacgacccgtaccctgaggtgctgtctcaggaaccctttcacaaagtcacagtgcagtcccttcttacagttgagacccttgagcacaaccagacctatgaatgtcgcgcccacaacagtgtgggcagcggatcatgggctttcattcccatctcagcaggggctcacactcacccacctgacgaatttctgtttaccccagtcgtagtagcctgcatgtccataatggcactcctgctgctcctgctgcttttactgctgtataaatacaaacagaagccaaaataccaggtgagatggaagattatcgagtcttacgaggggaacagttacacattcatcgacccaactcagctgccatataacgaaaagtgggagttcccgaggaacaacctgcagtttggtaagacactgggggcaggagcattcggcaaagttgtggaagctaccgcgttcggtctcggtaaagaggatgcggtgctgaaagtcgcagttaagatgcttaagtctaccgcacacgctgatgagaaagaggctctcatgtcagaattaaagatcatgtctcatctgggacagcatgaaaacatagtaaacttacttggtgcctgtactcacggaggaaccgtggcaagcccagcccgagtgtggacccctatgtggagatag

SEQ ID NO: 153866 - DNA, 921 bp, Artificial Sequence
  derived and/or modified sequence
atgggccccggcgtgctgctgctgctgctggtggccaccgcctggcacggccaggggatccctgtgatagaacctagcgtgccagagctggtagtgaagcctggcgcaacagttacattaagatgcgtgggcaatggctccgtggagtgggatggaccacccagcccacactggacactttattcggatgggtcgagtagcatcttatccaccaataacgccacttttcagaacacggggacctataggtgtaccgaacctggtgaccctctaggcggaagcgctgccattcatctgtatgtgaaggatccggctcgtccatggaacgtgttagcccaagaagtggtggtgttcgaggatcaggacgccctcttgccctgcctgcttaccgatccggtgcttgaagccggcgtgtctctggtgagggtgaggggacggccattgatgagacataccaattacagcttcagtccgtggcacgggtttaccattcaccgggccaagttcattcagtcacaggattaccagtgctcagccctcatggggggccgcaaggtaatgagcatttccattagactgaaggtgcagaaagttatccccggtccaccggccctgactctggtgccagcagaattggtgagaattcgcggcgaagcagcgcagatcgtgtgttcagctagctccgtggatgtgaatttcgatgtgtttctgcagcataataatactaagctcgccattccccagcagagcgatttccacaacaaccgctatcagaaagtgctgactctcaacctagaccaggtggattttcaacacgcgggaaactatagttgtgtggcatcaaacgttcagggaaagcactcaaccagcatgttttttcgggtcgtgggtacaccgtctccaagtttgtgccctgcctag

SEQ ID NO: 153867 - DNA, 2919 bp, Artificial Sequence
  derived and/or modified sequence
atgggtcccggtgtgctattgctgcttctggtggcaaccgcctggcatggacaaggcatccctgtgatagagccttccgttcctgaattggtggtgaaacccggtgcaacagtgacactgcggtgcgtgggcaacggaagtgtggagtgggatggcccaccctcccctcactggacgctatactctgacgggtcctctagcattttgtctaccaataacgccaccttccagaataccgggacataccggtgcacggagccgggagatccacttggcggttccgccgcaatacacctttacgtgaaggaccccgcacgaccttggaatgtcttggctcaggaggtggtagtgtttgaagaccaggacgccctcctgccttgcctccttactgatcccgtgctggaggccggtgtgtcactggtccgagtgcgtggcaggccccttatgcggcacaccaactactcattctcaccatggcacgggtttactattcatcgagccaagttcatccagagtcaggactaccagtgttccgccttaatggggggaaggaaggtgatgtccatatccatccggttaaaggtccagaaggtcattccgggtccccctgctctcacccttgttccagccgagttagtccgaattaggggggaagccgcacagatcgtttgctcagcttccagcgtggacgttaactttgatgtatttctgcagcataacaataccaagctcgccatccctcaacagagcgatttccacaataatcggtaccagaaggtcctcactctcaatctcgaccaagtagacttccagcatgccggaaattatagttgtgtcgcttctaatgtgcaaggcaagcactctacctctatgttctttagggtggtggaatctgcctatctaaatttatcgtcagagcagaacctgattcaggaagtgacagtgggggaaggactgaacctcaaagtgatggttgaggcctatcctgggcttcaaggctttaactggacctacctggggcctttctccgaccaccaacctgaacctaagttagccaatgccaccacaaaggatacttaccggcacacattcaccctcagcctgcctagacttaaaccctcggaggcaggacgttactctttcctggcaagaaaccccggaggctggagggcattgacattcgagctcacgctgaggtatcccccagaagtttccgtgatctggaccttcattaatgggtctggcacacttctctgtgcagcatcaggttacccacaaccaaacgtgacttggctccaatgcagcggccacacagacagatgtgacgaggcccaggtgctacaggtctgggacgacccttatcctgaggtactgagccaagagcccttccacaaagtcaccgtgcagtccctattaactgtggaaaccctcgagcacaaccaaacttatgaatgccgggctcataattctgttgggtctgggtcctgggccttcattcccatcagcgcaggggctcacactcatccacccgacgaatttctgttcacccccgtcgtggtggcttgcatgagtatcatggctttgctgctgctgcttttgctcttattattatacaaatacaaacagaagccaaagtatcaagttagatggaagattattgaaagctatgagggaaattcatatacttttatagaccctacccagcttccctataacgaaaagtgggagttcccaaggaataatttacagtttgggaagactctgggagcaggcgcattcggaaaagtggtggaggctactgcttttggccttggaaaggaagatgctgtccttaaggtggcagttaaaatgctcaagagcactgcccatgccgatgagaaggaagccctgatgagcgagttgaaaattatgagccatcttgggcagcacgaaaacatcgtaaatctcctgggggcatgcacccatggcggacctgtgctcgtgattaccgagtactgttgttacggcgatctgttaaatttcctgaggcgcaaggccgaggccatgctgggaccaagtttgtctcccggtcaggaccccgaagggggtgtcgactataagaatattcatctggagaagaaatatgtgcgacgcgactccgggttttcttcacagggtgtcgacacatacgtcgaaatgagacccgtctcaaccagctcaaacgatagcttttcagaacaggacctggataaggaagacggccgaccgctagagctaagagatctgttacatttttctagccaggtcgcccaggggatggccttcttagccagtaagaattgcattcaccgcgacgtagctgccagaaatgtactcttaaccaacggacacgtggccaaaatcggagatttcggtctggccagggatattatgaacgacagcaactacattgttaagggaaacgcaagattgcctgttaagtggatggctcctgagtctatattcgattgtgtttatactgtgcagtcagacgtctggtcgtacggcatcctgctgtgggagattttcagtctaggtttaaacccctatcccggaatactggtgaattcaaaattttacaaactcgtcaaggacgggtatcagatggcccaaccagcctttgctcctaaaaacatttactcaattatgcaggcttgctgggccttggaacctacccaccgccctactttccagcaaatatgttcttttcttcaggaacaggcccaagaagataggcgggaaagggactataccaacctcccttcctcctcccgttcggggggatcaggcagttccagcagtgaactggaggaggagagctcttccgaacacctgacctgttgcgagcaaggcgatatcgcccagcctctgctacagcctaataattaccagttttgttag

SEQ ID NO: 153868 - DNA, 1506 bp, Artificial Sequence
  derived and/or modified sequence
atgcgccatacaaattactccttcagcccctggcatggatttactattcatcgggcaaagttcatccagagccaggattaccagtgctctgccctcatgggcggtcgcaaggttatgtctatctcaatccgactgaaggtacaaaaggtgatacctggcccaccggctctgactttggtacctgccgaactggtcaggatacgaggtgaagccgctcagatcgtttgtagcgcttcctctgtggatgtgaacttcgatgtttttctacagcacaacaataccaagttggctatcccccagcaaagtgacttccataacaatcgttatcagaaggttctcaccctgaatctggatcaggtggactttcagcatgctgggaactattcctgcgtggcatcaaatgtgcagggtaaacactcaacttctatgttcttcagggtagtagaaagcgcttacctgaacttgtccagtgagcagaatttgattcaggaggtcacggttggcgagggactgaatcttaaggtgatggtggaggcttatcccggtctgcaaggcttcaactggacctacctgggacccttcagcgaccatcaaccggagcctaaattggccaatgcgactacgaaggacacctataggcatacctttacactgtctctgccccgtctcaagccttctgaagctggtagatatagctttctggccaggaacccgggaggatggcgagcactcaccttcgaattaaccttgaggtatccacccgaagtatcagtgatctggacgtttataaatggcagcgggactctgctgtgtgcagcatctggataccctcaacccaatgttacttggctgcaatgctctggtcataccgaccgttgtgacgaggcgcaggttctgcaagtgtgggacgatccctacccagaggtgctatcacaggaaccatttcacaaggtaaccgtgcagagcctccttactgtagagacactcgaacacaatcagacctatgaatgtagagctcataacagtgtggggtccgggagttgggcattcatcccaatttccgccggagctcatacgcaccccccagacgagttcctttttacacccgtggtggttgcgtgtatgagtatcatggctctgctcttactgctactcctgctgctgctctacaaatacaaacagaagccaaagtaccaggtccgttggaagattatcgagagttatgagggcaatagttacaccttcattgaccctacacagttgccctacaatgagaaatgggagtttcctaggaacaaccttcagtttggcaagacactgggggctggagcctttggtaaggtggtggaagccactgctttcggcctgggaaaagaagacgcggtcctgaaggtagctgtcaagatgctcaagtcaaccgctcatgccgatgagaaggaagcctccggtctgtaccaatcggccgaacagcagcaaaaacgctggcaacgacagcagcagcagtag

SEQ ID NO: 153869 - DNA, 2016 bp, Artificial Sequence
  derived and/or modified sequence
atgggtcccggtgttctactgctcctgctcgtcgcgaccgcatggcatggccagggaatacctgtgatcgagccgagtgtccctgagctcgtggtgaaacccggagccactgtaactcttaggtgtgtcggcaacggcagcgtcgaatgggatggccctccctcccctcattggaccctgtatagtgacgggtccagctccattttatccaccaacaacgccactttccagaatacgggaacctaccggtgcacagagccaggcgacccgttggggggtagtgctgccatccatctgtatgtcaaggatcctgctcgaccttggaatgtgctcgcacaggaagtagtggtgttcgaagaccaggatgcgctgctcccctgtttactgaccgaccctgtacttgaagcgggtgtgtctctcgtgagggttagggggagacccctgatgagacatactaactattccttttcaccctggcatggattcaccatccaccgcgcaaagttcatccagtcccaagattaccagtgtagcgcactgatggggggtagaaaagtgatgtcgatctccattcggctgaaagttcaaaaggtgatccccggacctcccgcactgacactcgtgcccgcagagctggtgcgcattcgcggagaggcagctcagattgtttgcagcgcatccagcgtggatgtgaacttcgatgtgttcttgcagcacaacaacacaaaactggccatcccacagcagagcgattttcacaataaccggtaccagaaggtactgacacttaatctggatcaggtagacttccagcatgcaggcaactattcatgcgtggcctctaatgtgcagggtaaacactcaactagcatgttttttagggtggtagagtcagcatacctgaacctcagctcggagcagaatttgatacaggaggtgacggtaggtgaagggctcaacctgaaagtaatggtggaggcctaccctggactgcagggttttaactggacatatttgggaccttttagcgatcatcagcccgagcccaagcttgcaaacgccaccactaaggacacataccgacacacttttaccttgagtcttccacggcttaagccatctgaagcgggaagatattcctttctggccaggaaccctggtggctggcgggctctcacttttgaactgaccctcaggtacccacccgaagtcagtgtgatctggaccttcattaatggctccggtaccctgctgtgcgcggcttctggatacccgcagccaaacgttacgtggctgcaatgttcagggcataccgatcgctgcgacgaggcccaggtcttgcaagtgtgggatgatccataccctgaagtgttgtctcaggagccttttcacaaagtgaccgtgcagagtcttttgacagtggagaccctggaacataatcaaacatacgaatgcagagcacacaatagcgtggggtcaggaagctgggccttcattccaatatctgccggagcccatacgcatccccctgatgagttcctgtttactccagttgtggtcgcatgtatgagtattatggctcttctgctcctgctgctgttgcttctcctgtataagtataagcagaagccaaagtatcaagttaggtggaagataatcgaaagttacgaaggcaacagctacacctttatcgatcctacccaactcccgtacaacgaaaaatgggagttccctcgcaataatttgcaattcgggaaaaccctgggagccggtgccttcggaaaagtggtggaggctacagccttcggacttggcaaggaagacgctgtgttgaaggtcgccgtaaaaatgctgaaaagcactgcccatgctgacgagaaggaggccctgatgagcgaattgaagattatgtctcacctcgggcagcacgagaatatcgtgaacttgttaggggcttgcacccatggagggacagttgcctctcccgctagggtgtggacgccaatgtggaggtag

SEQ ID NO: 153870 - DNA, 921 bp, Artificial Sequence
  derived and/or modified sequence
atgggccctggcgttctgctgctgctccttgtggccaccgcctggcatggccagggaatccctgtgattgaaccaagtgttcccgaactggttgtgaagccaggggcaacagttacgctgcggtgtgtgggaaacggctccgtggaatgggatggtcctccttcccctcattggacgctgtatagcgatggcagttcctcaattttgtctacaaataatgccacattccagaacactgggacttacagatgtactgagcctggcgacccactgggaggcagtgccgctattcacttgtacgtaaaggatcccgctcgtccctggaacgtgcttgcgcaggaggtggtggtctttgaggatcaagacgctctcctgccttgcttacttaccgacccggtacttgaagctggcgtgagtttggtaagagtgcgaggacggcctcttatgaggcacaccaactacagcttctccccgtggcatggctttaccattcaccgcgctaaatttattcagtcccaggactaccagtgctccgcccttatggggggtagaaaagtcatgtcgatctcaatacgtctcaaagtacaaaaggtaatccctggtccgcctgcacttaccctcgtccccgcagagctcgttcgtattcggggagaggccgctcagattgtttgctcagcaagctccgtggacgtcaactttgacgtcttcctgcaacataataacactaaattggccataccacagcaatccgattttcataacaatagataccagaaggtgttgacacttaaccttgaccaggtcgatttccaacatgcgggaaactatagctgtgtggctagtaacgtacagggaaagcactccaccagcatgttctttcgcgtcgtgggaacgccgtccccttccctgtgcccagcctag

SEQ ID NO: 153871 - DNA, 3989 bp, Artificial Sequence
  derived and/or modified sequence
gaagggcagacagagtgtccaaaagcgtgagagcacgaagtgaggagaaggtggagaagagagaagaggaagaggaagaggaagagaggaagcggagggaactgcggccaggctaaaaggggaagaagaggatcagcccaaggaggaggaagaggaaaacaagacaaacagccagtgcagaggagaggaacgtgtgtccagtgtcccgatccctgcggagctagtagctgagagctctgtgccctgggcaccttgcagccctgcacctgcctgccacttccccaccgaggccatgggcccaggagttctgctgctcctgctggtggccacagcttggcatggtcagggaatcccagtgatagagcccagtgtccctgagctggtcgtgaagccaggagcaacggtgaccttgcgatgtgtgggcaatggcagcgtggaatgggatggccccccatcacctcactggaccctgtactctgatggctccagcagcatcctcagcaccaacaacgctaccttccaaaacacggggacctatcgctgcactgagcctggagaccccctgggaggcagcgccgccatccacctctatgtcaaagaccctgcccggccctggaacgtgctagcacaggaggtggtcgtgttcgaggaccaggacgcactactgccctgtctgctcacagacccggtgctggaagcaggcgtctcgctggtgcgtgtgcgtggccggcccctcatgcgccacaccaactactccttctcgccctggcatggcttcaccatccacagggccaagttcattcagagccaggactatcaatgcagtgccctgatgggtggcaggaaggtgatgtccatcagcatccggctgaaagtgcagaaagtcatcccagggcccccagccttgacactggtgcctgcagagctggtgcggattcgaggggaggctgcccagatcgtgtgctcagccagcagcgttgatgttaactttgatgtcttcctccaacacaacaacaccaagctcgcaatccctcaacaatctgactttcataataaccgttaccaaaaagtcctgaccctcaacctcgatcaagtagatttccaacatgccggcaactactcctgcgtggccagcaacgtgcagggcaagcactccacctccatgttcttccgggtggtagagagtgcctacttgaacttgagctctgagcagaacctcatccaggaggtgaccgtgggggaggggctcaacctcaaagtcatggtggaggcctacccaggcctgcaaggttttaactggacctacctgggacccttttctgaccaccagcctgagcccaagcttgctaatgctaccaccaaggacacatacaggcacaccttcaccctctctctgccccgcctgaagccctctgaggctggccgctactccttcctggccagaaacccaggaggctggagagctctgacgtttgagctcacccttcgataccccccagaggtaagcgtcatatggacattcatcaacggctctggcacccttttgtgtgctgcctctgggtacccccagcccaacgtgacatggctgcagtgcagtggccacactgataggtgtgatgaggcccaagtgctgcaggtctgggatgacccataccctgaggtcctgagccaggagcccttccacaaggtgacggtgcagagcctgctgactgttgagaccttagagcacaaccaaacctacgagtgcagggcccacaacagcgtggggagtggctcctgggccttcatacccatctctgcaggagcccacacgcatcccccggatgagttcctcttcacaccagtggtggtcgcctgcatgtccatcatggccttgctgctgctgctgctcctgctgctattgtacaagtataagcagaagcccaagtaccaggtccgctggaagatcatcgagagctatgagggcaacagttatactttcatcgaccccacgcagctgccttacaacgagaagtgggagttcccccggaacaacctgcagtttggtaagaccctcggagctggagcctttgggaaggtggtggaggccacggcctttggtctgggcaaggaggatgctgtcctgaaggtggctgtgaagatgctgaagtccacggcccatgctgatgagaaggaggccctcatgtccgagctgaagatcatgagccacctgggccagcacgagaacatcgtcaaccttctgggagcctgtacccatggaggccctgtactggtcatcacggagtactgttgctatggcgacctgctcaactttctgcgaaggaaggctgaggccatgctgggacccagcctgagccccggccaggaccccgagggaggcgtcgactataagaacatccacctcgagaagaaatatgtccgcagggacagtggcttctccagccagggtgtggacacctatgtggagatgaggcctgtctccacttcttcaaatgactccttctctgagcaagacctggacaaggaggatggacggcccctggagctccgggacctgcttcacttctccagccaagtagcccagggcatggccttcctcgcttccaagaattgcatccaccgggacgtggcagcgcgtaacgtgctgttgaccaatggtcatgtggccaagattggggacttcgggctggctagggacatcatgaatgactccaactacattgtcaagggcaatgcccgcctgcctgtgaagtggatggccccagagagcatctttgactgtgtctacacggttcagagcgacgtctggtcctatggcatcctcctctgggagatcttctcacttgggctgaatccctaccctggcatcctggtgaacagcaagttctataaactggtgaaggatggataccaaatggcccagcctgcatttgccccaaagaatatatacagcatcatgcaggcctgctgggccttggagcccacccacagacccaccttccagcagatctgctccttccttcaggagcaggcccaagaggacaggagagagcgggactataccaatctgccgagcagcagcagaagcggtggcagcggcagcagcagcagtgagctggaggaggagagctctagtgagcacctgacctgctgcgagcaaggggatatcgcccagcccttgctgcagcccaacaactatcagttctgctgaggagttgacgacagggagtaccactctcccctcccacaaacttcaactcctccatggatggggcgacacggggagaacatacaaactctgccttcggtcatttcactcaacagctcggcccagctctgaaacttgggaaggtgagggattcaggggaggtcagaggatcccacttcctgagcatgggccatcactgccagtcaggggctgggggctgagccctcacccccccctcccctactgttctcatggtgttggcctcgtgtttgctatgccaactagtagaaccttctttcctaatccccttatcttcatggaaatggactgactttatgcctatgaagtccccaggagctacactgatactgagaaaaccaggctctttggggctagacagactggcagagagtgagatctccctctctgagaggagcagcagatgctcacagaccacactcagctcaggccccttggagcaggatggctcctctaagaatctcacaggacctcttagtctctgccctatacgccgccttcactccacagcctcacccctcccacccccatactggtactgctgtaatgagccaagtggcagctaaaagttgggggtgttctgcccagtcccgtcattctgggctagaaggcaggggaccttggcatgtggctggccacaccaagcaggaagcacaaactcccccaagctgactcatcctaactaacagtcacgccgtgggatgtctctgtccacattaaactaacagcattaatgcagtca

SEQ ID NO: 153872 - DNA, 2145 bp, Artificial Sequence
  derived and/or modified sequence
ggttgccttgcctagctaaaaggggaagaagaggatcagcccaaggaggaggaagaggaaaacaagacaaacagccagtgcagaggagaggaacgtgtgtccagtgtcccgatccctgcggagctagtagctgagagctctgtgccctgggcaccttgcagccctgcacctgcctgccacttccccaccgaggccatgggcccaggagttctgctgctcctgctggtggccacagcttggcatggtcagggaatcccagtgatagagcccagtgtccctgagctggtcgtgaagccaggagcaacggtgaccttgcgatgtgtgggcaatggcagcgtggaatgggatggccccccatcacctcactggaccctgtactctgatggctccagcagcatcctcagcaccaacaacgctaccttccaaaacacggggacctatcgctgcactgagcctggagaccccctgggaggcagcgccgccatccacctctatgtcaaagaccctgcccggccctggaacgtgctagcacaggaggtggtcgtgttcgaggaccaggacgcactactgccctgtctgctcacagacccggtgctggaagcaggcgtctcgctggtgcgtgtgcgtggccggcccctcatgcgccacaccaactactccttctcgccctggcatggcttcaccatccacagggccaagttcattcagagccaggactatcaatgcagtgccctgatgggtggcaggaaggtgatgtccatcagcatccggctgaaagtgcagaaagtcatcccagggcccccagccttgacactggtgcctgcagagctggtgcggattcgaggggaggctgcccagatcgtgtgctcagccagcagcgttgatgttaactttgatgtcttcctccaacacaacaacaccaagctcgcaatccctcaacaatctgactttcataataaccgttaccaaaaagtcctgaccctcaacctcgatcaagtagatttccaacatgccggcaactactcctgcgtggccagcaacgtgcagggcaagcactccacctccatgttcttccgggtggtagagagtgcctacttgaacttgagctctgagcagaacctcatccaggaggtgaccgtgggggaggggctcaacctcaaagtcatggtggaggcctacccaggcctgcaaggttttaactggacctacctgggacccttttctgaccaccagcctgagcccaagcttgctaatgctaccaccaaggacacatacaggcacaccttcaccctctctctgccccgcctgaagccctctgaggctggccgctactccttcctggccagaaacccaggaggctggagagctctgacgtttgagctcacccttcgataccccccagaggtaagcgtcatatggacattcatcaacggctctggcacccttttgtgtgctgcctctgggtacccccagcccaacgtgacatggctgcagtgcagtggccacactgataggtgtgatgaggcccaagtgctgcaggtctgggatgacccataccctgaggtcctgagccaggagcccttccacaaggtgacggtgcagagcctgctgactgttgagaccttagagcacaaccaaacctacgagtgcagggcccacaacagcgtggggagtggctcctgggccttcatacccatctctgcaggagcccacacgcatcccccggatgagttcctcttcacaccagtggtggtcgcctgcatgtccatcatggccttgctgctgctgctgctcctgctgctattgtacaagtataagcagaagcccaagtaccaggtccgctggaagatcatcgagagctatgagggcaacagttatactttcatcgaccccacgcagctgccttacaacgagaagtgggagttcccccggaacaacctgcagtttggtaagaccctcggagctggagcctttgggaaggtggtggaggccacggcctttggtctgggcaaggaggatgctgtcctgaaggtggctgtgaagatgctgaagtccacggcccatgctgatgagaaggaggcctcaggactataccaatctgccgagcagcagcagaagcggtggcagcggcagcagcagcagtga

SEQ ID NO: 153873 - DNA, 3697 bp, Artificial Sequence
  derived and/or modified sequence
ggatcagcccaaggaggaggaagaggaaaacaagacaaacagccagtgcagaggagaggaacgtgtgtccagtgtcccgatccctgcggagctagtagctgagagctctgtgccctgggcaccttgcagccctgcacctgcctgccacttccccaccgaggccatgggcccaggagttctgctgctcctgctggtggccacagcttggcatggtcagggaatcccagtgatagagcccagtgtccctgagctggtcgtgaagccaggagcaacggtgaccttgcgatgtgtgggcaatggcagcgtggaatgggatggccccccatcacctcactggaccctgtactctgatggctccagcagcatcctcagcaccaacaacgctaccttccaaaacacggggacctatcgctgcactgagcctggagaccccctgggaggcagcgccgccatccacctctatgtcaaagaccctgcccggccctggaacgtgctagcacaggaggtggtcgtgttcgaggaccaggacgcactactgccctgtctgctcacagacccggtgctggaagcaggcgtctcgctggtgcgtgtgcgtggccggcccctcatgcgccacaccaactactccttctcgccctggcatggcttcaccatccacagggccaagttcattcagagccaggactatcaatgcagtgccctgatgggtggcaggaaggtgatgtccatcagcatccggctgaaagtgcagaaagtcatcccagggcccccagccttgacactggtgcctgcagagctggtgcggattcgaggggaggctgcccagatcgtgtgctcagccagcagcgttgatgttaactttgatgtcttcctccaacacaacaacaccaagctcgcaatccctcaacaatctgactttcataataaccgttaccaaaaagtcctgaccctcaacctcgatcaagtagatttccaacatgccggcaactactcctgcgtggccagcaacgtgcagggcaagcactccacctccatgttcttccgggtggtagagagtgcctacttgaacttgagctctgagcagaacctcatccaggaggtgaccgtgggggaggggctcaacctcaaagtcatggtggaggcctacccaggcctgcaaggttttaactggacctacctgggacccttttctgaccaccagcctgagcccaagcttgctaatgctaccaccaaggacacatacaggcacaccttcaccctctctctgccccgcctgaagccctctgaggctggccgctactccttcctggccagaaacccaggaggctggagagctctgacgtttgagctcacccttcgataccccccagaggtaagcgtcatatggacattcatcaacggctctggcacccttttgtgtgctgcctctgggtacccccagcccaacgtgacatggctgcagtgcagtggccacactgataggtgtgatgaggcccaagtgctgcaggtctgggatgacccataccctgaggtcctgagccaggagcccttccacaaggtgacggtgcagagcctgctgactgttgagaccttagagcacaaccaaacctacgagtgcagggcccacaacagcgtggggagtggctcctgggccttcatacccatctctgcaggagcccacacgcatcccccggatgagttcctcttcacaccagtggtggtcgcctgcatgtccatcatggccttgctgctgctgctgctcctgctgctattgtacaagtataagcagaagcccaagtaccaggtccgctggaagatcatcgagagctatgagggcaacagttatactttcatcgaccccacgcagctgccttacaacgagaagtgggagttcccccggaacaacctgcagtttggtaagaccctcggagctggagcctttgggaaggtggtggaggccacggcctttggtctgggcaaggaggatgctgtcctgaaggtggctgtgaagatgctgaagtccacggcccatgctgatgagaaggaggccctcatgtccgagctgaagatcatgagccacctgggccagcacgagaacatcgtcaaccttctgggagcctgtacccatggagggacagtggcttctccagccagggtgtggacacctatgtggagatgaggcctgtctccacttcttcaaatgactccttctctgagcaagacctggacaaggaggatggacggcccctggagctccgggacctgcttcacttctccagccaagtagcccagggcatggccttcctcgcttccaagaattgcatccaccgggacgtggcagcgcgtaacgtgctgttgaccaatggtcatgtggccaagattggggacttcgggctggctagggacatcatgaatgactccaactacattgtcaagggcaatgcccgcctgcctgtgaagtggatggccccagagagcatctttgactgtgtctacacggttcagagcgacgtctggtcctatggcatcctcctctgggagatcttctcacttgggctgaatccctaccctggcatcctggtgaacagcaagttctataaactggtgaaggatggataccaaatggcccagcctgcatttgccccaaagaatatatacagcatcatgcaggcctgctgggccttggagcccacccacagacccaccttccagcagatctgctccttccttcaggagcaggcccaagaggacaggagagagcgggactataccaatctgccgagcagcagcagaagcggtggcagcggcagcagcagcagtgagctggaggaggagagctctagtgagcacctgacctgctgcgagcaaggggatatcgcccagcccttgctgcagcccaacaactatcagttctgctgaggagttgacgacagggagtaccactctcccctcccacaaacttcaactcctccatggatggggcgacacggggagaacatacaaactctgccttcggtcatttcactcaacagctcggcccagctctgaaacttgggaaggtgagggattcaggggaggtcagaggatcccacttcctgagcatgggccatcactgccagtcaggggctgggggctgagccctcacccccccctcccctactgttctcatggtgttggcctcgtgtttgctatgccaactagtagaaccttctttcctaatccccttatcttcatggaaatggactgactttatgcctatgaagtccccaggagctacactgatactgagaaaaccaggctctttggggctagacagactggcagagagtgagatctccctctctgagaggagcagcagatgctcacagaccacactcagctcaggccccttggagcaggatggctcctctaagaatctcacaggacctcttagtctctgccctatacgccgccttcactccacagcctcacccctcccacccccatactggtactgctgtaatgagccaagtggcagctaaaagttgggggtgttctgcccagtcccgtcattctgggctagaaggcaggggaccttggcatgtggctggccacaccaagcaggaagcacaaactcccccaagctgactcatcctaactaacagtcacgccgtgggatgtctctgtccacattaaactaacagcattaatgcagtca

SEQ ID NO: 153874 - DNA, 921 bp, Artificial Sequence
  derived and/or modified sequence
atgggcccaggagttctgctgctcctgctggtggccacagcttggcatggtcagggaatcccagtgatagagcccagtgtccctgagctggtcgtgaagccaggagcaacggtgaccttgcgatgtgtgggcaatggcagcgtggaatgggatggccccccatcacctcactggaccctgtactctgatggctccagcagcatcctcagcaccaacaacgctaccttccaaaacacggggacctatcgctgcactgagcctggagaccccctgggaggcagcgccgccatccacctctatgtcaaagaccctgcccggccctggaacgtgctagcacaggaggtggtcgtgttcgaggaccaggacgcactactgccctgtctgctcacagacccggtgctggaagcaggcgtctcgctggtgcgtgtgcgtggccggcccctcatgcgccacaccaactactccttctcgccctggcatggcttcaccatccacagggccaagttcattcagagccaggactatcaatgcagtgccctgatgggtggcaggaaggtgatgtccatcagcatccggctgaaagtgcagaaagtcatcccagggcccccagccttgacactggtgcctgcagagctggtgcggattcgaggggaggctgcccagatcgtgtgctcagccagcagcgttgatgttaactttgatgtcttcctccaacacaacaacaccaagctcgcaatccctcaacaatctgactttcataataaccgttaccaaaaagtcctgaccctcaacctcgatcaagtagatttccaacatgccggcaactactcctgcgtggccagcaacgtgcagggcaagcactccacctccatgttcttccgggtggtaggcacaccttcaccctctctctgccccgcctga

SEQ ID NO: 153875 - DNA, 2919 bp, Artificial Sequence
  derived and/or modified sequence
atgggccccggcgtgctgctgctgctgctggtggccaccgcctggcacggccagggcatccccgtgatcgagcccagcgtgcccgagctggtggtgaagcccggcgccaccgtgaccctgagatgcgtgggcaacggcagcgtggagtgggacggcccccccagcccccactggaccctgtacagcgacggcagcagcagcatcctgagcaccaacaacgccaccttccagaacaccggcacctacagatgcaccgagcccggcgaccccctgggcggcagcgccgccatccacctgtacgtgaaggaccccgccagaccctggaacgtgctggcccaggaggtggtggtgttcgaggaccaggacgccctgctgccctgcctgctgaccgaccccgtgctggaggccggcgtgagcctggtgagagtgagaggcagacccctgatgagacacaccaactacagcttcagcccctggcacggcttcaccatccacagagccaagttcatccagagccaggactaccagtgcagcgccctgatgggcggcagaaaggtgatgagcatcagcatcagactgaaggtgcagaaggtgatccccggcccccccgccctgaccctggtgcccgccgagctggtgagaatcagaggcgaggccgcccagatcgtgtgcagcgccagcagcgtggacgtgaacttcgacgtgttcctgcagcacaacaacaccaagctggccatcccccagcagagcgacttccacaacaacagataccagaaggtgctgaccctgaacctggaccaggtggacttccagcacgccggcaactacagctgcgtggccagcaacgtgcagggcaagcacagcaccagcatgttcttcagagtggtggagagcgcctacctgaacctgagcagcgagcagaacctgatccaggaggtgaccgtgggcgagggcctgaacctgaaggtgatggtggaggcctaccccggcctgcagggcttcaactggacctacctgggccccttcagcgaccaccagcccgagcccaagctggccaacgccaccaccaaggacacctacagacacaccttcaccctgagcctgcccagactgaagcccagcgaggccggcagatacagcttcctggccagaaaccccggcggctggagagccctgaccttcgagctgaccctgagatacccccccgaggtgagcgtgatctggaccttcatcaacggcagcggcaccctgctgtgcgccgccagcggctacccccagcccaacgtgacctggctgcagtgcagcggccacaccgacagatgcgacgaggcccaggtgctgcaggtgtgggacgacccctaccccgaggtgctgagccaggagcccttccacaaggtgaccgtgcagagcctgctgaccgtggagaccctggagcacaaccagacctacgagtgcagagcccacaacagcgtgggcagcggcagctgggccttcatccccatcagcgccggcgcccacacccacccccccgacgagttcctgttcacccccgtggtggtggcctgcatgagcatcatggccctgctgctgctgctgctgctgctgctgctgtacaagtacaagcagaagcccaagtaccaggtgagatggaagatcatcgagagctacgagggcaacagctacaccttcatcgaccccacccagctgccctacaacgagaagtgggagttccccagaaacaacctgcagttcggcaagaccctgggcgccggcgccttcggcaaggtggtggaggccaccgccttcggcctgggcaaggaggacgccgtgctgaaggtggccgtgaagatgctgaagagcaccgcccacgccgacgagaaggaggccctgatgagcgagctgaagatcatgagccacctgggccagcacgagaacatcgtgaacctgctgggcgcctgcacccacggcggccccgtgctggtgatcaccgagtactgctgctacggcgacctgctgaacttcctgagaagaaaggccgaggccatgctgggccccagcctgagccccggccaggaccccgagggcggcgtggactacaagaacatccacctggagaagaagtacgtgagaagagacagcggcttcagcagccagggcgtggacacctacgtggagatgagacccgtgagcaccagcagcaacgacagcttcagcgagcaggacctggacaaggaggacggcagacccctggagctgagagacctgctgcacttcagcagccaggtggcccagggcatggccttcctggccagcaagaactgcatccacagagacgtggccgccagaaacgtgctgctgaccaacggccacgtggccaagatcggcgacttcggcctggccagagacatcatgaacgacagcaactacatcgtgaagggcaacgccagactgcccgtgaagtggatggcccccgagagcatcttcgactgcgtgtacaccgtgcagagcgacgtgtggagctacggcatcctgctgtgggagatcttcagcctgggcctgaacccctaccccggcatcctggtgaacagcaagttctacaagctggtgaaggacggctaccagatggcccagcccgccttcgcccccaagaacatctacagcatcatgcaggcctgctgggccctggagcccacccacagacccaccttccagcagatctgcagcttcctgcaggagcaggcccaggaggacagaagagagagagactacaccaacctgcccagcagcagcagaagcggcggcagcggcagcagcagcagcgagctggaggaggagagcagcagcgagcacctgacctgctgcgagcagggcgacatcgcccagcccctgctgcagcccaacaactaccagttctgctag

SEQ ID NO: 153876 - DNA, 1506 bp, Artificial Sequence
  derived and/or modified sequence
atgagacacaccaactacagcttcagcccctggcacggcttcaccatccacagagccaagttcatccagagccaggactaccagtgcagcgccctgatgggcggcagaaaggtgatgagcatcagcatcagactgaaggtgcagaaggtgatccccggcccccccgccctgaccctggtgcccgccgagctggtgagaatcagaggcgaggccgcccagatcgtgtgcagcgccagcagcgtggacgtgaacttcgacgtgttcctgcagcacaacaacaccaagctggccatcccccagcagagcgacttccacaacaacagataccagaaggtgctgaccctgaacctggaccaggtggacttccagcacgccggcaactacagctgcgtggccagcaacgtgcagggcaagcacagcaccagcatgttcttcagagtggtggagagcgcctacctgaacctgagcagcgagcagaacctgatccaggaggtgaccgtgggcgagggcctgaacctgaaggtgatggtggaggcctaccccggcctgcagggcttcaactggacctacctgggccccttcagcgaccaccagcccgagcccaagctggccaacgccaccaccaaggacacctacagacacaccttcaccctgagcctgcccagactgaagcccagcgaggccggcagatacagcttcctggccagaaaccccggcggctggagagccctgaccttcgagctgaccctgagatacccccccgaggtgagcgtgatctggaccttcatcaacggcagcggcaccctgctgtgcgccgccagcggctacccccagcccaacgtgacctggctgcagtgcagcggccacaccgacagatgcgacgaggcccaggtgctgcaggtgtgggacgacccctaccccgaggtgctgagccaggagcccttccacaaggtgaccgtgcagagcctgctgaccgtggagaccctggagcacaaccagacctacgagtgcagagcccacaacagcgtgggcagcggcagctgggccttcatccccatcagcgccggcgcccacacccacccccccgacgagttcctgttcacccccgtggtggtggcctgcatgagcatcatggccctgctgctgctgctgctgctgctgctgctgtacaagtacaagcagaagcccaagtaccaggtgagatggaagatcatcgagagctacgagggcaacagctacaccttcatcgaccccacccagctgccctacaacgagaagtgggagttccccagaaacaacctgcagttcggcaagaccctgggcgccggcgccttcggcaaggtggtggaggccaccgccttcggcctgggcaaggaggacgccgtgctgaaggtggccgtgaagatgctgaagagcaccgcccacgccgacgagaaggaggccagcggcctgtaccagagcgccgagcagcagcagaagagatggcagagacagcagcagcagtag

SEQ ID NO: 153877 - DNA, 2016 bp, Artificial Sequence
  derived and/or modified sequence
atgggccccggcgtgctgctgctgctgctggtggccaccgcctggcacggccagggcatccccgtgatcgagcccagcgtgcccgagctggtggtgaagcccggcgccaccgtgaccctgagatgcgtgggcaacggcagcgtggagtgggacggcccccccagcccccactggaccctgtacagcgacggcagcagcagcatcctgagcaccaacaacgccaccttccagaacaccggcacctacagatgcaccgagcccggcgaccccctgggcggcagcgccgccatccacctgtacgtgaaggaccccgccagaccctggaacgtgctggcccaggaggtggtggtgttcgaggaccaggacgccctgctgccctgcctgctgaccgaccccgtgctggaggccggcgtgagcctggtgagagtgagaggcagacccctgatgagacacaccaactacagcttcagcccctggcacggcttcaccatccacagagccaagttcatccagagccaggactaccagtgcagcgccctgatgggcggcagaaaggtgatgagcatcagcatcagactgaaggtgcagaaggtgatccccggcccccccgccctgaccctggtgcccgccgagctggtgagaatcagaggcgaggccgcccagatcgtgtgcagcgccagcagcgtggacgtgaacttcgacgtgttcctgcagcacaacaacaccaagctggccatcccccagcagagcgacttccacaacaacagataccagaaggtgctgaccctgaacctggaccaggtggacttccagcacgccggcaactacagctgcgtggccagcaacgtgcagggcaagcacagcaccagcatgttcttcagagtggtggagagcgcctacctgaacctgagcagcgagcagaacctgatccaggaggtgaccgtgggcgagggcctgaacctgaaggtgatggtggaggcctaccccggcctgcagggcttcaactggacctacctgggccccttcagcgaccaccagcccgagcccaagctggccaacgccaccaccaaggacacctacagacacaccttcaccctgagcctgcccagactgaagcccagcgaggccggcagatacagcttcctggccagaaaccccggcggctggagagccctgaccttcgagctgaccctgagatacccccccgaggtgagcgtgatctggaccttcatcaacggcagcggcaccctgctgtgcgccgccagcggctacccccagcccaacgtgacctggctgcagtgcagcggccacaccgacagatgcgacgaggcccaggtgctgcaggtgtgggacgacccctaccccgaggtgctgagccaggagcccttccacaaggtgaccgtgcagagcctgctgaccgtggagaccctggagcacaaccagacctacgagtgcagagcccacaacagcgtgggcagcggcagctgggccttcatccccatcagcgccggcgcccacacccacccccccgacgagttcctgttcacccccgtggtggtggcctgcatgagcatcatggccctgctgctgctgctgctgctgctgctgctgtacaagtacaagcagaagcccaagtaccaggtgagatggaagatcatcgagagctacgagggcaacagctacaccttcatcgaccccacccagctgccctacaacgagaagtgggagttccccagaaacaacctgcagttcggcaagaccctgggcgccggcgccttcggcaaggtggtggaggccaccgccttcggcctgggcaaggaggacgccgtgctgaaggtggccgtgaagatgctgaagagcaccgcccacgccgacgagaaggaggccctgatgagcgagctgaagatcatgagccacctgggccagcacgagaacatcgtgaacctgctgggcgcctgcacccacggcggcaccgtggccagccccgccagagtgtggacccccatgtggagatag

SEQ ID NO: 153878 - DNA, 921 bp, Artificial Sequence
  derived and/or modified sequence
atgggccccggcgtgctgctgctgctgctggtggccaccgcctggcacggccagggcatccccgtgatcgagcccagcgtgcccgagctggtggtgaagcccggcgccaccgtgaccctgagatgcgtgggcaacggcagcgtggagtgggacggcccccccagcccccactggaccctgtacagcgacggcagcagcagcatcctgagcaccaacaacgccaccttccagaacaccggcacctacagatgcaccgagcccggcgaccccctgggcggcagcgccgccatccacctgtacgtgaaggaccccgccagaccctggaacgtgctggcccaggaggtggtggtgttcgaggaccaggacgccctgctgccctgcctgctgaccgaccccgtgctggaggccggcgtgagcctggtgagagtgagaggcagacccctgatgagacacaccaactacagcttcagcccctggcacggcttcaccatccacagagccaagttcatccagagccaggactaccagtgcagcgccctgatgggcggcagaaaggtgatgagcatcagcatcagactgaaggtgcagaaggtgatccccggcccccccgccctgaccctggtgcccgccgagctggtgagaatcagaggcgaggccgcccagatcgtgtgcagcgccagcagcgtggacgtgaacttcgacgtgttcctgcagcacaacaacaccaagctggccatcccccagcagagcgacttccacaacaacagataccagaaggtgctgaccctgaacctggaccaggtggacttccagcacgccggcaactacagctgcgtggccagcaacgtgcagggcaagcacagcaccagcatgttcttcagagtggtgggcacccccagccccagcctgtgccccgcctag

SEQ ID NO: 153879 - DNA, 549 bp, Artificial Sequence
  derived and/or modified sequence
atgaagtccttccttttggtggtgaacgcactggcgcttaccctaccctttcttgctgtggaggttcagaatcagaagcaaccagcctgtcatgaaaacgacgagcggcctttttaccagaaaacagcgccctatgtcccaatgtactacgttccaaacagttatccatactatggcacaaacctgtatcagagaagacctgccatcgctatcaacaatccttatgttcctcggacttattatgctaacccagccgtggtccgccctcacgcacagatcccgcagcgccagtacctgccaaatagccatccgcctaccgtcgtgcgtagacctaacctgcatccatcgttcatcgcgatacctcccaaaaaaattcaagataaaattattattccaaccatcaacactattgccacagtcgagcctactcccgcccccgcgactgagcctactgtcgacagcgtggttacccccgaggcctttagcgagtctataatcacatcaactcccgaaactacgaccgtggctgtgacacctccaactgcatag

SEQ ID NO: 153880 - DNA, 549 bp, Artificial Sequence
  derived and/or modified sequence
atgaagagcttcctgctggtggtgaatgccctggccctgaccctgcccttcctggccgtggaggtgcagaaccagaagcagcctgcctgccatgaaaatgatgagcggcccttctaccagaagacagccccctacgtgcccatgtactacgtgcccaacagctacccctactacggcaccaacctgtaccagaggaggcctgccatcgccatcaacaacccctacgtgcccaggacctactatgccaacccagctgtggtgcggccccacgcccagatcccccagaggcagtacctgcccaacagccacccccccaccgtggtgagaagacccaacctgcaccccagcttcatcgccatcccccccaagaagatccaggacaagatcatcatccccaccatcaacaccatcgccaccgtggagcccaccccagccccagccacagagcccaccgtggacagcgtggtgaccccagaggccttcagcgagagcatcatcaccagcaccccagagaccaccaccgtggccgtgaccccacccacagcctag

SEQ ID NO: 153881 - DNA, 549 bp, Artificial Sequence
  derived and/or modified sequence
atgaagagcttcctgctggtggtgaacgccctggccctgaccctgccctttctagccgtcgaagtgcagaaccaaaagcagcccgcatgccatgaaaatgacgagcgcccgttttaccagaaaactgccccctatgtccctatgtattacgtaccaaacagttatccatactacgggactaatttgtaccagcgccgccctgccatcgccatcaataatccatatgtgccacggacctattacgcaaaccccgctgtcgtccgcccacacgcccagattccccagaggcagtaccttcccaacagccaccccccgacagtggtccggcggcccaacctgcacccgtcattcatcgctattccccccaagaagattcaggataagatcattattccaactattaacacaatagcaacagtggaacccacgcctgcccccgctacagagcccactgttgactcagtcgtgaccccagaggcattctctgaatctatcatcactagtacacccgagacaaccaccgtcgccgtgactcctcccaccgcctag

SEQ ID NO: 153882 - DNA, 549 bp, Artificial Sequence
  derived and/or modified sequence
atgaagtcttttctcctggtagttaacgcgctcgcactgactctcccattcttggccgtggaggtgcagaaccaaaagcaaccggcttgccatgagaacgacgagcgccctttttaccagaaaacggccccatacgtgccaatgtattatgttcccaactcatatccatactatgggactaatctgtaccaacggcgacctgccatcgctattaacaatccctacgtgccgagaacttactacgcaaacccagccgtggtgcggccacacgcgcaaatcccccaaaggcagtatctgcccaattctcacccccctactgtggtcagacgccctaacttacacccctcctttatcgccataccacccaagaagatacaggacaagatcattattccaacaataaataccatcgccaccgttgagccgactccagcccctgctaccgaacccacagtggactccgtggttacccccgaggctttcagtgagtccatcattacctcaactccagagacaactacagttgcagttacacctcctactgcgtag

SEQ ID NO: 153883 - DNA, 549 bp, Artificial Sequence
  derived and/or modified sequence
atgaagagcttcctgctggtggtgaacgccctggccctgaccctgcccttcctggccgtggaggtgcagaaccagaagcagcccgcctgccacgagaacgacgagagacccttctaccagaagaccgccccctacgtgcccatgtactacgtgcccaacagctacccctactacggcaccaacctgtaccagagaagacccgccatcgccatcaacaacccctacgtgcccagaacctactacgccaaccccgccgtggtgagaccccacgcccagatcccccagagacagtacctgcccaacagccacccccccaccgtggtgagaagacccaacctgcaccccagcttcatcgccatcccccccaagaagatccaggacaagatcatcatccccaccatcaacaccatcgccaccgtggagcccacccccgcccccgccaccgagcccaccgtggacagcgtggtgacccccgaggccttcagcgagagcatcatcaccagcacccccgagaccaccaccgtggccgtgaccccccccaccgcctag

SEQ ID NO: 153884 - protein, 98 aa, Artificial Sequence
  derived and/or modified sequence
MIPGGLSEAKPATPEIQEIVDKVKPQLEEKTNETYGKLEAVQYKTQVVAGTNYYIKVRAGDNKYMHLKVFKSLPGQNEDLVLTGYQVDKNKDDELTGF

SEQ ID NO: 153885 - DNA, 297 bp, Artificial Sequence
  derived and/or modified sequence
atgatcccgggtggcttaagtgaagcgaagccggccactcctgaaatccaggagatcgttgataaagtcaagccgcagctggaagagaagacaaatgaaacatatggcaagctcgaagccgtccagtacaaaacccaggtagtcgccggcacaaactactacatcaaggtgagggccggcgataacaagtacatgcacctgaaggttttcaagagcttgcccggacagaacgaagatctggtgctgacgggctatcaagttgataaaaataaagatgatgaactcaccggcttttag

SEQ ID NO: 153886 - DNA, 297 bp, Artificial Sequence
  derived and/or modified sequence
atgatccctgggggcctgtctgaggccaagccagccaccccagagatccaggagatcgtggacaaggtgaagccccagctggaggagaagaccaatgagacctacggcaagctggaggccgtgcagtacaagacccaggtggtggccggcaccaactactacatcaaggtgcgggccggggacaacaagtacatgcacctgaaggtgttcaagagcctgcccggccagaatgaagacctggtgctgaccggctaccaggtggacaagaacaaggatgatgagctgaccggcttctag

SEQ ID NO: 153887 - DNA, 297 bp, Artificial Sequence
  derived and/or modified sequence
atgatccccggcggcctgagcgaggccaagcccgccacccccgagatccaggagatcgttgacaaagttaaacctcagctggaggagaaaaccaatgagacctatggtaaactcgaggctgtgcagtacaagactcaagtcgtggccgggaccaactattacatcaaggttcgcgcaggcgataacaaatacatgcacctcaaagtatttaagagtctgcccggacagaacgaggaccttgtgctcactggttaccaggtggataagaataaagatgacgagctcactggcttctag

SEQ ID NO: 153888 - DNA, 297 bp, Artificial Sequence
  derived and/or modified sequence
atgattcctggcggtctcagtgaagctaaacctgcaactccagaaatccaggagatcgtcgacaaggtcaagccacaactggaggaaaagactaacgagacctacggtaaattggaagccgtacagtataagacacaagtggtggcaggtaccaactactacattaaagtgcgcgcaggtgacaataaatacatgcacttgaaggtattcaagagtctccccggtcagaatgaggacctggtgctgacaggttaccaggttgacaagaacaaagatgatgagctgacgggcttctag

SEQ ID NO: 153889 - DNA, 751 bp, Artificial Sequence
  derived and/or modified sequence
gttcactttggttccagcatcctgtccagcaaagaagcaatcagccaaaatgatacctggaggcttatctgaggccaaacccgccactccagaaatccaggagattgttgataaggttaaaccacagcttgaagaaaaaacaaatgagacttacggaaaattggaagctgtgcagtataaaactcaagttgttgctggaacaaattactacattaaggtacgagcaggtgataataaatatatgcacttgaaagtattcaaaagtcttcccggacaaaatgaggacttggtacttactggataccaggttgacaaaaacaaggatgacgagctgacgggcttttagcagcatgtacccaaagtgttctgattccttcaactggctactgagtcatgatccttgctgataaatataaccatcaataaagaagcattcttttccaaagaaattatttcttcaattatttctcatttattgtattaagcagaaattaccttttctttctcaaaatcagtgttattgctttagagtataaactccatataaattgatggcaattggaaatcttataaaaactagtcaagcctaatgcaactggctaaaggatagtaccaccctcacccccaccataggcaggctggatcgtggactatcaattcaccagcctccttgttccctgtggctgctgataacccaacattccatctctaccctcatacttcaaaattaaatcaagtattttacaaagtg

SEQ ID NO: 153890 - DNA, 297 bp, Artificial Sequence
  derived and/or modified sequence
atgatccccggcggcctgagcgaggccaagcccgccacccccgagatccaggagatcgtggacaaggtgaagccccagctggaggagaagaccaacgagacctacggcaagctggaggccgtgcagtacaagacccaggtggtggccggcaccaactactacatcaaggtgagagccggcgacaacaagtacatgcacctgaaggtgttcaagagcctgcccggccagaacgaggacctggtgctgaccggctaccaggtggacaagaacaaggacgacgagctgaccggcttctag

SEQ ID NO: 153891 - protein, 223 aa, Artificial Sequence
  derived and/or modified sequence
MACLGFQRHKAQLNLATRTWPCTLLFFLLFIPVFCKAMHVAQPAVVLASSRGIASFVCEYASPGKATEVRVTVLRQADSQVTEVCAATYMMGNELTFLDDSICTGTSSGNQVNLTIQGLRAMDTGLYICKVELMYPPPYYLGIGNGTQIYVIDPEPCPDSDFLLWILAAVSSGLFFYSFLLTAVSLSKMLKKRSPLTTGVYVKMPPTEPECEKQFQPYFIPIN

SEQ ID NO: 153892 - DNA, 1295 bp, Artificial Sequence
  derived and/or modified sequence
gggaaataagagagaaaagaagagtaagaagaaatataagagccaccatgggtgtcttgcttactcagcggaccttgctgagccttgtgttggcgctcctctttccgtccatggcctcaatggccatgcatgtcgcccagcctgccgtggtcctggcatcatcacgaggaattgcgtcctttgtgtgtgagtatgcgtcgccgggaaaggcgaccgaagtaagagtgactgtactgaggcaggcggatagccaggtgacagaggtctgtgcagcgacttatatgatggggaacgagttgacgttcttggatgactcgatctgcacggggacatcgtccgggaatcaagtgaacttgacgattcaagggctccgcgctatggacactggcctgtacatttgcaaggtggaacttatgtacccgccaccctactatcttggaattggtaatgggacacagatctacgtgatcgaccctgagccctgccccgactccgaccaggaaccgaagagctcggacaagacgcacacatcgcccccttcgcctgctcccgagcttctcggtggcagctccgtctttctgttcccgccgaaaccaaaagataccctcatgatctcacggacccccgaagtaacatgtgtggtagtcgatgtctcgcacgaggatccagaggtgaagttcaattggtatgtggacggcgtcgaagtccataacgccaaaaccaaaccccgggaagagcagtacaactcgacctatcgcgtagtctccgtcttgacggtactccaccaggactggttgaacgggaaagagtacaagtgcaaagtcagcaacaaggcactccctgcgcccatcgagaaaacaatctcgaaagcaaagggacagcccagagagccccaagtgtacacgctcccgccgtcacgcgacgaattgacgaaaaatcaggtgtcacttacgtgtttggtgaagggattctacccgtccgatatcgccgtcgaatgggagtcgaatggacagcccgagaacaactataagacgactcccccagtgctcgactcagatggttcgttctttctgtactcgaagctcacagtagataagtcgaggtggcagcagggaaatgtgttttcgtgctcggtcatgcacgaagcgttgcataatcactatactcaaaaatcacttagcctgtcacccggaaagtgataagctgccttctgcggggcttgccttctggccatgcccttcttctctcccttgcacctgtacctcttggtctttgaataaagcctgagtaggaag

SEQ ID NO: 153893 - DNA, 1149 bp, Artificial Sequence
  derived and/or modified sequence
atgggggtcctgctcacgcaaagaactctgctgtcactggtgctcgcgctgcttttcccatccatggcctcgatggccatgcatgtggcacagcctgccgtcgtgctggcgtcaagccggggcatcgcttccttcgtgtgcgagtacgcctcaccaggaaaggcaactgaggtgagagtcaccgtgctgcggcaagccgactcacaagtgactgaagtctgcgccgctacgtacatgatgggcaacgaactgaccttcctcgacgactccatctgcacgggaacttccagcggtaaccaggtgaacctgaccatccagggactccgcgccatggataccgggttgtacatctgcaaggtggaactgatgtatccacccccatactatctgggtatcggaaacggtacgcagatttacgtcattgatccggagccgtgccctgatagcgaccaggaaccgaagtcgtcggataagactcataccagcccaccgtcaccggcacccgagctcctcggaggctcttccgtgttcctgttccctccaaagccgaaagatactctgatgatctcgagaactccagaggttacctgcgttgtggtcgacgtcagccatgaggatcctgaagttaagttcaactggtacgtcgacggtgttgaggtccacaacgcaaaaaccaaacctcgcgaggaacaatacaattcaacctaccgggtggtgtcggtgctgactgtgctgcaccaggactggctcaacggaaaagagtacaagtgcaaggtgtcgaacaaggcgttgcccgcaccgatcgaaaagactatctccaaagctaagggacagcccagggaaccacaagtgtacactcttccgccgtcccgcgatgagttgaccaagaaccaagtgtcactcacttgcctggtgaaagggttctacccatcagacatcgctgtggagtgggagagcaacggccagcctgaaaacaactacaagaccaccccaccggtcctggatagtgacgggtcgttcttcctttacagcaaactgactgtcgacaagtcgcgctggcaacagggaaacgtgttctcctgctcagtaatgcatgaagccctgcataaccactacacccagaagtcactgtccctctcaccggggaag

SEQ ID NO: 153894 - DNA, 1149 bp, Artificial Sequence
  derived and/or modified sequence
atgggcgtgctccttactcagcgcacgcttctgtcgctggttcttgcgcttctgtttccgtctatggcaagcatggcaatgcacgtggcacaaccggcagtggtgctcgcctcgagccgggggatcgcctcgttcgtgtgtgaatacgcgagcccgggtaaggcgaccgaagtcagagtgactgtcttgcgacaagcggactcccaagtcactgaggtgtgcgccgccacctacatgatgggcaatgagctgaccttcctcgacgactccatctgcaccggaacttcctcgggaaatcaggtgaacctgaccatccaagggctgcgcgcaatggatacgggactgtatatctgcaaggtggagttgatgtacccacctccatattacctcggtatcgggaacggcactcagatttacgtgattgacccggaaccgtgccccgactcagatcaggaaccgaagagctcggataaaactcacactagcccgcccagcccagcccctgagctcctgggcggaagctccgtttttctcttcccgccgaagcctaaggatacgctcatgatctcgcgcaccccagaggtcacctgcgtcgtcgtggacgtgagccacgaggaccccgaagtcaaattcaattggtatgttgatggcgtggaggttcataatgctaaaactaagccgcgggaagaacagtacaactcaacctaccgcgtcgtgtcggtcctcactgtgctgcatcaggactggctgaacgggaaggagtacaagtgcaaagtcagcaataaggcgttgcccgcgcctatcgaaaaaacgatctcgaaggctaagggacagccgagagagccccaggtgtacactctcccaccatctcgtgacgaactcactaagaaccaggtgtcactgacttgtcttgtgaagggcttttacccttcagacattgctgtggagtgggagtcaaacggtcaaccagaaaacaactacaagactacgccgccggtgctcgattcggacgggtcatttttcctgtactcgaagctcacggtggataagtcccggtggcaacaaggcaatgtgttctcgtgctcggtcatgcatgaagccctgcacaaccattatactcagaaatccctgtccctgtccccggggaaa

SEQ ID NO: 153895 - DNA, 1149 bp, Artificial Sequence
  derived and/or modified sequence
atgggcgttctcctaactcagaggaccctgcttagcctagtgctggctctgttgttcccaagcatggcctctatggccatgcatgtagctcagcctgcggtagtgctggcgagctcacggggcatcgcttcttttgtgtgcgagtacgcctcacctggtaaagccacggaggttagggttaccgtgctgcggcaagcagacagtcaggtgacagaggtgtgtgctgcaacatacatgatgggtaatgagctcaccttcctcgacgactctatttgtaccgggaccagcagtggtaatcaggtaaatcttaccattcagggtctaagggctatggataccggcctgtacatttgcaaggttgaactgatgtatcctcccccttattacttgggcattggaaacggaacgcagatctacgtcattgaccccgagccatgccctgactcagaccaggagccaaagagttctgacaagactcacacctcaccaccatctccggcacctgagctcctcggagggtcctcagtgttcctatttccccccaagccaaaggacacactcatgattagccgaactcccgaggtaacctgcgtggtcgtggatgttagccacgaggatcccgaggttaaatttaactggtacgttgacggcgtggaagtgcacaacgccaaaaccaagccgagagaggaacaatacaattccacgtacagagtggtgtcggtgcttacagtattgcaccaggattggctgaatgggaaagagtacaagtgcaaagtttccaataaggcactgcctgcgccaatcgaaaagactatatcaaaggctaagggacaaccccgggagccccaggtgtacactctacccccctccagggatgaactcactaaaaatcaggttagcctgacctgtttggttaaaggcttctacccgtctgatatcgcggtggagtgggagtcaaatggccagccagagaacaattacaaaacgaccccaccagtcctggactctgatggaagtttcttcctttattcaaagcttaccgttgataaaagcagatggcagcaggggaacgtcttttcatgctctgtaatgcacgaggcccttcacaaccactatacacagaaatccctgagtttgtcgccaggaaaa

SEQ ID NO: 153896 - DNA, 1149 bp, Artificial Sequence
  derived and/or modified sequence
atgggcgtcctgctaactcagagaaccctgttgtccttggttttggcccttctcttccctagcatggcttctatggcgatgcacgtcgctcagccggccgtagtcctggcgtcctcacggggaatagcaagcttcgtttgcgagtatgcatcaccgggcaaggctacagaggtcagagttacagtgcttcgtcaggcagatagccaggttaccgaggtctgtgccgctacctatatgatgggcaacgagctgacctttctggatgattctatttgtactggtacgtcctccggtaaccaagttaatcttacaatccaggggctgagggcaatggacacaggcctgtatatttgtaaggtcgagctaatgtacccacctccgtattatctgggaatcggtaatgggacacagatctatgtgattgatcccgaaccatgccccgacagtgaccaggagcccaagagttccgataagacgcatacatcaccaccgagtccagcaccagaactgcttggaggttcatcggtgtttctatttccccccaaacccaaggatactctgatgatatcacggacaccggaagtgacttgcgtggtggtggatgtgagccacgaggatcctgaggttaaattcaattggtacgtcgacggcgtcgaggtgcacaacgcaaagaccaaaccaagggaggaacagtataactcgacatatcgcgtggtgtctgtcttgaccgttctgcatcaggactggttaaatggtaaggaatataagtgtaaggtgtctaacaaggccctgcctgctcccattgagaaaaccatcagcaaggccaaaggtcagcctcgcgaacctcaagtctatactttacctccttcccgggacgaactcacgaagaaccaagtttccttgacctgtctggtgaaaggattctatccctccgacatcgcagtggagtgggaatcaaacggacagccagagaacaattacaagaccacccctcccgtgctggatagcgatggaagctttttcctttactctaagctcacagtggacaaatcacgctggcagcaagggaacgtcttttcttgctctgtcatgcacgaggcacttcacaaccattacacccagaagtcactttccctcagtcctggtaag

SEQ ID NO: 153897 - DNA, 1149 bp, Artificial Sequence
  derived and/or modified sequence
atgggagtcctgttgactcagcggactctccttagcctggtcctcgccctccttttcccatcgatggcgtcgatggcgatgcacgtggcccaacccgcggttgtgctggcctcaagccgcggaatcgcctcgttcgtgtgcgaatacgcttccccgggaaaggccactgaagtccgcgtgaccgtcttgcgacaggctgactcacaagtgactgaagtgtgtgcggccacgtacatgatgggcaacgaactgacgttcctggacgattcgatttgcactgggacgtcctctggaaaccaggtgaacttgaccatccagggcctgcgcgcgatggacaccggtttgtacatctgtaaagttgagctgatgtacccgccaccctactacttgggaatcggcaacggtacccaaatctacgtgatcgaccccgagccgtgccccgattccgatcaagagcctaagtcgtcagacaagacgcacacctcgcctccatcgcctgcacctgaactgctggggggttcttcagtgttcctgttcccgccgaaaccaaaggacaccctcatgatctcccggactcctgaggtcacttgcgtggtggtggatgtgtcacatgaggacccggaggtcaagttcaactggtatgtcgatggggttgaagtgcacaatgcaaagacgaagccacgggaagagcagtacaattctacttacagagttgtcagcgtcctcacggtgcttcaccaggactggcttaacggaaaagagtacaagtgcaaggtgtcgaacaaggcacttccagcccctatcgagaaaaccattagcaaagctaagggacaaccgagggagccacaggtctacaccctcccgccgagcagagacgagctgactaagaatcaggtcagcctgacctgcctggtgaagggattttacccctccgacatcgccgtggagtgggaaagcaatggtcaacccgagaacaactacaaaaccacgccgccagtgcttgattcggatggcagcttctttctctatagcaagctgactgtcgataagtcacgttggcagcagggcaatgtcttttcttgttccgtgatgcacgaagctctgcataaccactacactcagaagtccctgtcgctctcgccaggcaaa

SEQ ID NO: 153898 - DNA, 1149 bp, Artificial Sequence
  derived and/or modified sequence
atgggagtcctgctgacgcagagaaccctgctctccttggtgcttgctctgctgttcccgtcgatggcaagcatggcaatgcatgtggcccagcctgcggtggtgcttgcgtccagccgaggcatcgcctcattcgtgtgcgagtacgcctcaccgggaaaggctaccgaggtgcgcgtgaccgtcctgaggcaagccgactcacaagtgaccgaagtttgcgcggccacttacatgatgggaaacgagctcaccttcctcgatgattcaatctgtactggaacgtcctcgggaaaccaggtgaatctcaccatccagggccttcgggcgatggacaccggactctacatctgtaaagtcgagctgatgtatcctcccccatactatctcggaatcggaaacgggacccagatctatgtgatcgacccggaaccatgtcctgattcggatcaggaaccaaagagctcggacaaaactcatactagccctccaagcccggcacctgaacttctcggaggctcctcagtgttccttttcccaccgaagccgaaggacaccctcatgatctcccggacgccagaagtgacgtgcgtcgtggtggatgtgtcccacgaagatccggaagtgaagtttaactggtacgtcgacggagtcgaagtgcacaacgccaagactaagccgcgagaagagcaatacaactccacgtaccgggtcgtgtcagtgctcaccgtgctgcatcaagactggctcaacggaaaggaatacaagtgcaaggtgtccaataaagcactgccggcccctatcgaaaagactatctcgaaggccaagggacaaccgcgcgaaccccaggtgtacaccctcccgccctcgagggatgagctcaccaaaaaccaagtttcccttacttgtctggtcaagggattctacccgtccgacatcgcggtggaatgggagagcaatggacaacctgaaaacaattacaaaactactcctcctgtgctggactcagatgggtcgttctttctgtacagcaagctgaccgtggataagagccgctggcagcagggtaacgtcttttcgtgcagcgtgatgcacgaagctctgcacaatcattacacgcagaagtcgctctccttgtccccaggaaag

SEQ ID NO: 153899 - DNA, 1149 bp, Artificial Sequence
  derived and/or modified sequence
atgggagtcctgctgactcagagaacccttctgtcgctcgtcctcgctctgctgttcccatccatggcatcaatggccatgcacgtcgcacaacctgccgttgtcctggcatcctcacgcgggattgcaagttttgtctgcgagtacgcgagccccggtaaggcgactgaagtccgcgttactgtgctgaggcaggccgacagccaggtgaccgaggtctgtgcagcaacgtacatgatgggcaacgaactcactttcctcgacgactccatttgtactggaacctcatcagggaatcaggtcaacctgactatccaagggttgcgagcaatggatacggggctctacatctgtaaagtggaacttatgtaccctccgccctattacttggggattggaaacgggacgcaaatctacgtgattgaccccgagccttgtcctgattcggaccaagaacctaagtcgtctgataaaactcatacctccccgccctcgcctgcgcctgagctcctcggcggttcaagcgtgtttcttttccctcccaagcctaaggatactctgatgatttcacgaaccccagaagtgacttgcgtggtcgtggatgtctcgcatgaagatcctgaagttaagttcaattggtacgtcgatggtgtggaagtgcataacgcaaaaactaagccaagggaggaacaatacaattcgacttaccgtgtcgtgtcggtgctcaccgtgttgcatcaggattggctcaatggtaaagaatacaaatgtaaagtgtcgaataaagcattgcccgcaccaattgaaaagaccatatcgaaagcaaagggacaaccacgggaaccgcaggtctacacgcttccaccctcaagggatgaacttacgaagaaccaggtcagcctgacctgtctcgtgaaaggattctacccatcagatattgcagtcgagtgggaatcgaacggtcagccggaaaacaattacaagaccaccccacctgtgcttgatagcgatggcagcttttttctgtacagcaagctcaccgtggataagagccgctggcaacagggtaacgtttttagctgctccgtcatgcatgaggcactgcataatcattacacccagaaatcgttgtcgctctcccctggaaag

SEQ ID NO: 153900 - DNA, 1149 bp, Artificial Sequence
  derived and/or modified sequence
atgggtgtgttgctgacccagaggaccctgttgagcttggtgctggcactgctctttccctccatggccagtatggctatgcacgttgctcagcccgctgttgtccttgctagctcccgcggtatcgcttcttttgtatgcgaatacgcctcccctggaaaagccacagaagtgagagtcactgttctccgccaagccgactctcaggtaactgaggtgtgcgctgcaacctatatgatgggtaacgaattgaccttcctcgatgacagtatctgcaccggcacaagctccggcaaccaggtcaacctgactatccagggtcttcgcgcaatggacaccggcctctacatatgcaaggtcgagctgatgtaccctcccccctattatttgggaatcggcaatggcactcaaatctacgtaatagaccctgaaccctgccccgacagcgaccaagagcctaagagctccgacaaaacacatactagtcctccatcacctgcccccgagcttctgggtggctcttctgtgttcctgttcccccccaagcctaaggataccttgatgatctctcgcactcctgaggtgacctgcgtcgtggtggatgtttctcacgaagaccccgaggtaaagtttaactggtacgtcgacggtgttgaagtgcacaatgccaagactaagccccgtgaggagcaatataattctacttaccgcgtggttagcgtcttgactgttctgcaccaggactggttgaacggaaaagagtataaatgtaaggtaagcaacaaagccttgccagcacctattgaaaagactattagtaaagctaaaggccaacctcgcgagcctcaggtgtataccctccccccttcccgcgacgagttgaccaaaaatcaggtctctctgacctgtctcgtaaagggtttttatccaagtgacatcgcagtggagtgggagtctaacggtcagcctgaaaataactataagactactccccccgtgctggatagcgacggaagctttttcctgtacagcaaattgactgtggacaagtcaaggtggcagcaaggcaacgtgttcagttgctccgttatgcatgaggccttgcataaccattatacccaaaagtctctgtcactgagtcctggaaaa

SEQ ID NO: 153901 - DNA, 1149 bp, Artificial Sequence
  derived and/or modified sequence
atgggagtgctgctcactcaacgaacccttctctccctcgtcctggccttgctcttcccatcaatggcgtctatggcaatgcatgtggcacagccagccgtggtccttgcctcgtcgcgcggaattgcatccttcgtgtgcgaatacgcctcacccggaaaggcgaccgaagtcagagtgactgtgctccgccaagcggactcccaagtgaccgaggtgtgcgccgccacgtacatgatgggaaacgaactcacttttctggatgattccatttgcaccggtacttctagcggaaaccaggtgaacctgactatccaggggctgcgcgctatggatactggcctctacatctgcaaggtggagcttatgtacccaccgccttactacctgggcattgggaacggaactcagatttatgtgatcgacccggaaccttgtccggactcagaccaggagccgaagtcctccgacaagactcacacttcgcctcctagcccggcgcccgaactcttgggcggtagctccgtgttcctgttcccgcccaagccgaaagacactctgatgatctcgcgtaccccggaggtcacctgtgtcgtggttgacgtctctcacgaggacccggaggtgaaattcaattggtacgtcgacggggtggaagtgcacaacgcgaaaactaagccccgcgaagaacagtacaattccacgtaccgcgtggtttcagtgctcaccgtgctgcatcaggattggctgaacgggaaggaatacaagtgtaaagtgtctaataaggcactcccggctcctatagaaaaaacgatctcaaaggccaaggggcagccaagagaaccgcaggtctacacgcttccgccgtcacgcgatgagctcaccaagaatcaggtgtctctgacctgcttggtcaagggcttctacccctcggacatcgctgtggagtgggaaagcaacggccaacccgagaacaactacaagacgactcccccggtcctggattcggatggatcgttcttcctgtatagcaaactgactgtggataaaagccgctggcagcagggaaacgtatttagctgcagcgtcatgcatgaggctctgcacaatcactacacccaaaaatccctgtcgctgtcgccgggtaaa

SEQ ID NO: 153902 - DNA, 1149 bp, Artificial Sequence
  derived and/or modified sequence
atgggagttctcctgacccaacgcacactccttagcctcgtgctcgccctcttgtttccgtctatggcgagcatggccatgcacgtggcccaaccagccgtcgtgctggcaagctcaagagggatcgcttcttttgtgtgcgagtacgctagtcccggaaaagccacagaagtgcgagtcacggtcctgcgccaagctgattctcaggtcaccgaagtgtgtgctgccacatatatgatgggcaatgagcttacattcctggatgacagtatttgcacaggaacaagctctggaaatcaggttaacctcaccatacagggattgcgggccatggatactggcttgtatatttgcaaagtggagctgatgtatccccctccttactacctgggcattgggaacggtacccagatctacgtgatcgacccagaaccctgccccgattcagatcaggaaccaaaatcttccgacaagacccacacgtcccccccttctccagcgcctgaactgcttgggggctccagcgtgttcttgttccctccgaagcccaaagacaccttgatgatctcaaggactccagaagttacttgcgtggtagtcgatgtctcccacgaggatccagaggtcaagttcaactggtacgtagatggagtggaggttcacaatgccaagactaagcctcgcgaggagcagtacaattctacttatagagtagttagcgtgctcactgtcctgcaccaggactggctgaacggaaaggaatacaagtgtaaagtgagtaacaaggccctgccggcacccattgagaagaccatcagcaaggccaagggccagccaagggagccccaggtctataccctcccccccagtcgggatgagttgacaaagaaccaagtttctttgacctgcctcgtcaagggcttctatccctctgacattgcggtggaatgggagagtaacggacagcctgaaaataattataagaccacaccgcctgtgctggattccgacggctctttcttcctgtatagcaaactcactgtggacaagagtagatggcagcagggcaatgtgttttcttgttctgtgatgcacgaggcgctgcataatcactatacacagaagagtctctcactctcacctggaaaa

SEQ ID NO: 153903 - DNA, 1149 bp, Artificial Sequence
  derived and/or modified sequence
atgggggtgctcctgacccaaagaaccctcctttcactggtgctggcgttgctgttccccagcatggcgagcatggcgatgcacgtcgcccagcctgctgtggtgctggcctcatcccggggcatcgcctcgttcgtttgcgagtacgcgtcgccaggcaaggcaacggaagtgcgcgtcaccgttctgagacaagccgattcgcaggtgacggaagtctgtgctgccacctacatgatgggaaatgaactcacgttcttggacgatagcatttgtactggaacctcgagcgggaatcaagtcaatcttactatccagggattgcgcgccatggacaccggactgtacatttgcaaggtggagcttatgtacccacccccatactacctgggaatcggcaacggtacccagatctatgtgatcgacccagaaccgtgcccagacagcgatcaggagccgaagtcctcggacaaaactcacacttcgcctccctcccctgcgccagaactcctgggtggatcgtccgtattcctcttcccgcccaagcccaaggacaccttgatgatttcaaggacccccgaggtgacttgcgtagtggtggacgtctcacacgaggacccggaggtaaagtttaactggtacgtcgatggagtggaagtccataacgcgaaaaccaaacctcgggaagaacagtacaattccacttatagagtggtttcggtgctgaccgtgctgcatcaagattggctgaacggcaaagaatacaagtgtaaggtgtctaacaaagcactcccggctccaatcgaaaagaccatctccaaggcaaaggggcaaccgcgggagccgcaggtctacaccctccccccatcacgcgatgaactcactaagaaccaggtgtcgctgacttgcttggtgaaaggattttacccgagcgacatcgccgtggaatgggaatccaacggacagcccgagaataactacaagacgactcccccggtgctggactccgatggatcattctttctgtactccaagctcaccgtcgacaaatcaaggtggcaacaagggaacgtgttctcttgcagcgttatgcatgaggccctgcataatcattacacgcagaagtcactgagtctgagcccaggaaag

SEQ ID NO: 153904 - DNA, 1149 bp, Artificial Sequence
  derived and/or modified sequence
atgggcgtgctcctgactcagagaactctgctgtccttggttctcgcacttctttttccttcgatggcatccatggctatgcatgttgcacagccagccgtggtgcttgcatcatcgagaggtattgcatcatttgtctgtgagtacgcctcgccgggcaaagcaacggaggtgcgcgtgactgtcctccgccaggcagactcgcaagtcactgaagtttgcgcagcgacgtacatgatggggaatgaactgaccttcctggacgactccatctgcaccggtacttcatcaggtaaccaagtgaaccttaccattcagggactgcgggctatggacactggactgtacatttgtaaggtggagctcatgtaccccccaccctactaccttggcatcggaaacggcactcagatttatgtcattgatccagagccttgtccagattccgatcaagaacccaagagcagcgacaaaacccacactagcccaccaagccccgcaccagaactgctgggagggagctcggtgtttctttttccccccaagcctaaggataccctgatgatctcaaggactccagaagtgacgtgtgtcgtggtcgatgtctcacatgaagatcctgaagtcaaattcaactggtacgtggatggagtcgaggtgcacaacgcaaagactaagccccgggaagaacagtacaacagcacttaccgggtggtgtcagtgttgactgtgcttcaccaagactggctgaatggaaaagaatacaagtgcaaggtgtctaacaaggcactgcctgcccctatagaaaagactatttcaaaggctaagggtcaaccccgggagccacaggtgtacacccttcctccttctcgcgacgaacttaccaagaatcaagtctcgctcacctgcctcgtgaagggtttttacccttcggatatcgcagtggaatgggaatccaatggacagcctgaaaacaattacaaaactaccccaccggtgcttgactcagatggctcgtttttcttgtactctaagctcactgtcgataagtcaagatggcaacaaggaaatgtctttagctgctcggtcatgcatgaagccctccataatcactacacccagaagagcctgtccctttcgcctggtaaa

SEQ ID NO: 153905 - DNA, 1149 bp, Artificial Sequence
  derived and/or modified sequence
atgggggtgcttctcactcaacgcactctgttgagcttggttctggcgctcttgtttccctccatggcctctatggctatgcacgttgcccagcctgcggtggtgctggcaagcagtagagggatcgcttcattcgtgtgcgagtatgcgtcccccggcaaggctacggaggtaagagtgaccgtgctgcggcaggccgactctcaggtgactgaagtgtgcgcagcaacttatatgatgggcaacgaactgacattcctggatgatagcatctgcaccggcacctcgagcggcaaccaggtcaacctaaccattcaggggcttagagcgatggatactgggttgtacatctgcaaggttgagctgatgtatccccctccctactatctgggtatcggcaacggcacgcaaatttacgttatagaccctgaaccctgcccagacagcgaccaagagccaaagagttcagacaaaacccacacctctcccccttcccctgctcccgaactcctcgggggatccagcgtgtttttattcccccctaaacctaaggacactctgatgatttctaggacccccgaagtgacatgtgtcgtagtggatgtttcgcacgaggatccggaagtgaaattcaattggtatgtggatggcgtcgaagtgcacaacgctaaaacaaaacccagagaggagcaatataactctacctaccgtgtggtttcagttcttactgtgctgcaccaggactggctcaatggcaaagagtataaatgtaaggtcagtaacaaagccctgcccgctccaatagagaaaacaattagtaaagcaaaaggccagcccagagagccccaggtctacaccttgcctccaagtcgcgacgaactgacaaagaatcaggtctccctgacctgcctggtcaaggggttttatccttcggatatcgctgtggagtgggaatctaatggccagcctgaaaacaattacaagaccacgccacccgtgctggactcggatggttccttttttctatactcaaagttgaccgtagataaatctcgatggcagcagggtaatgtgttttcttgtagcgtcatgcatgaggcattacacaaccattatacacagaaatctttgagcctgtcccctggcaaa

SEQ ID NO: 153906 - DNA, 1149 bp, Artificial Sequence
  derived and/or modified sequence
atgggcgtgcttctgacccagagaacccttctgtcccttgtcctggccttgctcttcccatccatggcaagcatggccatgcacgtggcacaacccgcagtggtattggctagcagtcggggaatcgcctcctttgtctgcgagtacgcgtctcctggaaaggctacagaggtaagggtgacggtcctccgacaagcggattcccaagtgacagaggtgtgcgcagccacttatatgatggggaacgagctgaccttcctggatgactctatctgcaccgggacgtctagcgggaatcaggtcaacctgacgatacagggacttcgggcgatggatacagggttgtatatctgcaaagtggaactcatgtatccacccccatactatctgggtataggcaatggcacacaaatctacgtgattgatccggagccttgcccagactcagatcaagagccgaagtccagcgacaaaacacacacttcccctcctagcccagctccagagctcctcggaggatcatcagtgttcctgttccctccaaaacccaaggacacattgatgatcagtcgaacgccagaggtgacctgtgtggtggtcgatgtcagccatgaggacccggaggtgaagttcaactggtacgttgacggggtggaggtacataatgctaaaactaaaccgcgggaggagcaatacaactctacttacagggtggtgtccgttttaacggtcctgcaccaggactggttgaacggcaaggagtataagtgcaaggtttcgaacaaggcattgccagctccaatagagaaaacgatttcaaaagccaaggggcagccaagggagccccaggtatataccctccctccatctcgcgacgagctgacaaagaatcaggtcagtcttacgtgtttagtaaaggggttttacccctcagacatcgccgtggaatgggagagcaacggtcagcccgaaaacaattataagaccaccccccctgtactcgatagtgacggctcattcttcctctactccaagttgacagttgacaaatctcgctggcagcagggaaacgtcttttcgtgtagcgtaatgcacgaagccttacataatcactacacccagaaatcactgagcctgagtccggggaag

SEQ ID NO: 153907 - DNA, 1149 bp, Artificial Sequence
  derived and/or modified sequence
atgggtgtgctgcttactcaacgaactcttctctcattggtgcttgccctgctgtttccttctatggcatcgatggccatgcatgtggcccaaccagcagtggtgttggccagcagcagaggaattgcatcctttgtgtgtgaatacgcttcccccggaaaggccactgaggtgcgcgtgacggtcctccggcaagcagattcccaagtgactgaagtctgtgcagcaacttacatgatggggaacgaattgacctttctggacgattccatctgtaccggcacgtcgagcgggaatcaagtcaaccttaccatccaaggccttagagcaatggataccggtctgtacatatgtaaggtcgaactgatgtaccctccgccttactatctgggaataggtaatgggactcagatatacgtcattgatccagaaccttgtccagatagcgatcaggaaccaaaatcatcggataagacgcacacctcacctcccagcccggccccggaactcctcggaggctcatcggtgtttctgtttcctcctaaacccaaggacactttgatgatctcccggaccccggaggtgacttgtgtggtggtggatgtgtcccatgaggaccccgaagtgaagtttaactggtatgtggacggagtcgaagtgcacaacgcgaaaaccaagccacgagaagagcagtacaactcgacctatagagtggtgtcggtgttgaccgtgctccaccaggattggctgaatggcaaagaatacaagtgtaaagtctccaacaaagctctgcctgcaccaatcgaaaagactatttcaaaggcaaagggtcagcccagagagcctcaggtgtacactctccccccttcccgtgatgaactgacgaagaaccaagtgtcactgacttgccttgtgaagggattctacccttcagacattgcagtcgagtgggaatccaacggacagccggagaacaactacaagaccaccccaccagtccttgactcagacggatcattcttcctttactcaaagttgaccgtcgataagtccaggtggcaacaaggaaacgttttttcgtgtagcgtcatgcatgaggcccttcacaaccactacacccagaaaagcctctcgctcagccccggtaag

SEQ ID NO: 153908 - DNA, 1149 bp, Artificial Sequence
  derived and/or modified sequence
atgggggtacttctcacccaaagaaccctgcttagtctggtcctggcgctactcttccctagcatggcaagcatggcaatgcacgtcgcccagcccgctgtggtcctggccagcagcagaggaatcgcttcttttgtatgcgaatacgcctcacccgggaaagctactgaggtgagagtgaccgtccttaggcaagcagattcgcaggtaactgaagtatgcgctgctacctacatgatggggaacgaactcacattcctcgatgattccatctgcaccggaacctcatctggaaaccaggttaacctgaccattcagggccttcgggctatggacaccggcttgtacatctgtaaagtggaactgatgtaccctcctccttactacttgggaatcgggaacggaacgcagatttatgttattgaccccgaaccctgtcctgactctgaccaggaaccaaagagtagcgacaagactcacaccagccccccctcccctgctcctgaactcttggggggaagttccgtgttcctttttcctcctaaaccgaaggatacccttatgatcagccgcactccagaggtgacatgcgtagtcgttgacgtgagccacgaagaccccgaagtcaagttcaactggtacgtcgatggcgtggaagttcataatgccaaaaccaagccaagggaagagcagtataactcaacttatcgggtagtcagtgttctgaccgttctccatcaggactggctgaacggaaaagagtataaatgtaaagtctcaaacaaggcactcccagctccaatagagaagacgatctccaaggcaaaaggacagcccagagaaccccaagtgtataccctaccccctagcagggacgagctaaccaaaaaccaagtgagcctgacctgtcttgtaaaaggcttctacccgtcagatatcgctgtggaatgggaatcaaatggccagccagaaaacaactacaaaaccacaccgcccgtgctcgatagcgatgggagcttcttcttgtactcgaaactcacagtcgataagagcaggtggcagcaaggcaacgtctttagttgtagcgtgatgcacgaggccttgcataaccactacacacaaaagtcgctgagtttgtcacctggaaaa

SEQ ID NO: 153909 - DNA, 1149 bp, Artificial Sequence
  derived and/or modified sequence
atgggagtgctccttacccaaagaaccctcttgagcttggtcctggctctccttttccctagcatggcaagcatggcaatgcatgtcgcacaacccgccgtggttctggcatctagccgagggattgcatcgttcgtctgcgagtacgcgagccctggcaaagcaaccgaggtgagggtgactgtgcttcgccaggccgattcacaagttaccgaagtatgtgcagctacgtacatgatgggtaatgaactgacctttttggacgatagcatctgcacgggaactagttctggtaaccaggtgaatcttaccattcaaggactgcgcgcaatggataccggcttgtacatttgcaaggtagagcttatgtacccacctccatattacctcgggataggaaatgggacccaaatctacgttatcgatccagagccgtgccccgattcggaccaggaacctaaatcgtctgacaagacccatacctcgccaccatcgcctgcaccagaactgctgggcgggtccagcgtgtttctgtttccacccaagcctaaggatacgctcatgatctcgcgcaccccagaggtcacgtgtgtggtcgtggacgtctcccatgaggatccagaagtgaaattcaattggtacgtggatggagtggaagtgcacaacgcaaagactaagcctcgtgaagagcagtacaactccacctaccgggtggtgtcggtccttaccgtgcttcaccaggactggcttaatggtaaggaatacaagtgtaaggtgtccaataaagccctgcccgccccgatcgaaaagacgataagcaaagcaaagggacaacctcgggaaccccaggtttacactctgccaccttcacgcgatgagctgactaaaaaccaggtgtcccttacttgtcttgtgaagggcttttacccttcagacatcgcggtggagtgggaaagcaacggacagccggaaaacaattacaaaaccaccccgcccgttctggacagcgatgggagctttttcctgtactcgaagctcaccgtcgacaagtcacggtggcaacaaggcaacgtcttttcctgctccgtgatgcatgaggccctgcataatcactacacccaaaagtcgctctcactttctcctggtaaa

SEQ ID NO: 153910 - DNA, 1149 bp, Artificial Sequence
  derived and/or modified sequence
atgggcgtactactaacacaacggacactgctatccctggttctagcactcctgtttcccagtatggcttcaatggccatgcatgttgctcagcccgccgtggtgctagctagttctcggggtatagcgagctttgtctgtgaatacgcttccccaggcaaggccacagaagtgcgcgtcacagttctgagacaggccgattctcaggttacagaggtgtgcgcagcaacctatatgatggggaacgaactgacgtttctcgatgatagcatctgcacgggaacctcatccggcaaccaagttaacttgacgatccagggcctgcgcgctatggatacagggctatatatctgcaaggtagaattgatgtatccaccaccttactatctgggtatcggcaacggcacacagatttacgtgattgatcccgagccatgccctgactccgaccaggagccaaaaagctccgacaaaactcacacatcccctccatcccccgctccggaactgctggggggtagctctgttttcctgttccccccaaaaccgaaagacacattaatgatctcacgaaccccagaagtcacctgcgtcgttgtagacgtatcacatgaagacccggaagtaaagttcaattggtatgtagacggtgtcgaagtccacaacgctaagacaaaaccacgagaggagcagtataactctacataccgggtcgtgtctgttctgacagtgctgcatcaggactggttaaacggtaaggagtataaatgtaaggttagcaataaagcactccctgcccccatagaaaagacaattagcaaagctaagggccagccacgagagccacaagtctacacactgcctccttcaagagatgaattgaccaagaaccaggtgtccctcacatgtctcgtgaaggggttttaccctagtgatatagcagtggagtgggaatccaacggacagcctgagaataactataagacaacaccaccagtgctggattccgacggatcgttttttctttacagcaaactgacggttgataagtccagatggcagcaaggcaatgtgtttagttgtagtgtgatgcacgaagctctgcataaccactatacacagaaatccttgagcctgtccccgggaaag

SEQ ID NO: 153911 - DNA, 1149 bp, Artificial Sequence
  derived and/or modified sequence
atgggagtgctactcactcagcggactctgttatctctagtgttggctctcttattcccttctatggcctcaatggccatgcatgtggcccagcctgctgttgtcttggcaagtagtagggggatcgcgtcattcgtttgtgaatatgcatctcccggaaaggccactgaggtcagggtaacggtgctgagacaggccgactcacaggtgacggaggtctgcgcggccacatacatgatgggaaatgaactgactttcctcgacgactctatatgcacagggacttcttccgggaatcaggtgaacttaactatacaggggctgcgagcaatggatactggactgtacatatgcaaagtagaactgatgtatccacctccctattacttggggataggaaatggaacacagatctatgtgatcgatcccgagccatgtcctgattcagatcaggaaccaaagtcgtccgataaaactcatacatcccctccttctcctgcacccgagcttctcggggggagttctgtttttcttttcccacccaagccaaaagatactcttatgatttcaagaacaccggaagtaacatgtgtggtagtcgatgtttctcacgaagatcctgaagtgaaatttaattggtatgtggatggagtggaagtgcataatgccaaaacaaaacctagagaagaacagtataatagtacatatcgcgtggtgagtgtgttaactgtccttcaccaggactggctcaatgggaaagaatacaagtgtaaagtttccaacaaggcacttcctgcccccatcgaaaaaactatttcaaaagctaagggacagcctcgggaaccccaggtatacactctgcccccatccagagatgaactgactaaaaatcaggtttccctgacatgtcttgtgaaagggttttatccttccgatatagccgtcgaatgggaatccaatgggcagcctgaaaacaactataaaacaacacccccagtactggacagtgatggatcctttttcctatattccaagctgactgtagataaaagtaggtggcagcagggaaacgtattctcctgctctgtgatgcacgaagctttacataaccattatacacagaagagtctgtctctctccccagggaaa

SEQ ID NO: 153912 - DNA, 1149 bp, Artificial Sequence
  derived and/or modified sequence
atgggagtgctgctgacccagcgcaccctgctgtcactcgttctggctcttctcttcccgtccatggcctccatggccatgcacgtggcccagcctgccgtcgttctggcttcatccaggggtatcgcctcgttcgtctgtgaatacgcaagcccgggtaaagctactgaggtgcgcgtgaccgtgttgagacaagctgacagccaggtgaccgaggtgtgcgccgcaacttacatgatgggaaatgaattgaccttcctcgacgactcgatctgcaccggaactagctctggcaaccaggtgaacctgactatccaagggctgcgggctatggacaccggtctgtacatctgcaaagtggaacttatgtacccgcccccttattacctggggattggcaatggcactcagatctacgtgatcgatcctgagccctgtccagactccgatcaggaacctaaaagctcagataagactcatactagccccccgtcgcctgcccccgaattgctgggtggatccagcgtctttttgttcccgcctaaaccgaaagacactcttatgatcagcagaactccagaggtgacttgcgtggtcgtggacgtctcgcacgaggacccggaagtcaagttcaactggtacgtcgatggggtggaggtccataacgccaagaccaagccaagggaggaacaatacaactccacttaccgggtggtgtccgtgctgaccgtgctgcatcaagactggctgaacgggaaagagtacaaatgcaaagtgtcgaacaaggcattgccagcgccaatcgaaaagaccatctcgaaagcaaaaggccaaccgagagaaccgcaagtgtacaccctgcccccaagccgcgacgaactcaccaagaaccaggtttcgctcacttgcttggtgaagggattctacccgtccgatattgcggtggagtgggagtcgaacggacagcctgaaaacaattacaagactaccccaccggtgctcgactctgacggctccttcttcctgtactcgaagctgactgtggacaagtcgcgctggcagcaaggaaacgtgttctcgtgctcggtgatgcacgaggccctccacaatcattatacccagaagtcactctcgctgagccctgggaag

SEQ ID NO: 153913 - DNA, 1149 bp, Artificial Sequence
  derived and/or modified sequence
atgggcgtgttgctgacccaacgtaccctgctgagcctggtcctggcactgctctttccgagcatggccagcatggccatgcacgtggctcaaccggccgtggtgttggcgagtagcagaggaatcgcctcgttcgtctgtgaatacgctagccctggtaaagcaaccgaggtgcgtgttacggtcctgcgccaggctgattcccaggtcaccgaagtatgtgccgcaacctacatgatgggcaatgaactgacctttctggatgattctatctgcaccggtaccagttccggtaaccaagtcaacctgacgattcaaggtctgcgcgccatggacactgggttatacatatgcaaagtcgagctgatgtaccctccgccctattacttgggtatcggtaatggcacgcagatctacgtcatcgatccggagccgtgccctgactccgaccaggagcccaagagcagcgataaaactcacacaagcccaccgagccctgctcccgagctgctgggtggcagctctgtgttcctgtttccgcctaagcctaaggatactctgatgattagcaggactcctgaggtaacgtgcgtggttgtggatgttagccacgaagatcctgaggttaaattcaattggtacgtggatggggtcgaagtccataacgcgaaaactaagccacgcgaggagcagtacaatagtacctatcgggtggtgagcgtcctgactgtgctgcaccaggattggctcaacggtaaggaatacaagtgcaaggtgtcaaataaggccctaccggccccgattgaaaagaccatcagcaaggctaaaggccagccacgcgagccacaggtgtatactctcccgccaagtagagacgagttgaccaagaaccaggtctcgctgacctgtctggtgaaaggattttatccgtctgatatagccgtggaatgggagagcaatggtcaaccagagaataactacaaaactactcctcctgttctggacagcgacggtagcttttttttgtactctaagctgacagtggacaagtcgcggtggcagcaaggcaatgttttttcatgtagcgtcatgcacgaggcgttgcataatcactacacccagaaaagcctgagcctgtctcctggtaag

SEQ ID NO: 153914 - DNA, 1149 bp, Artificial Sequence
  derived and/or modified sequence
atgggggtgctgttgacgcagagaacgctgttgtcgcttgttcttgccctgctgttcccgtcgatggcctcgatggccatgcacgtggcccagccggcggttgtgttggcaagctcgcgcggaatcgccagcttcgtctgcgaatacgcgtccccagggaaggctactgaggtgagagtgactgtgctcagacaggcggattcccaagtgactgaagtgtgcgccgctacttacatgatggggaacgagctgactttcctcgacgactcgatctgtactggaacctcatccggcaatcaagtgaacctcaccatccaaggactgcgggccatggacactggtctttacatttgtaaggtcgaactgatgtacccgccgccctactacctgggaatcgggaacggaacccagatctacgtcatcgatcctgagccctgcccggatagcgaccaagaaccaaaatcttccgacaaaacgcacacttcgcctccttcgcctgcccctgaactgctgggaggaagcagcgtgttcctttttccacccaagccaaaggatactttgatgatctccaggactccagaagtgacttgcgtggtggtggatgtctcgcacgaggatccggaagtcaagttcaactggtacgtggacggagtggaagtgcacaatgcaaagaccaagccgagggaagagcagtataactcgacctaccgggtggtgtccgtccttaccgtcctgcaccaggactggctgaatggcaaggaatacaaatgcaaggtatcgaacaaagcactgccagctcctatcgaaaagactatctcgaaagctaagggacaaccccgcgagcctcaggtgtacaccctgccgccatcgagagacgagctcaccaagaatcaggtgtcactgacttgcttggtgaaaggcttttacccatcggacatcgccgtcgaatgggagtcgaatggccaaccagagaataactacaagaccacgcctccggtgctggattcggatggctccttctttctctactcaaagttgactgtggacaagagcagatggcaacaaggaaatgtgttctcatgttcggtgatgcatgaagcccttcacaatcattacacccaaaagagcctcagcctgtcaccgggaaag

SEQ ID NO: 153915 - DNA, 1149 bp, Artificial Sequence
  derived and/or modified sequence
atgggagtgctgttgacgcagcggacattgctttctctagtgctggctctgttattccctagcatggcaagcatggccatgcatgtcgctcagccggcggtggtcctggccagcagtaggggaatcgcaagtttcgtatgtgaatacgcatcccctgggaaagcaaccgaagtccgggtgaccgtgttacgacaggccgactcccaagttaccgaggtatgtgcagccacctacatgatggggaatgagctaactttcctagacgactctatttgcactggaacgagctccggcaaccaggtgaatctgacaatacagggtttgagggcaatggataccggtctatacatctgcaaggttgagctgatgtatccccctccttactacctcggaatcggaaacgggactcaaatctacgtaattgaccctgagccttgtccggactcggatcaggaaccaaagagctcagataagacccatacttcacctcccagtcccgcgcctgagctcctcggaggctcatcagtgttccttttcccccccaaacccaaagataccctgatgatttcccgtacgcctgaagtaacctgcgtcgtagtcgacgtgagtcatgaagaccctgaggttaagtttaactggtatgttgatggcgtcgaggtacacaacgctaaaaccaagccaagagaagagcagtataactccacctatcgcgtggtgtccgtcctgacagtgcttcaccaggactggctcaatgggaaagaatacaaatgtaaggtatccaataaagccttgccagcccccatagaaaagacaatttcaaaggccaaagggcagccccgcgaaccccaggtgtataccctgcctccatcacgtgatgagctcactaaaaatcaggtgtccttaacatgcctcgttaaaggtttctatccctcagacattgcggtggagtgggaaagcaacggacagcctgaaaataactacaagaccacacctcccgtgctcgattccgacggctccttctttttgtacagtaaactgacagtagacaagtcaaggtggcagcaaggcaatgtgttttcctgttccgtgatgcacgaggccctgcacaaccactatacccagaaatccttgtctttgagtcccggcaag

SEQ ID NO: 153916 - DNA, 1149 bp, Artificial Sequence
  derived and/or modified sequence
atgggggtgcttcttacgcaacgcaccctcctgtcgttggtgcttgcacttctcttcccatcgatggcgtcgatggctatgcatgtggcgcaacctgcagtcgtgcttgcatcatcgcgtggcatagcatcatttgtgtgtgaatatgcatccccgggaaaggccactgaggtcagagtgacggtgctccgtcaagctgattcacaggtgactgaggtgtgcgcggccacctatatgatgggtaacgaactgactttcttggatgatagcatctgtaccgggaccagctctggtaaccaagtgaacctgactattcaaggtctgcgtgccatggatactggtctgtacatctgcaaagtggaactgatgtacccgccaccttactaccttggaatcggtaacggtactcagatatacgtgatcgatccagagccatgtcctgactcggaccaagaaccaaagagctcagataagacccataccagcccgccttcgccagcaccagaactgctcggaggatcgtccgtctttctgttcccccctaagccaaaggatacccttatgatttccagaactccggaagtgacgtgtgtggtcgtggatgtgtcccatgaagatcccgaagtcaagtttaactggtacgtggatggtgtcgaagttcacaatgccaagactaagccccgggaggagcagtacaacagcacttacagagtcgtgtccgtgctgactgtcctccatcaggattggctcaatggtaaggagtacaagtgtaaggtcagcaataaggcactgcctgcaccaattgaaaagaccatctcgaaggcaaaaggccagcctagagaaccgcaagtgtacactctgcccccaagcagagacgaactcaccaagaaccaggtgtcccttacttgccttgtcaagggtttttacccatcggatattgcggtggaatgggagtcgaatggtcagcccgagaataactataagaccactcctcctgtgcttgattccgacggatcgttttttctgtacagcaagctgaccgtcgacaagtctcgctggcagcaaggcaacgtgttttcgtgcagcgtgatgcatgaagcactgcataatcactacactcagaagtctctgagcctttcccccggtaaa

SEQ ID NO: 153917 - DNA, 1149 bp, Artificial Sequence
  derived and/or modified sequence
atgggagtgctgttgacccagcgtaccctgcttagcctggtgctggcactgctgtttccaagcatggcatcaatggccatgcatgtggcgcagcccgcggttgtgctggcaagctcgcggggaatagcgagctttgtttgtgaatacgcctcacccggaaaagccacggaggtgagggtgactgtcctccgacaagccgattcccaagtgaccgaagtgtgtgcggccacttacatgatgggtaacgaactgacttttctggatgactcgatttgcacgggtacgtcctccgggaaccaagtgaacttgactatccagggattgagggcaatggatactggtctttacatctgtaaggtggaattgatgtaccctccaccctactatcttgggatcggcaacggaacccagatttacgtcattgatcccgaaccttgccccgattcggatcaagaaccaaagtcctcagacaagacccataccagcccacccagccccgccccagaattgctgggaggctcctccgtgtttctgttcccacctaagccgaaggataccctgatgatttcccggacgcctgaagtcacctgtgtggtcgtggatgtgtcccatgaagatcctgaggtgaagtttaactggtacgtggatggcgtggaggtccataacgccaagaccaaacctagagaggaacagtacaacagcacctatagagtggtgagcgtgctgactgtgcttcatcaagattggctgaatggaaaagaatacaaatgtaaagtctcgaacaaggctcttccagctccaattgaaaagaccatctccaaggcaaagggtcagccaagagaaccgcaagtctacaccctgcctccatcccgggacgaacttaccaagaatcaagtctccttgacttgtctggtcaagggtttctacccttccgatatcgcagttgaatgggagtcaaacgggcagcctgaaaacaattacaagactacccctcctgtgcttgattcagacggttcattctttctttactcgaaactgacggtggataagtctaggtggcaacaaggaaacgtgttctcgtgtagcgtgatgcatgaggcgctgcataatcattacacccaaaaatcactctccctctccccaggaaag

SEQ ID NO: 153918 - DNA, 1149 bp, Artificial Sequence
  derived and/or modified sequence
atgggggtgctgctcacacagagaaccctgttatctctggtcctggccctcttgtttcctagcatggcctccatggcaatgcatgtggctcaaccggctgtcgtgctggcttccagtcgaggcatcgcctcttttgtgtgcgagtatgcctctccgggcaaggctactgaagtgcgggtaaccgttcttaggcaggccgactcccaggttacagaggtgtgcgccgctacgtatatgatgggaaacgagctgacattcctagatgactcgatctgcactggaacctcaagtggaaatcaggtgaacctgactatccagggcctccgagccatggataccgggctgtacatctgcaaggtagagctcatgtatcctccaccatactacctgggaatcggcaatggaacgcagatttacgtcatcgatccggagccctgcccggattccgatcaggagccaaaatccagcgacaagacacacactagccctccaagccccgcgcccgagttgctcggaggctcgagtgtttttctgttcccccccaaacccaaagatactctaatgattagcagaacccccgaagtcacatgcgtcgttgtcgacgtgagtcatgaggacccggaggttaaatttaactggtacgtggatggcgtagaggtgcataacgctaaaaccaaaccacgggaagagcagtataactctacctaccgagtggtgtccgtcctgaccgtgcttcaccaagactggttgaacggaaaagaatacaaatgtaaagtgtctaataaagctttgccagctcctatcgaaaagacaatctcaaaagcgaagggacaaccacgggagccacaggtctacaccctgccacccagtcgagacgagctgacaaaaaatcaggtgtcactcacatgcttggtcaaaggcttctacccatccgacatcgccgttgagtgggaatctaatgggcaaccggagaataactacaagaccaccccacctgtgctggactctgacggctctttcttcttgtactccaagctgacagttgataagagcaggtggcaacagggcaatgtgttctcgtgcagcgtcatgcacgaagctttgcacaaccactatacacagaagtctctgtctctcagtcctggcaag

SEQ ID NO: 153919 - DNA, 1149 bp, Artificial Sequence
  derived and/or modified sequence
atgggggtcctgttgacgcagcggacgttgctatccctggtcttggccctcctattcccctccatggcttccatggcgatgcacgtggcgcagcctgctgtcgttttggctagttctagaggcatcgcttcctttgtgtgtgagtatgctagcccaggaaaggccaccgaggtgcgagtgactgtcctccggcaagcggattctcaggtaacagaggtgtgcgccgcgacgtatatgatggggaacgagttgacatttctcgacgactccatctgtacagggaccagctcagggaaccaggtgaaccttaccatccagggcttgagagccatggacaccggactgtatatttgcaaggtcgagctgatgtatcctcctccttattatctgggcattggaaacggtacacagatctacgtgatagaccccgagccctgcccagattcggatcaggagcctaagtcttctgataaaacccacacctcgccaccatctcccgcccctgagctactgggcggcagttcagtctttctgttcccccctaagcccaaggatacgctcatgattagcagaactcctgaggttacctgtgttgtcgtagacgtctcccacgaagatcccgaggttaagtttaactggtacgtcgacggagtggaggtacataacgcaaaaacgaaaccgagggaagagcagtataattcaacttatagagtggtgtcggtgcttacggtgcttcaccaggactggctgaatgggaaagagtacaagtgtaaagtgagcaacaaggccttgcctgcccctatcgagaaaacgatcagcaaagcgaaaggccagccaagggaaccccaagtgtacacacttcccccaagccgggacgagttgaccaagaaccaggtgtctctgacatgcctggtcaagggcttctatccttcagatattgctgttgagtgggaatctaacggacagcctgagaacaactataagacaactccccccgtgctagatagcgacggaagctttttcctctattccaagctgacagttgataagagcagatggcagcagggaaacgtgttcagctgcagtgtgatgcacgaagcgcttcataaccattatacccagaaatcgctcagtctgtcgcctggcaag

SEQ ID NO: 153920 - DNA, 1149 bp, Artificial Sequence
  derived and/or modified sequence
atgggagttttgcttacccagagaactctgctgtcactagtgttggcgctgctatttccttctatggccagtatggcgatgcacgtggcccagcctgccgtagtactggcatcttccagaggcatcgccagttttgtctgtgaatacgcctcccctgggaaggctaccgaggttcgagtgacagtcctgcgtcaggccgattcacaagtgacggaggtgtgtgcggctacctatatgatgggcaacgagctgacgttccttgatgatagtatctgcaccggaacttcttcagggaatcaggtcaaccttacaatacaaggcctgcgtgctatggatacaggcctgtacatctgtaaagtcgagctaatgtatcctcctccctactacctcgggatcggaaacggaactcaaatctacgtgattgatccagaaccctgccctgattccgaccaagagccaaaaagtagcgataagacacatacctcccctcctagccctgcccccgaactacttggggggagttcagtgttcctgtttccccccaaacccaaggacactctcatgattagtcgcacacctgaggtgacctgtgtggtggttgacgtgtctcatgaggaccccgaggtgaagttcaattggtatgtggatggagtggaggtccataatgcaaagacaaagcctagagaagaacaatacaactccacttatcgggttgtgtctgtgctgaccgtgttgcaccaggattggcttaatggtaaggaatataagtgtaaagtctccaacaaagccttacccgcccctatcgaaaagactatctccaaggctaaagggcaaccacgggaaccgcaggtctacaccctcccaccatcccgcgatgaactgacgaaaaaccaggtgtccctaacgtgtctcgtgaaggggttttaccctagcgatatcgctgtcgaatgggaatcaaatgggcagcccgaaaacaattacaaaactactcctcccgtcctggatagcgacggctcttttttcttgtacagtaaactgactgttgacaagtcccggtggcagcagggcaacgtgtttagttgtagcgtgatgcacgaggccctccataaccattatacacagaagagcctctctctgagcccaggcaag

SEQ ID NO: 153921 - DNA, 1149 bp, Artificial Sequence
  derived and/or modified sequence
atgggggtcctcctaacgcagcgtactttgctgtccctggttctcgctttgctctttccttctatggcgtcaatggcgatgcacgtcgcccagcccgcagtagtacttgcctcaagtagagggatcgccagtttcgtatgtgaatatgccagtcccggaaaagcaacagaggttagagttaccgtgctgagacaggccgattctcaagtgacagaggtatgcgccgccacctacatgatgggcaacgagctcacattcttggatgattccatttgtacaggaacctccagcggtaaccaggtcaaccttaccatccaggggctgcgcgccatggacacaggcctttatatttgcaaggtcgagttgatgtatccaccaccatattatctgggcatcggtaatggcacccagatctacgtgatagaccctgagccctgccccgactctgaccaggaacccaaatcatccgataaaactcataccagcccaccatcgccagcgcccgagctgttggggggctcctcggtgttcctgtttcctccgaagcccaaggacactctaatgatctcgcggacccccgaagtgacctgcgtcgtggtggatgtctctcatgaggacccggaagtcaaatttaattggtatgtcgatggggttgaggttcacaatgccaaaactaaaccccgggaggaacagtataacagtacctatcgagtggttagcgttctgaccgttctccaccaggattggctgaatggcaaggagtacaagtgcaaagtgtcaaacaaagcgctacctgcccccattgaaaagacgatctccaaggccaagggccagccgagggagccacaggtgtacactttacccccaagccgcgacgaactgactaaaaaccaggtgtcactgacatgtctcgtgaagggattctatcccagcgatattgccgtggaatgggagtcaaacgggcaacccgagaacaattacaagaccacacctccagtgctggattccgacggctccttcttcctctattccaaactgaccgtggacaagagcaggtggcagcagggcaatgtcttcagctgctctgtgatgcacgaggcattacacaatcattacactcagaagtcactatctttgagccctgggaaa

SEQ ID NO: 153922 - DNA, 1149 bp, Artificial Sequence
  derived and/or modified sequence
atgggcgtgctgttgactcagcgaacattgctcagtcttgtgctcgcactgctctttccaagtatggcgtctatggcaatgcacgtggcccagccagccgtggtactggcctcctcccgaggtatcgcctccttcgtctgcgaatatgcatcccctgggaaggctactgaagtacgagttacagtcttgcgtcaggctgatagtcaggttactgaagtttgcgcagctacctatatgatgggaaatgaactgacgttcttggacgatagtatatgcaccggcacatcatctgggaaccaagtgaatctaacgattcagggcctcagagcaatggacaccgggctgtacatatgcaaggtggagttgatgtatccgccaccgtactatctgggaattggtaatggcacccagatatacgtgatcgatcccgagccgtgtccggatagtgatcaggaaccgaagagttctgacaaaacccacaccagtcccccctcccctgcccctgagctcctgggcggcagttctgtcttccttttccccccgaagcctaaggatacactcatgatcagccgaacaccagaagttacttgtgtggtggtcgatgtctcacatgaggatcccgaggttaagtttaactggtacgtggatggcgtggaggtgcataacgctaaaacaaaaccgcgagaagagcaatacaattctacctatagggtggtgtcagtgctgaccgtgctgcaccaggattggcttaatggaaaggagtacaagtgtaaagtttcaaataaggctctaccggccccaatagagaagaccatttccaaagccaaagggcagcccagggagccgcaggtttacactttgcccccttcacgcgatgagttgaccaagaaccaagtttccctgacctgccttgtgaaggggttttacccatctgatattgcagtcgaatgggagtcaaacgggcaacccgagaacaactataagaccacaccccccgtcctggactcagatgggtcattcttcctgtacagcaaactcaccgtggataagagtcgatggcagcagggcaacgtcttcagctgctccgtgatgcacgaggccctgcacaaccactacacacaaaaatcactctcactttctccagggaag

SEQ ID NO: 153923 - DNA, 1149 bp, Artificial Sequence
  derived and/or modified sequence
atgggtgtgctgttaacgcaaaggacactgttgtctctagtcttggccctcctctttcctagcatggcatcaatggctatgcacgttgcacagccggctgttgttcttgcatcgtctagagggattgcaagctttgtgtgcgaatacgcttcgccaggaaaagccacagaggtccgcgttactgtactacgtcaagcggatagtcaagtcactgaggtgtgtgctgcaacatatatgatgggaaacgaactcacatttcttgacgacagcatttgtactggaaccagttcaggaaaccaagttaatttaactatccaaggactgagagcaatggatacaggactgtatatttgcaaagtagagttgatgtatcctccaccatactaccttggaatcggaaatggaacacagatctatgtaatcgatcctgaaccatgtccagatagcgaccaagaaccaaaatcgtctgataaaacacatacctcgccccccagtccggcaccagagttgctgggcggatcatcagtgtttttattccccccaaaaccaaaagatacacttatgattagtagaacaccagaggtgacgtgcgtggtcgttgacgtatcacacgaagacccagaagtcaagttcaactggtatgttgatggagtcgaggttcataatgccaagacaaaaccacgcgaagagcagtataactcaacgtatagagttgtttctgtcctcacagttctgcatcaggattggttaaacggtaaagaatataaatgcaaagtcagcaacaaagcattgcctgctccaattgaaaagactatttctaaggcaaagggtcaaccacgtgagccacaggtttatacactcccaccatcacgcgatgagcttacgaaaaatcaggtttcgcttacatgcttggtgaaaggattttatccgtctgacatcgccgtggaatgggaaagtaacggacagccagagaataattataagacgactccaccagtgctcgattctgatggatcttttttcttatattcgaagcttactgtcgacaaatccagatggcaacaaggaaacgttttttcctgctcagtcatgcatgaagctctccacaatcattacactcaaaaatccctcagtttgtctcccgggaag

SEQ ID NO: 153924 - DNA, 1149 bp, Artificial Sequence
  derived and/or modified sequence
atgggagtattgctgacacagagaacacttctaagtctcgtgttggcccttctatttcctagtatggccagtatggcaatgcatgttgcacagccagcagtcgtcctggcctcatcaagaggaatcgcttcttttgtgtgcgaatatgcaagtccaggaaaagctactgaagtacgggtaactgtccttaggcaggctgattcccaggtcacagaagtgtgtgccgcaacatacatgatggggaacgaactcacattcctcgatgattcgatatgtactggaacgtcgtcagggaaccaagtcaatttaactatccaggggctccgggctatggatactgggctctatatatgcaaagtcgaactcatgtatccaccaccctactacctggggatagggaacggaacacagatctatgtaattgatccagaaccctgccccgattcagatcaggaacccaaatcatccgacaagacacatacgtctccaccttcccccgcaccagaacttctgggagggtcgtccgtctttctctttcctcctaaacccaaagatacattgatgatctccaggacacctgaagttacatgtgtggtcgtggatgtatcacatgaagatcccgaagtaaaatttaattggtatgtagatggagtcgaagttcacaacgccaagacaaaacctcgggaagagcagtataattctacttatagagtagtgagtgtgctaacagttttacatcaggattggctgaatggaaaagaatataaatgtaaagtaagtaacaaggctctccctgctcctattgagaaaacaatctcaaaagccaagggacagccacgcgaaccccaggtctatacactgccaccatcgagggatgaactcacaaaaaatcaggtgtctttaacttgcctcgtaaaagggttttacccctctgatatagcagtagaatgggaatcaaatgggcagccagaaaacaattataaaactacaccccccgttttagactctgatggatcattttttctgtatagtaagctaacagttgataagtcccggtggcagcaggggaacgtgttttcctgttctgttatgcacgaagctctccataatcattatactcagaagtcccttagtctatcacccggaaaa

SEQ ID NO: 153925 - DNA, 1149 bp, Artificial Sequence
  derived and/or modified sequence
atgggcgtgctgctcacgcagaggactcttctgtcactggttctggcccttctgtttccatctatggcttccatggcaatgcacgtggctcagccggcggtcgtgcttgcatcctccaggggaatcgcgtccttcgtgtgcgagtacgctagccctggaaaggccaccgaggtgagagtcactgtgctgaggcaagcggacagccaggtgacggaggtctgcgcggcaacctacatgatgggcaacgaactgacgtttttggacgactccatctgtaccggcacttcgtcggggaatcaggtcaacctcactatccaaggactgagagccatggataccggactgtacatttgcaaagtcgaacttatgtatcctccaccttattacctcggaattggaaatggaactcagatctacgtcatcgacccggagccatgcccagattctgaccaagagccgaagtctagcgacaaaacccacacttcgccaccgtcaccggcaccggagctcctcggaggttcgagcgttttcctgttcccgccgaagccgaaggacacccttatgatctcccgtactccggaagtgacctgcgtcgtggtggacgtgagccatgaagatccggaagtgaaattcaactggtacgtggacggtgtggaagtgcacaatgcaaagactaagccaagagaggaacaatacaactcaacgtaccgcgtggtgagcgtgctcactgtcctccatcaggactggcttaacggaaaggaatacaaatgtaaggtgtcgaataaggccctgccagccccgattgaaaagaccatctcaaaagccaagggccaaccgcgcgaaccccaggtctacactcttcctccgagccgcgatgaactgactaagaaccaggtatcactgacctgcctcgtcaaaggcttttacccaagcgatatagccgtggagtgggagtcgaacgggcagcctgagaataactacaagactactccgccggtcctggatagcgacggatcgttcttcctgtactcaaagttgaccgtggataagtcgagatggcaacaaggtaacgtgttcagctgctctgtgatgcacgaggcgctgcataaccactacactcagaaaagcctgtcgctgagcccgggcaag

SEQ ID NO: 153926 - DNA, 1149 bp, Artificial Sequence
  derived and/or modified sequence
atgggtgttcttcttacccaacgaaccctcctctccctggtccttgccctgctgttcccttcgatggcgtcaatggctatgcatgtggcccaacccgccgtggtcctggcaagcagccgaggaatagcatcgtttgtctgtgaatacgcttccccaggaaaggcaaccgaggtgcgggtcactgttcttcgccaagcggacagccaggtcactgaagtgtgcgcggccacgtacatgatgggaaacgagctcaccttcctggatgactcaatatgtaccggtacgagctcgggcaatcaggtaaaccttaccatccaaggacttagggcaatggataccggcctttacatttgtaaggtcgagctgatgtaccctccaccctactatctgggaatcggtaacggaactcaaatctacgtgattgatccagaaccctgtcctgattcggatcaggaaccgaaaagttcagacaagactcacacctcgccacctagcccagcacctgaactgctggggggctcaagcgtgttcctttttcctccaaaaccaaaggacacccttatgatcagtagaacccctgaggtgacgtgcgtcgtggtggacgtctcccacgaggaccccgaagtcaagttcaactggtacgtggatggcgtggaagtgcataacgcaaagactaagccaagagaggaacagtacaattccacgtatagagtggtcagtgtcctgactgtcctccatcaagactggctcaacggaaaggagtataagtgtaaggtgagcaataaagcacttccagcaccgatcgagaaaactatttcaaaggcaaaagggcagcccagggaaccgcaagtgtacactcttcccccctcacgagatgaactcactaagaaccaggtgtcgctgacttgtctggtgaagggattctatccttcagatattgcggtggagtgggaatccaacggtcagccagaaaacaattacaagacgacccctcctgtgctcgacagcgatggttcgtttttcctctactccaaacttactgttgataaatcccggtggcaacagggtaatgtgttttcctgctctgtcatgcacgaggcactccataatcattatactcaaaagtcgttgtcattgtcccctggcaag

SEQ ID NO: 153927 - DNA, 1149 bp, Artificial Sequence
  derived and/or modified sequence
atgggagttctcctgactcagaggaccctgctctccttagtcctggccctgctgttcccctccatggcatcaatggctatgcacgtggcgcagcccgccgtcgtcctggcttccagcagggggatcgcaagcttcgtttgtgagtacgcctcgccaggcaaggcgaccgaggtgagggtgacagtcctacgccaggcggacagccaggtgaccgaggtatgtgccgctacttacatgatgggaaacgagctgacctttctggatgattctatctgcaccggaacgtcctccggcaaccaggtcaatctaactatacaaggtttgagggccatggacacaggactgtacatatgcaaggtggagctaatgtatccgccaccatactacctggggataggcaacggaacccagatttatgtgattgatcccgaaccatgcccagacagtgatcaggagcccaagagcagcgataaaactcacacctctcccccctcacccgcccccgagctcctgggagggagttccgtgttcctcttccccccaaagccgaaggacacgctcatgatctcccgaacccctgaagtcacctgcgtcgtggtggatgtgagtcacgaggatccagaggttaaattcaactggtatgtcgacggagtggaggtccacaatgctaaaacgaagcctcgggaggaacaatacaactcaacgtatcgggtagtgtccgtgcttacggtcctacatcaggattggctaaacggaaaagagtataagtgtaaagtctcaaacaaggcactaccagctcccatcgaaaagactatctccaaggcaaagggccagcctcgcgagcctcaggtgtatacactgccgccctcacgagatgaacttactaagaaccaggtgtcactgacatgccttgtgaaaggattttatccatccgatattgcagtggaatgggagagcaacggccagcctgagaacaattacaaaaccacacccccagtgctggatagcgatggatctttttttttgtactcaaagctaaccgtggacaagagtcggtggcaacaaggcaatgtgttcagttgtagcgtaatgcatgaggccctgcacaatcactacactcagaaaagtctctctttgagtccagggaaa

SEQ ID NO: 153928 - DNA, 1149 bp, Artificial Sequence
  derived and/or modified sequence
atgggagtgcttcttactcagcgaacgcttctctcgttggtactggcacttctcttcccaagcatggcctccatggcaatgcacgttgcgcaaccagctgtcgtgctcgcatcgtcgcggggaattgcgtcctttgtttgcgaatacgccagccccggaaaagcaacggaagtgcgggtcactgtgctccgtcaagcagattcgcaagtcacggaagtgtgtgcagccacctacatgatgggtaacgagcttacttttctggatgattccatctgcaccggcacttcgtccggcaatcaggtgaaccttactatccaaggtctgcgcgccatggataccggactgtacatttgtaaggtcgaactcatgtacccaccaccttactaccttgggatcggaaacggaacgcaaatctacgtgatcgaccctgagccatgtcccgattcagaccaggaaccaaagtcgtctgataagacccatacctcacctccatcaccggcaccagagctgcttggtggctcctcagtctttctttttccaccaaagcctaaggataccctcatgatcagcagaaccccagaggttacgtgcgtggtggtcgatgtgtctcacgaggacccagaggtgaagttcaactggtacgtggatggtgtggaagtgcataatgctaagaccaaacccagggaggaacagtacaactcaacctaccgcgtggtttccgtgctgaccgtgcttcaccaggattggctcaatggcaaggaatacaagtgcaaggttagcaacaaagccctgccggcacccattgaaaagactatttccaaggcaaaaggtcaacctagggagccccaagtgtacacccttccccctagccgcgatgagctgaccaagaaccaagtgtcgcttacctgccttgtgaagggattttacccgagcgacattgcggtcgaatgggaatcaaacggtcagcctgagaataactacaagactacgcccccggtgctcgatagcgatggctccttttttctgtactcaaaacttactgtggataaaagccggtggcagcaaggtaacgtgttttcctgctcggtgatgcatgaggcattgcataatcattacacccagaaaagcctttccctgtcccccggaaag

SEQ ID NO: 153929 - DNA, 1149 bp, Artificial Sequence
  derived and/or modified sequence
atgggtgtgctgcttacacagaggacactactatctctagtcctagctttgctgttcccttcgatggctagtatggctatgcatgttgctcagcctgcagttgttctggctagttccaggggcattgcaagttttgtttgtgaatacgcctcccctggtaaggccaccgaggtgcgtgtgaccgttttgcgacaagccgacagccaagtgactgaagtttgcgctgcgacatacatgatggggaatgaactaacttttttggacgatagcatatgcactggtacaagctctggtaaccaagtaaacttaaccatacaaggcttgagagctatggatacgggcctatacatatgcaaggttgaattgatgtacccaccaccatattatctaggtatcggaaatggaacacagatctacgtgattgacccagagccttgtcctgactctgatcaggaacctaagagttctgacaaaacacatacttctcccccatctcccgctcccgagctccttggaggttcatccgtcttccttttccctcctaagccaaaggatacattgatgattagtagaacgccggaagttacctgtgttgtggttgacgtaagccacgaggatcctgaagttaagtttaattggtatgtggatggtgtggaagttcataatgctaagaccaaacctagggaagaacaatacaacagtacatatagggtcgttagcgttctcacagtcttgcatcaggactggctcaatgggaaggaatacaagtgcaaggtcagtaataaggcattacccgcgcctattgagaaaactatttcgaaggccaaagggcagccaagggagccccaagtttatacattgccaccaagccgtgatgagctgacgaaaaaccaagtttctctgacctgcttggttaagggtttttatcccagtgacatcgctgtcgaatgggagagcaacggacagccagaaaacaattacaaaactacaccaccagttttggattctgatggctccttcttcctctattctaagctgacagtcgacaaatcacgttggcaacaaggtaatgtgttctcttgtagtgtcatgcatgaggcacttcataatcattacacgcaaaagtctttgtccttgtcacctggaaaa

SEQ ID NO: 153930 - DNA, 1149 bp, Artificial Sequence
  derived and/or modified sequence
atgggagttctgctgacgcaacgaacgctgctgtcgctggtgttagcactgttattcccatctatggcttccatggccatgcatgtcgcacagcccgccgtggtacttgcctcgagccgaggaatcgctagctttgtgtgcgagtacgctagcccagggaaagccactgaagtgcgagtgacagtgcttcgacaggccgattctcaggtcactgaggtttgcgctgcaacctacatgatgggcaatgagttgacgttcctagacgactcaatctgtacgggtacaagtagcgggaaccaggtcaacctcacaatacaaggactccgtgccatggatacaggcctttatatctgtaaggtagaattgatgtatccacccccttattatctgggtataggcaatggaacgcagatttatgtcatcgaccccgagccttgccccgactcagatcaggaaccaaaaagttccgacaagactcataccagtccaccatcccccgcccctgagttgctggggggttctagcgtgttcctcttcccgccgaaacctaaggatacactgatgatttcccgaacacccgaagtcacttgtgttgtggttgacgtttcacacgaggacccagaggtcaagtttaactggtacgtagacggggtggaggtgcataacgcaaagacaaagcccagggaagaacagtacaactctacttacagggtggtgtctgtgctgaccgttctgcaccaagattggctgaacggcaaagagtacaagtgcaaggtatcaaacaaagccttgcccgcacccatagagaagacgatttcaaaggcgaagggtcagcccagagaacctcaagtatacacactacctccgagcagggatgagctaacgaaaaatcaggtgagtctgacttgcttggtcaaaggcttttacccctccgacattgcagtagaatgggagtctaatggacaacccgaaaacaactacaaaacaactcccccggttctggactcagatggctccttttttttgtactccaaattaacagtggataagtctcgctggcagcagggtaatgtgttctcgtgttcggtcatgcacgaagccctgcataatcattacactcagaagtctctttctttgtcccccggtaag

SEQ ID NO: 153931 - DNA, 1149 bp, Artificial Sequence
  derived and/or modified sequence
atgggcgttcttttgacccaaagaaccttgctctccctggtgctggcattgctttttccttcaatggcctccatggccatgcacgtagcccaaccggccgtggtgttggcatcatcacgcggtatcgcttccttcgtatgtgagtacgcatcaccgggtaaggccacggaagtcagagtgaccgtactcagacaggctgattctcaagttaccgaagtatgcgctgccacgtacatgatgggcaatgaactgacctttctggacgacagcatatgcaccggtaccagttccggtaaccaagtaaacctgaccatacaaggactcagagccatggataccggtttgtatatatgcaaggtagagctgatgtaccccccgccctactatcttggaatcggtaatggcactcagatttacgtgattgacccagagccatgcccagattctgatcaggagcccaagtcatctgataaaacacacacctcacccccctcaccagctccagaattgctgggcggctcctcagtattcctcttccctcccaagccgaaagacacactcatgatatctagaaccccagaggtcacctgtgttgtggtggacgttagccatgaagacccagaggtgaagttcaattggtacgtagacggagtcgaggttcataacgcgaagacaaaacccagagaagagcagtacaactccacatacagggtggtgtccgtccttacagtgctgcaccaggactggctgaatggaaaagagtacaaatgtaaggtttcaaacaaagctcttcctgcgcccatcgaaaagaccattagtaaggcaaagggccagccgagggagccccaggtgtatactttgcctccatcccgcgacgagctgacaaagaatcaagtttcactgacgtgcctcgtaaagggcttttatcccagcgatatcgcagtcgaatgggaaagcaacggtcagccggagaacaattataagaccacgcccccggtcctggattcagacggtagtttcttcctgtactcaaaactgacagtggacaagtccagatggcagcagggaaacgtcttctcctgtagcgtgatgcacgaggcactgcataatcattacacccagaaatctctgtctctgtcccccggaaag

SEQ ID NO: 153932 - DNA, 1149 bp, Artificial Sequence
  derived and/or modified sequence
atgggagtgctgcttactcaacgaacccttctgtccctggtcctcgccctgttgtttccatcaatggcttcgatggccatgcatgtggcacaacccgcagtggtgctggcgtcaagccgtggtatagcatccttcgtgtgtgagtacgcctcgccaggcaaggcgactgaagtgagagtcacggtcttgcgtcaggcagattcgcaggtgaccgaggtctgtgcagccacttatatgatgggtaatgaactgacttttctggatgactccatttgcaccggcacgagctccgggaaccaggtgaatcttactattcagggccttagagcaatggatactggcctttacatttgtaaggtggagcttatgtacccccctccgtactatctcggaataggtaacggaactcaaatctacgtgatcgatcctgagccttgccctgatagcgatcaagaacctaagtcatccgataagacgcataccagtcctccctcaccagcgccagagctcttgggaggatcttcagtttttctgttcccaccaaagccgaaggacaccctgatgatttcgcggaccccagaggttacttgtgtggttgtggatgtgtcgcatgaagatcccgaggtgaaattcaactggtacgtggacggggtggaagtgcacaatgcaaaaactaaacccagagaggagcagtacaattctacctaccgcgtggtgagtgtgttgaccgttcttcatcaagactggttgaacggaaaggaatacaaatgcaaggtgtcaaacaaggctttgccagccccaatcgaaaagactatttcgaaagcaaagggccagcctcgcgaaccgcaagtgtatacccttcctccttcgcgggacgagttgaccaagaatcaagtgagccttacctgtttggtgaaagggttctacccctcggacatcgctgtagaatgggagtccaacgggcagcccgaaaacaactacaagaccactcctcctgtcctggactcagatggttccttttttctctactccaagctgaccgtggataagagccgctggcaacaaggcaatgtattctcctgtagcgttatgcatgaagcacttcataaccactacacccaaaaatccctctcgctctcgccaggaaag

SEQ ID NO: 153933 - DNA, 1149 bp, Artificial Sequence
  derived and/or modified sequence
atgggagtgctgcttactcaacggactcttctgtcgctcgtgttggccttgctgtttccatcaatggccagcatggcaatgcatgtggcacaaccggcagtggtcctggcatcgagcagagggattgctagcttcgtgtgtgaatatgcgtccccgggaaaggcaactgaggtgcgcgtgactgtccttagacaagcggactcccaagtgaccgaggtgtgtgcggcgacgtacatgatgggaaacgagcttaccttccttgatgactccatatgcactggaactagcagcgggaaccaagtgaacttgaccattcaaggactccgtgcaatggacactggactgtacatctgtaaagtggagctcatgtacccacccccatactaccttggaatcggaaacggcacgcagatatacgtcattgatcccgaaccctgtcccgactccgaccaggaacctaagagcagcgacaagacccatacttcccctccttcgccggccccagaacttctgggaggctcgtcagtgttcctgtttcctcctaagccaaaggatactttgatgatctcccgtaccccagaagttacctgcgtggtcgtggatgtctctcacgaagatcccgaagtgaaattcaactggtatgtcgatggtgtggaggtgcataacgccaagacgaagcctcgggaagaacaatacaactcaacgtacagagtcgtctcggtccttaccgtgctgcatcaggactggctcaacgggaaggagtacaagtgcaaggtgtccaataaggctctccctgcaccaattgaaaaaactatctccaaagcaaagggacaaccacgagaaccacaagtgtacacccttccaccttcgagggacgaacttactaaaaaccaagtcagcctgacttgtctcgtgaaaggcttttacccgtccgatatcgcagtggagtgggaatccaatggacagccagagaataactacaagactacccctcccgtgcttgacagcgacggatcgttttttctgtactcgaaactgactgtggataagtcgaggtggcaacaaggaaacgtgttttcatgtagcgtcatgcatgaggcactgcataaccattacacccagaagagcctgtccctttcacctggtaaa

SEQ ID NO: 153934 - DNA, 1149 bp, Artificial Sequence
  derived and/or modified sequence
atgggcgtgcttcttacccagcgaaccctactttccttagtattggccctgctgtttccttcaatggctagtatggcaatgcacgtggcacaacctgccgtagtcttggccagttctcgaggtatcgccagtttcgtctgtgaatatgccagccccggaaaagctacggaagtccgagtgactgttcttagacaggctgacagtcaggtgacagaggtatgcgccgccacctatatgatgggaaacgaactcaccttcttggacgactctatttgcaccgggacttcaagcggaaatcaggtcaacctgaccattcagggcttgcgcgccatggataccggactctacatctgcaaagtggaactgatgtacccgcccccttactacctgggcataggcaacggcacgcagatctacgtgattgatccggagccatgccccgattctgaccaggaaccgaaatctagcgacaaaactcacacctccccaccatcgcccgctccggaactattggggggatcttccgtgttcctgttcccgcctaaaccaaaggataccctgatgatttcacgaacgcccgaggtcacctgtgtggtagtggatgtgtcacacgaggacccagaggttaagttcaattggtacgtcgatggagtagaggtacacaacgccaagacaaagcctagagaggagcagtataactccacataccgggttgtcagcgtgctcaccgtgctccaccaggattggcttaatggtaaagaatacaagtgtaaggtatccaataaggcgctccccgcacctatcgagaagactatcagcaaagccaaaggacaaccccgtgaacctcaggtgtatacactgcctccttccagagatgagctcaccaaaaaccaagtgagtttgacttgcctcgttaagggcttctacccatccgacatcgctgtggagtgggaaagtaatgggcagccagagaacaattacaagaccacccctccagtcctggattctgatgggtccttctttctgtattccaaactgacggtggataagtcaagatggcagcaaggaaatgtcttcagctgttctgttatgcacgaggccctgcacaaccactatacacaaaagtctttatcgttaagtcctggcaaa

SEQ ID NO: 153935 - DNA, 1149 bp, Artificial Sequence
  derived and/or modified sequence
atgggggttctgctgacacagagaacattattatctcttgttctcgctctactgtttccctccatggcatcaatggccatgcacgttgcccagcctgctgttgtgctggccagttctcggggcatcgcttcatttgtgtgcgagtatgccagtcccgggaaagccacagaggtgagggtgaccgtgctacgccaagccgattcccaggtgaccgaggtgtgcgctgctacatacatgatgggcaacgaactgaccttcctggacgacagcatctgcactggtacttcttctggaaaccaagtgaatctcactatccagggtctgcgcgcaatggatactggcctgtacatttgtaaggttgaactgatgtaccccccaccctactatctcgggattgggaacgggacccaaatctatgtgattgaccccgaaccgtgtccagactcagatcaggagcccaagtcttccgataagacacacaccagccctcccagtccagcccctgagctgctaggcggaagctctgtgtttctgtttccacctaaacctaaggacacactgatgatcagtcgcacccccgaggtgacctgcgtcgtggtagatgtatcccatgaggatcctgaggttaaattcaactggtacgtagatggcgttgaggtgcacaacgctaaaacaaagccaagagaagagcagtacaattccacataccgcgtggttagcgttctgaccgttctgcatcaggactggttaaacggaaaggagtacaagtgcaaggtctccaataaagcactgccagcacctattgaaaagacaataagcaaagcaaaaggccagccacgagaacctcaggtttatactctccctccttcaagagacgaactcacaaaaaatcaggtgagcctcacatgtctggttaaaggattctacccttccgatatcgctgtcgagtgggagtctaacgggcagccagagaacaattataagactaccccccccgttttagactccgacggctcatttttcctctattccaaactcaccgttgacaaatcccgctggcagcaaggcaacgtcttctcctgttccgtcatgcatgaagcactgcacaaccattatacccagaaaagcctgtctctgtcaccaggcaag

SEQ ID NO: 153936 - DNA, 1149 bp, Artificial Sequence
  derived and/or modified sequence
atgggggttctgctgacccaacggactctcctgtccctcgtcctggcgctcttgttcccttcgatggcctcaatggcgatgcacgtcgcccagcctgcggtggtcctggcctcgtcgcgcggaatcgcatctttcgtgtgcgaatacgcctccccgggaaaagccaccgaagtgcgcgtaaccgtgctcagacaggccgacagccaggtgaccgaggtctgcgccgccacttacatgatggggaacgagctgactttcctggacgacagcatctgtaccggaacgtcgtcgggaaaccaggtcaacctgactatccaggggctgcgggccatggacactggcctgtacatctgcaaggtggaactgatgtacccgccaccgtactacttgggaatcggaaacgggacccaaatctatgtgatcgaccctgagccatgtccggattcggaccaggagccaaagagctcggataagactcacacttccccgccgtcgccggccccggagctgctgggaggaagctcggtgtttctgtttccaccgaagccaaaggacactctgatgatttcccgcactcctgaagtcacttgtgtggtggtcgacgtgtcgcacgaggacccggaggtgaaattcaactggtacgtggacggtgtcgaggtgcacaacgctaaaaccaagccaagagaggagcaatacaactcgacgtaccgcgtcgtgagcgtgctgaccgtgctccaccaggattggctgaacggtaaggaatacaagtgcaaggtgtccaataaggcccttcctgcgccgattgaaaagactatttcgaaggcgaagggacagccgcgggagccgcaggtgtacaccctccctccgtccagggatgagctcacgaagaaccaggtcagcctcacctgcctggtgaagggtttctacccctcagacatcgcagtcgaatgggaatccaatggacagccggagaataactacaaaactaccccacccgtgctcgactccgacggatccttctttctctactcgaaactcaccgtggataagtcaagatggcaacagggcaacgtgttctcatgctcggtcatgcatgaggccctgcataaccattacactcaaaagtcgctgagcctgtcaccaggaaag

SEQ ID NO: 153937 - DNA, 1149 bp, Artificial Sequence
  derived and/or modified sequence
atgggtgtattactcacccaaagaactttgctttccctcgtcctggccttactttttcctagtatggcctctatggcaatgcacgtggctcaaccagcagtggtacttgctagctctcgggggattgcctctttcgtctgcgagtatgcttcacctggaaaagcaaccgaagttagggtgaccgtattgagacaagctgactcccaagttacagaggtttgtgctgcaacctacatgatgggaaatgagcttacatttctagatgacagcatatgcaccgggaccagcagcggaaaccaagtgaacctgaccatccaaggattgagggccatggacacaggactctatatttgtaaggtggaacttatgtacccacccccttactatctgggaatcggcaacgggacccagatctatgtcatcgaccctgaaccatgccctgattccgaccaagaaccaaagagcagcgacaagacgcacactagcccccctagcccagcacccgagttacttggaggatcgagtgtgtttttgtttccacccaagcccaaagatactctgatgatttcaaggacccccgaagttacttgcgtcgtagtcgatgtgagccatgaggatccagaagtgaagttcaactggtacgtcgatggtgtggaagtgcacaatgcaaaaactaaacctcgcgaagagcagtataatagcacatacagagtagtctccgtgcttactgtgctgcaccaagattggcttaacggcaaagagtataaatgtaaagtctcgaacaaagccctcccagctccaatcgaaaagaccatctctaaggccaaaggccagcccagggaacctcaggtgtatactttaccaccaagcagagacgagttgacaaagaatcaggtatcacttacttgcctggttaaaggtttctatccaagcgacatcgcggtggagtgggaaagcaacgggcaacctgagaacaactacaaaactacaccaccagtcctggacagcgatggttctttctttctgtacagcaagttgaccgtggataaaagcaggtggcagcaaggaaacgttttcagttgcagcgtgatgcatgaggcactgcacaaccactacacacagaagagcctctcccttagtcctgggaaa

SEQ ID NO: 153938 - DNA, 1149 bp, Artificial Sequence
  derived and/or modified sequence
atgggggtcctgctgacccagcgcacacttctgagcctggtgttagcgctgctgttcccgagcatggcgtcaatggcaatgcacgtggcgcagccagctgtcgtgctggctagttccagaggcatcgcttcgtttgtttgcgaatacgcatcccccggaaaggcgaccgaagtgcgagtaacagtgctgagacaggccgactcacaggtcaccgaagtttgcgctgctacctacatgatgggcaatgagcttaccttcttggacgacagtatttgtacaggaacatccagtggcaaccaggtcaatttgactatccagggtctgagggctatggataccgggctgtacatctgcaaggtggagctgatgtacccccctccatattacctcggtatcgggaatggcacacagatttatgtgatcgatcccgagccttgtcctgatagtgaccaggagcccaagtcgagcgacaagacacacaccagtccacctagcccagctccagaactgttgggcggctcttctgtgttcctcttcccccccaaaccgaaagatacgctgatgatctcccggacaccagaggtgacatgcgtcgtcgttgacgtcagccacgaagacccggaggttaaattcaattggtacgttgatggagttgaggtgcacaacgcgaaaacaaaacctagggaggaacagtacaactctacataccgagtggtgtccgtgctgaccgtcctgcaccaggattggctgaacgggaaggaatataagtgtaaggtgtcgaataaggctttgcccgctccaatcgaaaaaactatttcaaaggccaaagggcagccaagagaacctcaagtttataccttgccaccttcacgagacgagctgactaagaaccaggtaagcttgacatgcctggtcaagggattctacccatctgatattgctgtggaatgggagtctaacggtcagcccgagaacaattataaaaccacccccccggtgctagatagtgatggcagtttttttttgtactctaagctcaccgtcgacaagtcaaggtggcagcagggtaatgtattctcctgtagcgtgatgcatgaagctcttcacaaccactacacccagaaatccttgtctctgtctcccggaaag

SEQ ID NO: 153939 - DNA, 1149 bp, Artificial Sequence
  derived and/or modified sequence
atgggcgttctgctcactcagcggacgctgctgtcacttgtactggctctgctctttccatcgatggcgtctatggcgatgcacgtagcgcaaccggccgtagtgttggccagcagtcggggcatcgcctcattcgtgtgcgagtatgcctcgccgggcaaagccactgaagtgagagtcaccgtgctgagacaggctgactcacaggtgactgaagtttgtgcagccacctatatgatgggcaacgaactgacatttttggatgacagcatctgtaccgggaccagctccgggaatcaggtgaaccttactatccaggggctgcgggccatggatacaggcctctatatttgtaaagttgagttgatgtacccacccccttactacctcgggattggaaatggtacacagatttatgtgatcgatccggaaccctgccccgactccgatcaggagccgaagagctccgacaagacccacacaagcccccccagccccgcccccgagctgttgggtggttctagtgtgttcctgttcccccccaagccgaaggacacgcttatgatctcccgcactcctgaagttacatgtgttgttgtggacgtgtcccacgaagacccagaggtcaagttcaattggtacgtggacggggttgaagtgcacaatgccaaaaccaaaccacgcgaggaacaatataacagcacgtaccgggtggtcagcgttctcacggtcttgcatcaggactggctgaacgggaaagaatacaagtgcaaagtttctaataaggcactgcctgcgccgatcgagaaaacaatttctaaggccaaaggacagccaagagaacctcaggtttacaccttgcctccatccagggacgaactgaccaaaaaccaagtatctctcacttgcttagtgaaaggattctatccctcagacattgctgttgagtgggagtctaacggacagcccgaaaacaattacaaaaccacccccccagtcttagactctgacggcagcttcttcttatattcaaagctgacagtcgataaaagcaggtggcagcagggtaatgtcttttcatgttcggttatgcacgaggccctgcacaaccattatacccagaaaagtctgagcttatccccgggtaag

SEQ ID NO: 153940 - DNA, 1149 bp, Artificial Sequence
  derived and/or modified sequence
atgggcgtgttgctgactcagagaaccctgttgagtctggtgctggcccttctttttcctagcatggcaagtatggccatgcacgttgcacagcctgctgtggtgctggctagctcaaggggaatcgcttccttcgtctgcgaatacgcatctcctgggaaggccaccgaggtccgcgtaacagtgctgcgacaggcagactctcaggtcacggaggtgtgcgccgccacttatatgatgggcaatgaactgacttttctggacgattctatctgtaccggaacttctagtggaaatcaggtgaacttgaccattcagggcctccgggcaatggacacggggctctatatttgcaaggtggaactgatgtaccccccaccctattacttgggcattggcaatggcacacagatttatgtcatcgaccccgaaccctgccctgattcagaccaagagccaaaatctagcgataagacacacacgagtccccccagtcccgctccagagcttctgggggggagcagcgtctttttgttccccccgaaacctaaggatacactgatgatcagcagaactccggaggtgacttgtgtggttgtcgatgtgtctcatgaggatccagaggtcaagttcaactggtatgtcgatggagtagaggtgcacaacgctaagaccaagcccagagaggagcaatacaactccacataccgagtagtctctgtgttgaccgtgctccatcaggactggcttaacgggaaagagtataagtgcaaggttagtaacaaggctcttccagctcctattgaaaaaaccatctctaaagcaaaaggtcaacctagagagccgcaggtctacacactccctcccagtcgggatgagctcaccaaaaatcaggtcagtcttacttgtctggttaaaggcttttacccgtccgacattgccgttgagtgggaatctaatggtcaaccggagaataattacaagaccactcctccagtcctcgactcagacgggtcctttttcctgtacagcaagttgactgtagataaaagccgatggcagcaaggtaacgtattcagctgctccgttatgcacgaggcccttcacaaccattatactcagaaatctctgtcactgtcaccaggtaaa

SEQ ID NO: 153941 - DNA, 1149 bp, Artificial Sequence
  derived and/or modified sequence
atgggtgtcttgcttactcaacgtacgcttttgtctctcgttctggcgttactgtttcctagcatggctagcatggctatgcatgttgcgcaacctgcagttgtcttagcgtccagccgtggtatcgcatcgtttgtctgtgaatatgcgtcgcccggcaaagccacagaggtgagggtcacggttctgcgccaagctgattcccaagttactgaagtgtgtgcagcgacatatatgatgggaaatgagctgacgtttttagatgacagcatctgcaccggtacatcctccggcaatcaggttaatctaacgattcaaggtcttagagcgatggatacaggcctgtatatctgcaaagtcgaactcatgtacccgccgccttattatcttggtatcggcaatggcacacaaatctacgtgatagatccggaaccatgccctgacagcgatcaagaacctaaaagtagtgataagacacatacaagccccccgtcaccagcgccagaattgcttggcggctctagcgtgtttcttttcccacctaaaccgaaagatacattgatgatctcgcgcacacccgaagttacatgcgtagttgttgacgtgtctcatgaagatccagaagtaaagttcaattggtacgttgatggcgtagaagtccataacgctaaaacgaaaccaagagaagaacaatataattcaacttacagagttgttagcgtgctcacagtgctgcatcaggattggctgaatggtaaagaatacaagtgcaaagtctcaaacaaagctcttcctgctcccattgaaaaaacgatttcgaaggccaaaggccaaccccgtgagccgcaagtatacacactcccgccatctagagatgaactgacaaaaaaccaagtaagcctgacctgtttagtgaaaggattttacccgtcagatattgcagtggaatgggaaagcaatggccaaccggagaacaactataaaacaactccgcctgtgttggattcggatggaagcttttttttgtattctaagttaacggtcgataaaagcagatggcaacaaggtaatgttttttcctgttctgtgatgcacgaggcactacataatcattatacacaaaaaagtctgtcgctgtcgccgggtaaa

SEQ ID NO: 153942 - DNA, 1149 bp, Artificial Sequence
  derived and/or modified sequence
atgggagtcttgctcactcagaggaccctcctgtcgctggtcctcgctcttctctttccgtctatggcaagcatggcaatgcatgtcgcccaaccggcagtagtgttggcaagctccagaggcatcgcctcgtttgtttgcgaatacgcatcgccaggcaaggccactgaagtgagagtgacggtgctccgccaagccgacagccaggtgactgaagtgtgcgccgcgacctacatgatggggaacgaattgaccttcctggatgacagcatctgtaccggaacgtcgtccgggaaccaggtcaatctgaccatccagggacttcgcgccatggataccgggctctacatttgcaaagtggagctgatgtaccctccaccatactacctgggcatcggaaacggaacccaaatctacgtgattgatccggagccctgcccagattcagatcaagaaccgaagagctctgataagactcatacctccccgccctccccagcgccggaactgctgggaggctcgtccgtgtttctgttcccaccgaagccgaaggataccctcatgatctcccgcactccagaggtgacttgtgtggtcgtggatgtctcccacgaagatccggaagtcaaattcaattggtacgtggacggggtcgaagtccacaacgccaaaaccaagccgagagaggagcagtacaactcgacctacagggtcgtgtccgtgttgaccgtgctgcatcaggactggctgaacggcaaagagtacaagtgtaaggtatccaacaaggccctgccagccccgatcgaaaagactatcagcaaagcgaagggtcagccgcgggaaccccaggtgtacactctgccaccttcgcgggacgaactgactaagaatcaagtctccctgacctgtctggtgaaggggttctaccctagcgatatcgccgtggagtgggagtcgaatggccagccagagaataactacaagaccacccctcctgtcctggactcagatggcagcttcttcctctactcaaagctgaccgtcgacaagagccgctggcaacagggaaacgttttcagctgctcagtcatgcacgaagcgctgcataaccattacacccagaagtcgctctcgctttcgccgggtaag

SEQ ID NO: 153943 - DNA, 1149 bp, Artificial Sequence
  derived and/or modified sequence
atgggtgtgctgctaacccagaggaccctgctctccctggtgctggcactcctctttccaagcatggcatccatggcaatgcatgtagcccagcctgcagtagtcctggctagcagcaggggaatagcttcattcgtttgcgagtatgccagtccaggtaaggcaaccgaagttagagtgactgtgctgagacaggctgactcacaggtgacggaagtgtgtgccgctacatacatgatgggcaatgagttgacgtttctggacgatagtatctgcacagggacatcatccggcaatcaggtgaacctcactatacagggtctgagagccatggataccggtttgtatatttgtaaggtggaactcatgtatccccccccttactatctggggattggtaacgggactcagatctatgttatcgatcccgagccttgccccgattcggatcaggaaccaaaatcttcggacaaaacccatacctctcccccctctcccgcacctgaactgctcggcggcagcagcgtattcctctttccccctaagcctaaagatactctgatgatcagccggactcccgaggtgacttgcgttgtggtggatgtatcccatgaggaccccgaggtaaaattcaactggtatgtcgacggggtggaggtgcacaacgccaaaacgaagccacgggaggaacagtacaacagcacttaccgggtggtttcggtgctcactgtcctgcatcaggattggctaaacgggaaagaatacaaatgtaaggtgagtaataaggcactccctgcgcctattgagaagaccatctccaaggccaagggccaaccacgcgagcctcaggtgtacactctgcctccaagccgcgacgagctaaccaaaaatcaagtgtcgctgacatgcttggttaaaggattctatccgtccgacatagcagtcgagtgggaaagcaacggtcagcctgaaaacaattacaagaccacccctccagtgctggatagtgacggaagtttctttctgtacagcaagttaacggttgacaaaagccgatggcagcaggggaacgtgttttcctgtagtgtgatgcacgaagccttgcataatcattatacccaaaagtctctgtcactgagtccagggaag

SEQ ID NO: 153944 - DNA, 1149 bp, Artificial Sequence
  derived and/or modified sequence
atgggagtgctgctgactcaaaggacgcttcttagcctggtcctggcgcttctctttccctcgatggcctccatggctatgcatgtggcccagcctgcggtggtgcttgcctcctcgaggggcattgcatcatttgtctgcgagtacgcatcgcctggaaaggcaaccgaagtgcgggtcacggtgctcagacaggcggactcgcaggtcactgaagtgtgcgcagcaacctacatgatgggtaatgaattgactttcctggatgattcaatctgtactggtacctcgagcggaaatcaagtgaatcttaccatccagggactgagagccatggataccggtctgtacatttgtaaagttgaacttatgtacccacctccctactacttgggtattggcaatggaactcaaatctacgtgatcgacccagaaccttgcccagacagcgatcaagagcccaagtcctcagataagacccatacttccccaccatcgccagccccggaactgctgggaggttcctcagtgttcttgtttcctccaaagcctaaggacacccttatgatttcacgcactcctgaagtcacctgtgtggtggtggacgtcagccatgaagatcctgaagtgaagtttaactggtacgtggacggagtggaagtgcacaacgcaaagaccaagcctagggaggagcagtacaactcgacgtacagagtggtgtcggtgcttaccgtgcttcaccaggactggctcaacggaaaggaatacaaatgtaaggtcagtaataaggccctcccagcccctatcgagaaaactatctccaaggcgaaaggccagcctcgcgagccacaagtgtacaccctcccaccctcgagagatgaactgactaagaatcaggtatcccttacgtgcctggtcaaaggattttacccctccgacatcgcagtcgagtgggagtctaacgggcagccggagaataactacaagactacgcccccagtgctggattcggacggctcattctttctctatagcaagctgactgtcgacaagagccgctggcaacagggaaacgtgttctcctgctctgtgatgcatgaagcacttcataaccattacactcagaaatcgctttcactttcccctggcaag

SEQ ID NO: 153945 - DNA, 1149 bp, Artificial Sequence
  derived and/or modified sequence
atgggagttctgctcacccagcgcacactgctgagcctcgtcctggccctgctgttcccatctatggcatcgatggccatgcacgtagcgcaaccggctgtcgtgctggcctcctcgaggggtatcgcctcttttgtgtgcgaatacgcatcacctgggaaagccacagaggtgcgggtcaccgtccttcggcaagcggattcacaagtgaccgaggtctgcgccgccacatacatgatgggaaacgaacttaccttcctcgacgattccatctgcactggaacaagtagtgggaaccaggtgaacctgacaatacagggtctgcgggcgatggatacgggcctctacatatgtaaggttgagctgatgtaccccccaccctattacctaggtatcggaaatgggacacaaatatacgtcattgatccagagccttgtccagactcagatcaggaacctaagtcctccgacaaaacccacactagccccccttcccctgctccagagcttctgggggggtcctccgtgtttttgttcccccctaagccgaaggatacactcatgatctctcggacgcccgaagtgacatgtgtcgtggtagacgtgagccacgaggatccagaggtaaagttcaactggtacgtggatggggtggaagtacataatgctaagacaaaaccaagggaggaacagtacaacagcacataccgagtggtctcggtcctgacagtgctccaccaagattggctgaatggcaaggagtacaagtgcaaagtgtctaacaaagctcttcccgccccaattgagaagaccatttctaaagcgaagggacagccgcgagagcctcaggtctacaccttaccaccatctcgagatgagctgaccaagaaccaagtctcccttacctgtctcgtgaagggattttacccaagtgacattgcagttgagtgggaaagtaatgggcagcccgagaacaattacaaaaccactcccccagtgctggattccgatggtagtttcttcctgtactcgaagttgaccgtggataagtctcggtggcagcaaggaaacgtgtttagttgttctgtcatgcacgaagctctccataaccattacacacagaagagcctgagccttagccccgggaag

SEQ ID NO: 153946 - DNA, 1149 bp, Artificial Sequence
  derived and/or modified sequence
atgggtgtgctgctgacccagaggaccctcctgtccctcgtgctcgctttgctgtttcctagtatggcttctatggcgatgcatgtggcccaacccgcagtggttctcgcctcaagccgagggattgcctcttttgtgtgtgagtatgcctctccgggtaaggctactgaggtgagagttaccgtactgcggcaggccgattcccaggtgacagaagtttgtgcagctacttacatgatgggaaacgaattgacttttttggacgactctatttgtaccggcacatcttccgggaaccaggtgaacctcacaatacagggcctgagggcaatggatacaggtctgtacatctgtaaagtcgagctaatgtaccctccgccctactaccttggcattggaaatggcacccagatttacgtaatcgacccagaaccatgcccagatagcgatcaggaaccaaagagctctgataaaacccacacttctcccccaagcccagcgcctgagttgctaggtggaagctcagtctttctcttcccgcccaagcccaaggacacactaatgatttcaaggacaccagaagttacatgtgtagtcgttgacgtgtcccacgaggatcccgaagttaagtttaactggtatgtcgacggggttgaagtccataatgccaagacgaaaccacgagaggagcagtacaacagcacgtatcgggtcgtgtccgtgctcactgtcctgcaccaggattggctcaacgggaaggagtataaatgtaaagtatccaataaggccctccctgccccaatcgagaagaccatttccaaagctaaaggtcagccccgtgagcctcaggtctacacccttccgccatcaagggacgaactgacaaagaatcaggtttcccttacatgcctagtaaaaggcttctaccccagcgatatcgccgttgagtgggagtccaacggtcagcccgaaaacaattacaagacaacccctcctgtgctagactccgacgggagctttttcctgtacagtaaactgaccgttgataaaagccggtggcagcagggcaatgtcttttcctgctcagttatgcacgaggctctgcacaaccactacacccagaagtcgctttctctgtctcccggcaaa

SEQ ID NO: 153947 - DNA, 1149 bp, Artificial Sequence
  derived and/or modified sequence
atgggagtactgttgacacagcgaacgttgctttctctggtattagccctcctatttccttcaatggcatcaatggctatgcatgtcgcgcagcccgccgtggtcctggctagcagccgcgggattgcgtccttcgtgtgtgagtacgctagtcccggcaaagccaccgaagtgcgggtaaccgtccttcggcaagcggattcccaggtgactgaggtctgtgctgctacttacatgatgggcaatgagctcaccttcctcgacgattcaatttgtactgggaccagttcgggtaaccaagtgaacctaactattcagggcctgcgcgctatggatacagggctttatatttgcaaggtagagctgatgtaccctcccccgtattacctggggatcggaaatggcacacagatttacgtgatagatccggagccttgtcccgatagtgatcaagaacccaagagttcggacaaaacacatacttcaccaccttcgcccgcccccgaactccttggcggcagttcagtattcctgttcccacctaagcctaaggatacacttatgataagcaggacgcctgaggtgacctgtgtcgtggttgatgtgagtcacgaggatccagaggtcaaatttaattggtacgttgatggcgtggaagtacataacgcaaaaacaaaacccagagaggagcagtacaacagcacatatcgcgtagtgagcgtgttgacggtactgcaccaggattggctgaacggcaaggagtacaagtgtaaggtgtccaataaggcattgcccgcccccatcgaaaaaacaatttccaaagctaaggggcagccacgagaacctcaagtgtacaccctgccgccttcccgggatgagctgaccaaaaaccaggtgagcctgacgtgcctggtgaagggcttttatccctctgacatcgcagtcgagtgggagagtaatggacagccagagaacaactacaagacaacccccccagtgctggacagtgatggctctttcttcctttactccaagctcaccgtcgataagtcaaggtggcagcagggaaacgtgtttagttgctcagtcatgcacgaggctctgcataaccattacacccagaaaagcctctctctcagtccaggaaag

SEQ ID NO: 153948 - DNA, 1149 bp, Artificial Sequence
  derived and/or modified sequence
atgggcgtactgctgacacagaggaccctcctctccctggttctagcgcttcttttcccttccatggcttccatggcaatgcacgtcgcccagcccgcagtcgtgctggccagttcacgtgggatagctagttttgtgtgcgaatacgcttcccccggtaaggctaccgaagtgagggtgaccgtgctgcgccaggccgactctcaagtaacggaggtctgcgcagcaacttatatgatgggaaacgagctcacattcctggatgatagtatttgcaccgggacatcgtccgggaaccaagtgaacttgaccatacagggactgcgcgcaatggacacaggcctctacatttgtaaggtggagctaatgtaccccccaccttattatctggggatcggcaatggcacgcagatttatgtaatcgaccctgagccgtgcccggactctgaccaggaaccgaagagctccgataagacccatacctcccctccctccccagccccagaacttctgggcggctcgtcagttttcctgttcccgccaaagcctaaagacacattaatgatctctagaacccccgaggtgacgtgcgtcgtagtggatgtctctcacgaggaccccgaggtgaaattcaattggtacgtggatggcgtggaggtccacaatgccaagaccaaacctcgcgaggaacagtacaatagtacctatcgagtggtttccgtgttaaccgtcttgcaccaggactggttaaacggtaaggaatacaagtgcaaggtttccaataaggctttgccagcaccgattgaaaagacgatttcaaaggcaaagggccagccccgcgagcctcaggtgtacacactgccacccagccgcgatgaactcaccaaaaaccaagtcagcctgacatgtcttgtcaagggtttctatccaagcgatatcgccgtggagtgggaatccaacgggcagcctgaaaacaactataagaccactccacctgtactggattctgacggctcattcttcttgtactctaaactcacagttgacaaatcacggtggcagcaaggcaatgtattttcctgtagcgtgatgcatgaggcattgcacaatcattacacccagaagtcattgtctctgtcgccggggaag

SEQ ID NO: 153949 - DNA, 1149 bp, Artificial Sequence
  derived and/or modified sequence
atgggcgtgcttcttactcaacggacgcttctgtcacttgttctggcactgcttttcccgtccatggcatccatggcaatgcatgttgcacagcctgccgtggtgttggcctcatcacgaggcattgcctccttcgtgtgtgaatacgcttcgcctggcaaggcaactgaagtgagggtgaccgtgcttagacaagcagattcccaagtgacggaagtctgtgcggcaacttacatgatgggcaatgaacttacgtttctggatgacagcatctgtactggtacgtcatcgggcaaccaggtgaatcttaccattcagggactcagggcgatggataccggtctgtacatatgcaaggtggaacttatgtacccaccgccatactacctggggattgggaacggtactcagatttatgtgatagacccagagccttgccccgattctgatcaagaacctaagagcagcgacaagactcacacctcgccccctagccccgcccctgagctccttggaggttccagcgtgttcctttttcctccaaaacccaaggataccctgatgataagcagaacgccagaggtcacctgtgtggtggtggacgtgtcccatgaggacccagaagtcaagttcaactggtacgttgacggtgtggaagtgcacaacgcgaaaaccaagcctagagaggaacagtacaactctacctaccgcgtggtgagtgtgctgaccgtgcttcatcaagattggctcaacgggaaggaatacaagtgcaaggtgagcaacaaggcccttccagcacccattgagaaaactatctcgaaagcaaagggacagccacgcgaacctcaagtttatactctccctccttcgcgcgacgaacttacgaaaaaccaagtgtcactgacttgcctggtgaagggtttctacccttcggatatagcagttgaatgggaaagcaatggacagcctgaaaacaactacaagaccactcctccagtgctggattcggatgggagcttttttctgtactccaagctgactgtggacaagtcgcgttggcaacaaggaaatgtgttttcgtgttcggtgatgcacgaagcactccataatcattacacccaaaagtccctcagcctgtccccgggaaag

SEQ ID NO: 153950 - DNA, 1149 bp, Artificial Sequence
  derived and/or modified sequence
atgggagtgctgctgacccaacgaactctgctcagtctggtgctggccctgctgtttccatcaatggccagcatggcgatgcacgtcgctcagccagcggtcgttctcgctagctctcgcggcatcgctagcttcgtctgcgagtatgcctcaccgggaaaggcgacggaggtgcgggtcactgtgctgaggcaagccgactcgcaagtgaccgaagtttgcgcggccacctacatgatgggtaatgagctcactttcctcgacgattccatttgcactggcacttcgagcgggaaccaggtgaatctcactatccagggacttcgggcaatggataccgggctgtacatctgcaaggtggaactgatgtacccccctccttactacctcggaatcggaaatggcactcagatctacgtgatcgaccctgagccatgtccagattcagatcaagagccaaagtcatcggacaagacccacaccagcccgccgtcgcctgcgccggaactgctgggcggctcatcagtctttctgttcccaccgaagccgaaggacactctgatgatttcgagaaccccggaggtgacttgtgtggtggtggacgtgtcccacgaagatccagaagtgaaattcaactggtatgtggatggtgtggaagtgcacaatgccaagacgaagccacgggaagaacaatacaattcgacctatcgcgtcgtgagcgtgttgaccgtgcttcaccaggactggctgaatggcaaagaatacaagtgcaaagtgtccaataaggccctgccagctccaatcgagaaaaccatctccaaagctaagggccaaccgcgggagccacaggtgtataccctcccgccttcgcgggacgagctgaccaagaatcaagtctccctgacttgtctggtgaagggattctacccgtccgacattgctgttgagtgggaatcgaacggacaaccagagaacaactacaaaactactccgccggtgctggattcagacggatcgttcttcctttactccaaactgaccgtcgataaatcgagatggcagcagggcaacgtgttctcctgttcggtgatgcacgaagcactgcataatcattacacccaaaagagcctttcgctctcgccgggcaag

SEQ ID NO: 153951 - DNA, 1149 bp, Artificial Sequence
  derived and/or modified sequence
atgggagtgctcctcactcagcgtaccctcctttcgttagttctggcacttcttttcccctccatggccagcatggctatgcacgtcgctcagccagcggttgtgctggcgagtagtagggggattgctagcttcgtttgcgagtatgcatctcctggcaaggcgaccgaagtgcgggtcaccgttcttcggcaagctgactctcaagtgactgaagtatgcgcagccacatatatgatgggaaacgagttgacctttctagatgacagcatctgcacagggaccagctccggcaaccaggtcaatctgaccattcaaggacttcgagccatggatacaggcctgtacatctgtaaggtggaattgatgtatcctcccccatactatttaggaatcggaaatgggacccaaatatacgtcatcgatccggaaccatgccctgacagcgatcaggagcctaagtcctcagacaaaacacatacttctccaccctcgcctgcaccagaactgctcggaggttcctcggtctttctcttcccccccaaacctaaggatacgctgatgatatctcgcacccctgaggtcacctgcgtggtcgtagatgtctcccacgaggatcccgaagtcaaattcaactggtatgtggacggggtggaagtgcacaatgccaaaacgaaaccgcgtgaggagcagtacaattccacatatagagttgtgtccgtgttgaccgtgcttcatcaagactggctcaacggaaaggaatacaaatgcaaggtcagcaacaaagcattaccggccccaatcgagaaaaccatctccaaggcaaaagggcagcccagagaacctcaggtttataccctcccacctagcagggacgagttaacgaaaaaccaggtatcgctgacttgtctggtcaagggtttctaccccagtgatatagctgttgagtgggaatctaacggccagcccgaaaataattacaagaccacaccccctgttctcgattcagatggaagtttcttcctctactccaaactgactgtggataaatctcggtggcagcaggggaatgtgttcagctgctcagtcatgcatgaggcgctgcacaatcattacacccagaagtctctgtcccttagccctgggaag

SEQ ID NO: 153952 - DNA, 1149 bp, Artificial Sequence
  derived and/or modified sequence
atgggggtcctccttactcaacggacgctgttgtccctcgtgcttgcgctcctttttccatctatggcatccatggcaatgcacgtggcacaacctgctgtcgtcctggcgtcctcacgtgggatcgcatcctttgtctgcgagtatgcctcccctgggaaagcaaccgaggtcagagtgaccgtgcttaggcaggctgattcgcaagtgacggaagtgtgtgcggcgacctacatgatgggaaacgaacttactttccttgatgatagcatttgtaccggaacttcatcgggtaaccaagtgaacctcaccatccagggcctgagggcaatggataccggactttacatctgtaaggtcgaattgatgtaccccccaccttactatctgggcattggaaacggtactcagatttacgtcattgatcccgagccatgtcccgattcagatcaagaacctaaatccagcgataagacccatacgtcccctccttccccagccccagaattgcttggtggctcgagcgtgttcctcttcccgcccaagcccaaggacaccctgatgatcagccgtacgcctgaggtgacctgtgtggtggtggacgtgagccacgaagatccagaggtgaagttcaattggtacgtggatggagtggaggttcacaatgcaaagaccaagccaagagaggagcagtataactcaacgtacagagtggtgtcggtcctgactgtgcttcatcaagattggctcaacggaaaggaatacaaatgcaaagtgtcaaacaaggcgctgcctgcgcctatagaaaagaccatttcaaaggcaaagggacagccaagggaacctcaagtctacactctgcctccttccagagatgaactgaccaaaaatcaagtgagcttgacctgtctcgtcaagggcttttacccttccgatatcgcagtggaatgggaatcgaatggtcaacccgagaacaactacaaaactaccccaccggtcctcgactcagatggatcgttttttctctactcaaaacttaccgtcgataaatcaagatggcaacagggcaacgtattctcatgttcggtgatgcatgaggcccttcataatcattacacgcaaaagtcgttgtccctttccccaggaaag

SEQ ID NO: 153953 - DNA, 1149 bp, Artificial Sequence
  derived and/or modified sequence
atgggggtcctgctgacccagagaaccctcctttccctggtgctcgcgttgctgtttccatccatggcgtccatggccatgcacgtcgcacagcctgccgtggtcctcgcctcgtcccgcgggattgcctcgtttgtgtgtgaatacgcttcacctggcaaggcaaccgaagtgcgggttactgtgctccggcaagccgattcgcaagtcaccgaagtctgcgctgctacttacatgatgggaaatgaactgaccttcctggacgattctatttgcacgggtacctcgtcaggaaaccaagtcaaccttaccatccaggggcttcgggcaatggacaccggtctttacatttgcaaggtggaactgatgtacccacctccttactaccttggaattggtaacggtacgcaaatctacgtgattgatcctgaaccttgcccagattccgaccaagaaccgaagtctagcgataaaacccacaccagccctccatccccagcgccagaactgctcggagggagctccgtgttcctgttccctccgaagcctaaagacaccctgatgataagccggacccctgaagtgacgtgtgtggtggtggatgtctcgcatgaggaccccgaagtgaaattcaattggtacgtggatggggtggaagtgcataacgccaaaaccaagcctagagaggagcaatacaactcaacctacagagtcgtctcagtgctcacggtgctccatcaagattggttgaatggaaaggaatacaaatgcaaagtctcaaacaaggcacttcccgctcctattgaaaagacgatttccaaagcaaagggtcaaccaagagagcctcaagtgtacactcttcccccatcgagagatgaattgactaaaaaccaagttagtcttacctgcctcgttaaaggtttttacccatcagacatcgccgtggagtgggaatcgaacggccagcccgaaaacaattacaagactaccccgcccgtgctcgattcggatggatccttctttctctattcaaaacttactgtggataaaagcaggtggcaacaggggaatgtgttttcgtgttcggtgatgcatgaggcactccataatcattacacccaaaagtccctttcgctgtcaccaggaaag

SEQ ID NO: 153954 - DNA, 1149 bp, Artificial Sequence
  derived and/or modified sequence
atgggcgtgctcctgacacagcgtaccttgttgagcctggtgctggcactgctatttccgagtatggcttccatggcaatgcatgtggcccagccagcagtggtgttggcaagctcgcggggcatcgcgtcgtttgtgtgtgagtacgcttccccaggaaaggccaccgaagtacgagtaaccgtgctgcgacaggctgactcgcaagtgaccgaagtgtgtgccgctacgtacatgatgggaaatgagttgacctttcttgacgactcgatctgcactggtacctctagcggtaaccaagtgaatctgactatccagggtctacgtgcaatggatacgggtctgtacatctgcaaggtggaactcatgtatcccccaccatattacctgggaatagggaatggaacccagatttacgtcattgaccccgagccctgcccggattcggaccaggagcccaagagtagcgacaagacgcataccagcccaccatcgcccgccccagaattgctgggcggcagtagtgtgttcctgtttcctccgaaacccaaggataccttgatgatctcccgcacccccgaagtgacgtgcgtggtagtggatgttagtcatgaggatccggaggtgaaattcaactggtacgtcgatggcgtggaggtgcacaacgcaaagacgaagccacgagaggaacaatataattccacatacagggtggtgtcagtgctgaccgttttacaccaggattggctcaacggcaaagagtataaatgcaaggtcagcaacaaggcactgccagcccctatcgagaagacgatctcgaaggcaaagggtcaaccacgagaaccgcaggtctacacactaccaccgtcacgagacgaactgacaaagaatcaggtgagccttacctgtttggtgaagggcttttatcctagcgacatcgccgtggagtgggagagcaacggccagcccgagaacaactataagacaacaccgcctgttctcgattcggacggctcgttcttcttgtattccaaattgaccgtggacaagagcaggtggcaacaagggaatgtcttttcgtgctcggttatgcacgaggccctccataaccactacacccaaaagtctttgtcccttagccccggaaag

SEQ ID NO: 153955 - DNA, 1149 bp, Artificial Sequence
  derived and/or modified sequence
atgggtgttttgctaacacagcggacgctattgtctctggtgctcgctttgctgttcccctctatggccagcatggctatgcacgtagcccagcccgcggttgtgctagcttctagtagggggattgcttcattcgtgtgtgaatatgcatcacccggcaaagccaccgaggttcgagtcaccgtacttcgccaagctgactcacaagtgaccgaagtgtgtgccgccacctacatgatggggaatgaactgacattcttggacgatagtatctgtactgggacaagctcagggaaccaagtgaatttgaccattcaagggctcagggcaatggacacaggtctgtatatttgtaaggtagagctgatgtatcctcctccgtactacctcggtatcggaaacggaacacaaatatacgttattgatcctgagccatgccctgactcagatcaggagcccaagtctagtgataagacgcatacctcaccaccttcgcccgctccagagcttctcggcggcagttctgtttttctgttccctcccaaaccgaaggatactctaatgatcagccggactccagaggtgacttgtgtggtggttgatgtcagtcacgaagacccagaagtaaagttcaattggtacgtggacggcgtggaagtgcataatgcgaagacgaaacctcgcgaggagcagtataacagcacataccgcgtggtctcggtgctgaccgtgctgcaccaggactggctgaatggcaaagaatataagtgcaaggtgtctaacaaagcgctgccagctcctatagagaaaaccataagcaaggcaaaagggcagccaagagagccacaggtttacactcttcctccaagcagagatgaactgaccaagaatcaggtgtcacttacctgcctggttaagggtttctacccatctgacatcgccgtagaatgggagagcaatggtcagcccgagaataattacaagactactccccccgtgctggactcagatgggtcattttttctgtattccaagctgaccgtggacaaatctcggtggcagcaggggaatgtgttctcgtgttctgttatgcatgaggcactgcacaaccattacactcagaaatcgctatccttgtctcctgggaag

SEQ ID NO: 153956 - DNA, 1149 bp, Artificial Sequence
  derived and/or modified sequence
atgggtgtgctcctcacacaacgcacacttctttccctggtcctagccttgctgtttcctagcatggcttctatggcaatgcacgttgcgcagccagccgtagtgctcgcctcctcgaggggtatcgcttcgttcgtgtgcgaatatgccagtcctgggaaagcaaccgaggtgcgggtgacagtactcagacaggccgactctcaagtcacggaggtgtgcgccgccacctacatgatgggcaacgagctgacatttctggacgactctatttgtactggtacaagctcgggtaatcaggtcaacttaacaatccagggacttcgagccatggacaccggcctgtatatttgcaaggtcgagttgatgtatccgccaccatattacctggggatagggaatggcactcaaatatatgtgattgatccagaaccgtgtcccgactccgaccaggagcctaaatcctctgataaaacccacacctccccaccttcgccagcccccgaattgttagggggcagttctgtgtttttgtttccccccaaacctaaggacactctgatgatttcgcgcacaccagaggtgacatgtgttgtggtggacgtgagccacgaggatccagaggtcaagtttaattggtacgtggatggagtggaagtgcataacgccaaaactaaacccagagaggagcagtataactccacttaccgggtggtcagcgtcctgactgtgctgcaccaggactggctgaatgggaaggagtacaaatgtaaggtaagcaataaggctttacccgcccccatcgagaagacgataagtaaggccaaggggcagccacgagaaccccaggtatacacactccccccaagtagagacgaactgacgaaaaaccaggtctcactgacctgcctggtcaagggcttttatccaagcgacatcgccgtcgagtgggagagtaacggccagcccgagaataactataaaacaactccacctgttctggatagtgacggctccttcttcctgtactcaaagctgactgtagataagtcccggtggcagcagggcaatgtgttcagttgctctgttatgcacgaggcgctgcacaatcattatacccagaagagcctgtcactctcccccggcaag

SEQ ID NO: 153957 - DNA, 1149 bp, Artificial Sequence
  derived and/or modified sequence
atgggcgtgctgctgacccagcgcacactgttgtcactggtcctggccttactgttccctagtatggccagtatggccatgcacgtagcacaacccgctgtcgtactggcatcttcacgtggtatagcctcttttgtatgtgagtacgcgagtccagggaaggctaccgaggtacgcgtaacagtgctgcgtcaggccgactcccaggtaaccgaagtctgcgccgccacgtacatgatgggtaatgaactaactttcctcgatgattccatctgtacaggcacaagttctggcaatcaggtgaacctgactatacaggggcttcgcgctatggatactggcctctatatttgtaaggtcgagctgatgtaccctcctccttactacctggggatcggcaacggaacacaaatctatgtgatcgatccggaaccctgccctgattccgatcaagaacccaaatcaagtgacaagacacacacctctccccccagccctgccccggaactgctgggcggtagctctgtcttcctgttcccgcctaagcccaaagacaccctgatgatttccaggacgcccgaggtgacctgcgtggttgtggacgtctcacacgaagatccggaggttaagtttaactggtacgtcgacggcgtcgaggtgcataacgcaaagactaaacccagagaggagcagtacaacagcacgtatagggtggtttctgtgctgactgtgttgcaccaggactggcttaacggtaaagaatataaatgcaaagtcagcaataaggcccttccagcccctattgaaaagaccatttccaaggctaaggggcagccaagggaacctcaagtgtataccctgcctcctagtcgcgacgagctcactaagaatcaagttagtctgacttgcctagtgaaagggttctatccaagtgatatcgccgtggagtgggagtccaacggccagcctgagaataactataagacaaccccccccgtgttggactccgatggatccttttttctgtactccaagctgactgtcgacaagtctagatggcagcagggcaatgtgttttcttgctctgtcatgcacgaggccctgcataaccactatacgcagaaatcattatcattgtcccccggcaag

SEQ ID NO: 153958 - DNA, 1149 bp, Artificial Sequence
  derived and/or modified sequence
atgggagtgctgctgacccaaagaactctgctcagcctcgtgttggcacttctcttccccagcatggcatcgatggcgatgcacgtcgctcaaccggcggtcgtcctcgcctcgtccagagggatcgcatcctttgtgtgcgaatacgcgagcccgggaaaggccaccgaagttcgcgttacggtcctgcggcaggccgattcgcaagtaactgaggtctgcgcggccacctacatgatgggcaatgagctgaccttccttgatgacagcatctgcaccggaacgtcgtccggaaatcaggtgaacctgaccatccaagggctgagggccatggatactggattgtacatttgcaaagtggagcttatgtacccgcctccatactacctgggcattggtaacggaacccagatctacgtgatcgatccagagccatgtccagactccgaccaggaaccgaagtcatcagataagacccatacttctccgccgtcgccggccccagagcttctgggagggtcgtcagtgttcctcttcccaccaaagcctaaagacaccctgatgatctcaagaactccggaagtgacctgcgtggttgtggatgtatctcatgaggacccggaagtcaagttcaattggtatgtcgacggagttgaggtgcataatgccaaaactaagccgagggaagagcaatacaactctacctatcgggtggtatccgtgctcactgtgctgcaccaggactggctgaacggaaaggaatacaaatgcaaagtgtccaataaggcgctgccggcgccaatcgagaaaactatctcgaaagcaaaggggcagccgcgcgaaccacaggtctacactttgcccccatcccgggacgagctcactaaaaaccaggtgagcctcacctgtctggtgaagggattctacccttctgatatcgctgtggaatgggagagcaatgggcagcctgagaacaattacaagacgaccccacccgtcctcgactccgacggctcgttcttcctctattcaaagctcaccgtggacaagagccggtggcaacagggcaacgtcttttcgtgctcggtgatgcacgaagcgctgcacaatcactacacgcaaaagtcactttcgctgagcccgggtaag

SEQ ID NO: 153959 - DNA, 1149 bp, Artificial Sequence
  derived and/or modified sequence
atgggagtcctcctgactcagcggacgctgttgtcgctggtgctcgcgctgctgtttccgtccatggcatccatggcgatgcacgtggcccagccagccgtggtcctggcatcctcgcggggcatcgcctcctttgtctgcgaatacgcgagccctggaaaggcgaccgaggtgcgggtcactgtcctccgccaggccgacagccaagtcaccgaggtctgcgcggccacttatatgatgggaaatgaactcactttccttgacgactcgatctgtactgggacttcatccgggaaccaggtgaacctgacgatccaaggtttgagggccatggacaccggcctctacatctgcaaggtggaactcatgtacccgccaccgtactacctcggtatcggaaacggtacccagatctacgtcatcgatcccgaaccttgccctgacagtgatcaggaaccgaaatcatcggataagacccatacgtcccctccttctccagcccccgagcttctcggtggatcctcggtgtttttgttcccgccgaaacccaaagacactctgatgatttcacggaccccggaagtgacttgcgtggtcgtcgacgtgagccacgaagatccggaggtcaagtttaattggtacgtggacggggtggaagtgcataatgccaaaactaaacccagagaggaacagtacaattcaacgtaccgggtggtttcagtcttgaccgtcctgcaccaggattggcttaacggaaaagagtacaagtgtaaagtgtcgaacaaggctcttccagcaccaattgagaagactatctccaaggcaaagggccaacctagagagccgcaagtttacaccctcccaccgagccgggatgaactgaccaaaaaccaagtctccctgacttgcctggtgaagggattctacccttcggacatcgccgtggaatgggagtcgaatggtcaaccggagaacaattacaaaaccaccccgccagtcttggactccgatggatccttcttcctctactcaaaattgaccgtggacaaatcacgctggcagcagggaaacgtgtttagctgttcagtgatgcacgaggcacttcataatcactatacccaaaaatcgctctccctgagccccggaaaa

SEQ ID NO: 153960 - DNA, 1149 bp, Artificial Sequence
  derived and/or modified sequence
atgggtgtcctcttaacccagcggaccctgctttccttggtcctggctttgctgttccctagcatggccagtatggctatgcatgtggctcagccggctgtggtgttggccagcagtcgtggaatcgcatcattcgtgtgcgagtacgcatccccaggcaaagccacagaagtgagggttaccgtactacgtcaagccgattcacaagtaaccgaggtctgtgccgcgacttacatgatgggcaatgaactgacttttctggatgattcgatttgtacgggtacctccagtggaaaccaagtaaacttgacaatacagggcctgagagcgatggatactggtctctacatttgtaaagttgagctgatgtaccccccgccttattacctcggaatcggcaacggaacacagatctacgtgattgaccctgagccctgtccagatagcgatcaggagccaaagagtagcgataagacacacaccagtcccccttctccggcccccgagttactaggtggaagctccgtgttcctgtttccacccaagcccaaagatacactgatgatttctcgaacccccgaggtgacatgtgttgttgtcgatgtgtcccatgaagaccccgaggtaaagttcaactggtatgtcgacggtgtggaagtccataacgccaaaaccaaacctcgggaagaacaatacaattccacgtaccgcgtggtgagcgtcttgaccgtcttgcatcaggattggctcaacgggaaggaatataaatgcaaagtatctaataaggcacttccagcaccgattgagaaaacaatctctaaggccaagggtcagccacgagagcctcaggtgtatactcttcccccctctcgggatgaactgactaagaaccaggtgtcgctcacttgtcttgtgaaaggattttacccatccgatatcgccgtggagtgggaatctaatggccagccggaaaacaattacaaaactacgccccccgttctcgactccgacggcagttttttcctgtattcaaaactgaccgtagataaatccagatggcaacagggaaatgtgttttcctgtagtgtgatgcatgaggccctgcataaccattatacacagaagagcctcagcctgtctcccgggaag

SEQ ID NO: 153961 - DNA, 1149 bp, Artificial Sequence
  derived and/or modified sequence
atgggtgtgctgctgactcaacggactctcctgtcactcgtcctcgccctcctgtttccatcaatggcgtcgatggccatgcatgtggctcagcctgcagtggttctggcgagctcccgcggcatcgcatccttcgtgtgcgaatacgcttccccgggaaaggccaccgaagtccgcgtgactgtcttgaggcaggcggattcacaggtgactgaagtctgtgccgctacctacatgatgggaaatgagctgaccttcctggatgattcaatctgtaccggcacttcatcggggaaccaagtgaacctcaccattcagggactccgagcgatggacactggactctacatctgcaaggtggagcttatgtatccaccgccttactacctgggcatcgggaatggcactcagatctacgtcatcgacccggagccgtgccccgatagcgaccaggaaccgaaatcctcggacaagacccacacctcgccgccatctccggcccccgagcttctgggagggagctccgtgtttctgttccctcctaagcccaaggataccttgatgatctcaagaacgccggaggtcacgtgcgtggtcgtggacgtgtcccacgaggaccctgaggtgaaattcaattggtacgtcgatggagtggaggtccacaacgcgaaaactaagccgagagaagaacagtacaactcgacttaccgggtggtgtcagtgctcaccgtgctgcaccaagactggctgaatggaaaggaatacaagtgcaaggtgtccaacaaagccttgccggcaccgatcgaaaagaccatttcgaaagccaaaggtcaacctcgggagccacaagtctatactctcccaccaagccgcgacgaactgaccaagaaccaggtgtcgctgacttgtctggtgaagggcttctacccaagcgacatcgccgttgaatgggagtccaatggacagccggaaaacaactacaagacgacgccgcccgtgctggactcggatggatccttcttcctgtactccaagttgaccgtggacaagtcgcgctggcagcaaggtaatgtctttagctgctcggtaatgcatgaagcacttcataaccactacacccagaaaagtctcagccttagcccaggaaag

SEQ ID NO: 153962 - DNA, 1149 bp, Artificial Sequence
  derived and/or modified sequence
atgggtgtcttgctcactcagcgtactttgctgtcactcgttttggccctgctgttccccagcatggcttcaatggccatgcatgtcgcccaaccagctgtcgtcctcgcgtcaagccggggcatcgcctcgttcgtttgtgaatacgcaagtcctggcaaggcaacagaagttcgagtgactgtcctccgacaggccgactcccaggtcaccgaggtctgtgcggcaacctacatgatgggaaacgagcttaccttcctcgatgattccatatgtaccgggacctcgtcgggcaaccaggtcaacctgacgatccagggtttgcgtgctatggacacaggactgtacatttgcaaggtcgaacttatgtatccccccccatactacctgggtatcggtaacggcactcagatctatgtaatcgatcccgagccttgccccgattccgaccaagaaccgaaatcgtccgacaagacgcacactagccctccttctcctgcgcccgaattgttgggtgggtcttcggtcttcctcttcccgcctaagcctaaggataccctgatgatctctcgtacgccagaggtcacatgcgtcgtcgtagacgtgtctcacgaggaccctgaggtgaagttcaactggtacgtagacggcgtcgaggtacataacgccaagaccaagccgcgcgaggagcagtataactctacttaccgtgtcgtttcggtgttgacggttctccaccaggattggcttaacggcaaggagtacaagtgtaaggtctccaataaggccctgccggcgcctatcgagaagactatctctaaagccaaagggcagcctcgtgagcctcaggtctacactctgcccccgagtcgcgatgagctgaccaagaaccaagtgtcgctaacctgtttggtgaagggtttctacccgtcggacatcgctgtggaatgggagtctaacggacaacctgagaacaattataagaccacccccccggtcctggattccgatggcagcttcttcttatactcaaagcttaccgtcgacaagagccggtggcaacagggtaacgtattctcgtgttcagtcatgcatgaggcactgcacaaccactacacccagaagtcactctcgctgtcccctggcaag

SEQ ID NO: 153963 - DNA, 1149 bp, Artificial Sequence
  derived and/or modified sequence
atgggtgttctgcttacccaacgcaccctgcttagcctcgtgctggcgctgttgtttccttcaatggcatcaatggcgatgcatgtggcgcaaccagccgtggtgcttgcgtcctcgcgtggtatagcatcgttcgtttgtgaatacgcatcgccaggtaaggcgacggaagtgagagtgacggtgctgagacaggccgattcacaggtcaccgaggtgtgtgccgcaacttacatgatggggaacgagctgacctttttggatgattctatctgcaccggaacgagctcgggaaaccaggtcaatcttaccattcagggactgcgggcgatggacaccgggctgtatatctgcaaggtagagctgatgtacccacctccttactatctcggcataggaaacggcacccaaatctatgtgattgatccagagccatgtcctgactccgaccaagaacctaagtcatcggacaagacccatacctcgccaccgtctcccgccccagaactgctcggtggttcctcggtctttctttttcctccaaaacctaaggatactcttatgattagccgcacccctgaagtgacttgtgtcgtcgtggatgtctcgcatgaagatccggaagtgaaattcaattggtacgtggatggggttgaagtccacaatgcgaaaacgaaaccaagagaggaacaatacaattccacctacagagtggtgtcggtgctcactgtgctgcatcaggattggctcaacggcaaggaatacaaatgcaaggtcagtaacaaggcacttcctgcacctatcgaaaagacgattagcaaggctaagggacaacctcgggaacctcaagtgtacactcttcccccatcaagagatgagctgacgaaaaatcaagtgagccttacctgtcttgtcaagggattctacccttctgatattgcagtggagtgggaatcgaacggtcagccagagaacaactacaagactacccctcccgtgctggattcggacgggtccttctttctttactcaaaactgaccgtcgacaagtcaagatggcaacagggcaatgtcttttcatgttcggtgatgcatgaagcacttcataatcattatacccagaagtccctcagcctttcgcctggtaag

SEQ ID NO: 153964 - DNA, 1149 bp, Artificial Sequence
  derived and/or modified sequence
atgggcgtgcttttgacgcagcggactttgctgtcacttgtgttggccctcctttttccttcgatggccagcatggccatgcacgttgcgcaacctgctgtcgtccttgcctctagtaggggaatcgcctctttcgtgtgcgaatacgcaagcccaggtaaggcaacagaagtccgggttactgttctgagacaagcggatagccaagttaccgaggtgtgtgcagcaacgtatatgatggggaacgagctcacctttttggatgactccatctgcactggaacgtctagtgggaaccaggtaaatttgaccatacagggtcttcgtgctatggacaccggactatacatctgcaaggttgaactcatgtacccacccccgtactatcttggtattggcaacggcacacaaatctacgtgatcgacccagaaccgtgccccgattcggaccaggagcctaaatcctcggataaaacccatacttccccaccatccccggctcctgaactgctgggagggtcgtccgtgttcttgtttccgccgaagcctaaagacacgttgatgatctcgcgtaccccggaagtcacttgcgttgtcgtcgacgtctcccacgaggatccagaagtgaagttcaactggtatgttgacggcgtcgaagtacacaacgccaaaacgaagccgcgggaagagcagtataattccacttatagggtagtttcagtgcttactgtcttgcatcaggactggctaaatgggaaagaatacaagtgcaaggtctcaaacaaggctctgcctgctccgatcgagaagactatcagcaaggcaaagggtcagcctcgcgaaccgcaagtttacacgctcccaccttctagagacgagctcactaagaatcaggtttcacttacatgcttggtcaagggattttatcccagtgacatcgctgtggaatgggaatcgaacggacagcccgagaacaactacaagaccacgccccccgtcctcgattctgatggatcattctttctatatagcaagttgaccgtggataagtctcgttggcagcaaggtaatgtgttctcttgttccgttatgcatgaagcacttcacaaccattacacccaaaaaagtctgtcactttcgccaggaaag

SEQ ID NO: 153965 - DNA, 1149 bp, Artificial Sequence
  derived and/or modified sequence
atgggggtcctgctgacgcagcgcaccctcctgtcactggtcctggccctcctgttcccttcgatggcgtccatggccatgcatgtggcacagcccgcggtggtcctggcctcgtccagggggatcgcctcctttgtgtgtgagtacgcctccccaggaaaggccactgaggtgcgcgtcactgtcctgagacaggcagattctcaagtgaccgaagtctgtgccgcgacttatatgatgggaaacgagctgaccttcctcgacgatagcatctgcactggcacttcctcaggaaaccaagtgaatctcaccatccaaggcctcagggccatggataccggtctgtacatttgcaaggtcgaattgatgtacccaccgccgtactacctgggcattggaaatggaacccagatttatgtgatcgatcctgaaccctgcccggattcagaccaggagccgaaatcctcggacaaaacgcacacctcgccgccttcgccggcgcctgaactgcttggtggaagctccgttttcctgttcccgccgaagccaaaggacaccctgatgatctcgcggacgcccgaggtcacttgcgttgtggtggacgtgtcccacgaggaccctgaggttaagtttaactggtacgtggatggagtggaggtgcataacgctaagaccaaaccaagagaggaacagtacaattccacttaccgcgtggtcagcgtgctcactgtgctgcatcaagactggctcaacggtaaggaatacaaatgcaaggtgtcaaacaaggcactccctgctccgattgaaaaaaccattagcaaagctaaaggccagccacgggaacctcaagtctacaccctcccaccgtcgcgggatgaattgaccaaaaaccaggtgtccctgacttgtctggtgaagggtttctatccatcggacatcgccgtcgaatgggaatcaaacggccagccggagaacaactacaaaactactccgccggtcttggatagcgatggctcgttctttctctacagcaaacttaccgtggacaagtcccggtggcagcaggggaatgtgttcagctgctccgtcatgcatgaggctctgcacaaccattacacgcaaaagagcctgtccctgagcccgggaaaa

SEQ ID NO: 153966 - DNA, 1149 bp, Artificial Sequence
  derived and/or modified sequence
atgggtgtgcttcttacccaaaggactcttctctccctggtgctcgcccttctgtttccctccatggcctccatggcgatgcatgtcgcgcagccagcagtggtgcttgcatcgtcccgcggaattgcatcgtttgtgtgtgagtacgcatcgcctggtaaagcaaccgaggtgcgggtgaccgtgcttcggcaagcagatagccaagtgaccgaagtctgcgccgcaacttacatgatgggcaacgaactgacctttctggacgattcaatttgtaccggaacttcgtccggaaaccaggtgaatttgactatccaggggcttcgtgcgatggatactggcttgtatatctgcaaggtggaactcatgtaccccccaccatactacctgggaataggaaatggaacccagatttacgtgatagaccccgaaccttgtcccgactccgatcaagaaccaaagtccagcgacaagacccatacttctcccccaagcccagcacccgaactgcttggtgggtcgagcgtgttcctttttcctccaaaaccaaaggataccctgatgatctcgaggacccctgaagtcacgtgtgtggttgtggacgtctcccatgaggatccggaagtgaagtttaactggtacgtggacggagtggaggtccataacgcaaagaccaaaccacgagaggagcagtacaactcaacctaccgtgtcgtttcagtcctcacggtccttcatcaagattggcttaacggtaaggaatacaaatgtaaagtctcgaacaaggctcttcctgcgccaattgagaaaaccatctccaaggctaaggggcaacctagagagccacaagtctacaccctccctccttccagggatgagcttaccaagaatcaagtgtcgcttacttgcctggtgaaaggcttctacccgagcgatatcgcggtcgaatgggaatcgaacggtcagccagaaaacaactacaagaccaccccacctgtactggattcagacggtagcttttttctttactctaaactgacggtggataaatctaggtggcaacaaggtaacgttttctcttgttccgtcatgcatgaagctctgcataatcactacacccagaagagcctgtccctttcccctggaaag

SEQ ID NO: 153967 - DNA, 1149 bp, Artificial Sequence
  derived and/or modified sequence
atgggcgtgctcctgactcaacggacgttgctgagcctcgtgttggccctgcttttcccgtcgatggcgtcaatggctatgcatgtcgcccaaccggccgtggtgctcgccagctcgcgcggcatcgcgtcgtttgtgtgcgagtacgcctcgcctgggaaggccactgaagtgagagtgacggtgttgaggcaggcggacagccaagtgactgaggtgtgcgcagcaacctacatgatgggaaatgagcttaccttcctggacgactccatctgcacgggtacttccagcggcaatcaggtcaacctgactatccagggattgcgcgctatggacaccggcctgtacatctgcaaagtggagctgatgtacccgcctccttactacctgggcatcgggaacggcacccagatctacgtgatcgatcctgaaccttgcccagattcggaccaagagcccaaatcctccgataaaactcataccagcccaccatccccggccccagagctgctgggcggcagctcggtgttcctgttccctccaaagccgaaggacaccctcatgatatcgagaacccctgaggtgacctgcgtggtggtggatgtctcacacgaggacccggaggtgaagttcaactggtacgtggacggggtggaagtgcataacgccaaaaccaagccgagagaagagcagtacaacagcacttacagagtcgtgagcgtgcttaccgtgctgcatcaggattggttgaacggaaaggaatacaagtgtaaggtcagcaacaaagctctcccagcccctatcgaaaaaactatttcgaaagctaagggacagccgcgcgaaccgcaggtgtatactttgcccccctcgcgggacgagctcaccaagaaccaggtgagcctgacttgcctggtgaaaggattctacccgtcggatattgcggttgaatgggagtccaatggacaaccagagaataactacaagactactccaccggtcctcgactctgatggttctttctttctctacagcaagctcactgtggacaaatctcggtggcagcaaggaaatgtcttttcgtgctcagtgatgcacgaggccctccacaaccactacactcagaagtcgctctcactgtcacctggaaag

SEQ ID NO: 153968 - DNA, 1149 bp, Artificial Sequence
  derived and/or modified sequence
atgggagttctgcttacacaacgcactctgctaagcttggtcttggccttgttatttccatctatggcctccatggcgatgcacgtcgctcaacctgctgtcgttttggcatcgtcacggggcatcgcctcttttgtttgtgagtacgccagtcccggcaaagccacagaggtgcgtgtcaccgtgctgcgacaggcagattcccaggtcaccgaagtttgcgccgccacctatatgatgggcaatgagctgaccttccttgatgactcaatctgtacaggaacttctagcgggaatcaggttaacttgaccatccaagggctgagggcaatggatacaggactctatatttgtaaggtggagctcatgtaccctccaccatattatctgggcattggcaatggaactcagatctatgtgatcgatcccgagccctgcccagatagtgaccaagaacctaaatcctctgacaagactcacacatctcctccctctcccgcgcccgagttgctaggaggttcgtctgttttcttattccctccaaagccaaaggataccctgatgatcagtcgcacacctgaggtgacgtgtgtggttgtcgacgtcagtcatgaagacccagaagtgaagttcaattggtacgtagacggcgttgaagtgcataatgccaagacgaagccccgggaggagcaatacaactcaacttaccgagtggtgagtgtgctgactgtgttgcaccaagattggctgaatggtaaagagtataagtgtaaggtgagcaataaagcactgcccgctcctattgagaaaacaattagcaaagcaaaggggcagccacgggaaccacaggtgtacacattgccaccgtcccgggatgaacttacaaaaaaccaagtgagtcttacatgccttgttaaaggtttttacccatctgatatcgccgtggaatgggagagtaatggacagccggagaacaattataagacaaccccgcccgtccttgatagcgatggatcattttttttgtattccaaactcaccgttgacaaatccagatggcagcagggtaacgtgttctcatgtagcgtgatgcacgaagcccttcataaccattatacccagaagtccttgtctttgagtcccggaaaa

SEQ ID NO: 153969 - DNA, 1149 bp, Artificial Sequence
  derived and/or modified sequence
atgggagtcttgctgacacagaggaccctgctcagtcttgtgctggccctgcttttcccgtctatggcgtccatggcgatgcacgttgcccagcccgctgttgtcttggcttctagccgcgggattgcctcattcgtgtgtgaatacgcctccccaggtaaagctacagaagtcagagtcacggtgcttcgccaggccgacagccaggtaaccgaggtttgtgccgcaacatatatgatggggaatgagttgacattcctcgacgactccatctgtaccggcacaagctccgggaaccaggtgaacctgactattcaggggctgcgcgcaatggatactggcctctacatatgcaaagtggaactcatgtatcctccaccctactacttgggcattggaaatggtactcagatctatgtcattgaccccgagccatgcccagacagcgatcaggagccgaagagttccgacaaaactcacactagtccaccttcaccggctcccgagctcctggggggctcttctgtgttcttgttccccccaaaacccaaggacacccttatgatctccagaacaccagaagtcacctgcgtagtggtggacgtatctcacgaggatcctgaggtcaagttcaattggtatgtggacggcgtggaagtccacaacgccaagacgaagccacgagaagagcagtacaatagcacctatagggttgtgtctgtattgaccgttcttcatcaggactggcttaatggtaaggaatacaagtgtaaggtctctaacaaggcccttccggcgcccattgagaaaaccatctccaaggctaaggggcagcccagggaaccacaggtgtacacccttccacccagccgggacgagctgaccaagaatcaggtatccctgacttgccttgtgaagggcttctatccctcagacatcgcagtcgaatgggagtccaatgggcagcctgagaataattacaaaaccacgccacctgtccttgacagcgacggctccttttttctgtattccaagctgacggtggacaaaagccggtggcaacagggcaatgtgttttcttgctctgtgatgcacgaagccctgcacaatcactacacacagaagagtttgtcactgagccccgggaaa

SEQ ID NO: 153970 - DNA, 1149 bp, Artificial Sequence
  derived and/or modified sequence
atgggcgtgcttctgacacagaggacgcttttgagtctcgtgttggctctcctgttcccttctatggccagtatggccatgcacgtcgcccagccagctgttgtactggccagctcacgcggcattgccagctttgtatgtgaatatgcctcccccgggaaggcgacagaagtgagagtcaccgtgctgcgccaggcagattcgcaggtcaccgaggtgtgtgccgccacttacatgatgggtaacgagctgaccttcttggatgattccatatgcactgggacttccagtggcaaccaagttaatctcaccattcaggggctgcgggcaatggataccgggctgtatatctgcaaggttgaattgatgtacccacccccctattatctaggtataggcaacggaacacaaatatacgtgatcgatcctgagccatgtccagattcagaccaagaaccgaagagttcagacaagacccatacctcacccccgtctcccgctccagaactcctgggcggctctagcgtatttctctttccacctaagcccaaggacacacttatgatctcccggactcccgaggtgacttgtgtggttgttgatgtgagccacgaggaccctgaagtcaaatttaattggtatgtggatggcgtcgaggtgcacaacgccaaaacaaagcctcgagaagaacagtacaactcaacttatagagtggtgagtgtgttgaccgtgctccatcaggactggcttaacggaaaggaatataagtgcaaagtgagcaacaaagctctgcctgctcccatcgaaaagacgatcagtaaagccaaaggccaaccacgagagccccaggtgtatacgctgcccccgtcccgggacgagctgaccaaaaaccaggtgtcattgacctgtctcgtgaaggggttttatcccagcgatatcgccgtcgaatgggaaagcaatggacagccggaaaacaattacaagactacgcctcccgtgctagattcagacggctcattctttctgtactcaaaactgactgtagacaaatcgcggtggcaacagggcaatgtgttcagctgcagtgtaatgcacgaggccctccataatcactacacccaaaagtctttgtctttgagtccagggaag

SEQ ID NO: 153971 - DNA, 1149 bp, Artificial Sequence
  derived and/or modified sequence
atgggtgtactcctgactcaaaggactctgcttagcctggtgctcgccctgctttttccgtccatggcaagcatggcgatgcacgtggcacagccagccgtggtccttgcatcttctaggggaatagcttcattcgtctgcgaatatgcatcccccggaaaggccaccgaggttcgggtgactgtcctcagacaggctgattctcaggtgacggaggtttgtgcagctacatacatgatggggaatgagctgaccttcctcgacgatagcatttgcactgggacaagctccgggaaccaagtgaacctgaccattcagggcctgagagccatggacaccggactgtatatctgtaaggtcgagctgatgtaccctccgccgtattacctgggaattgggaacggtacacagatatacgtcatcgaccccgagccttgcccggatagcgatcaggaaccaaaatcttccgataagacacatacatcaccgccaagccctgctccagaactactgggaggatcatcggtcttcctattccctccgaaacctaaggatacgcttatgatttccagaactccagaggtgacgtgtgtggtagtcgatgtgagtcacgaagaccctgaggtcaaattcaattggtacgtggatggcgtggaggtccacaacgcgaaaactaaaccccgcgaggagcaatataactccacctatcgggtcgtcagcgtactcaccgtgttgcatcaggattggcttaacgggaaggagtataagtgcaaggtgtccaacaaggcactcccagcccctatcgagaagaccataagtaaagcaaaggggcaaccaagagagccacaggtttacacgttacctccctcacgggacgagctgaccaaaaaccaagtgagcttgacctgcttggtaaagggattctatccaagcgacatcgcagtggagtgggagtcaaacggtcagcccgaaaataactacaagacaacccccccggttctggacagcgacggctctttttttctatatagcaaacttaccgtggacaaatcccggtggcagcagggaaacgtgtttagctgttccgtcatgcacgaagcgcttcacaatcattatacacagaaatccctgtccctcagtcccggtaaa

SEQ ID NO: 153972 - DNA, 1149 bp, Artificial Sequence
  derived and/or modified sequence
atgggtgttctattaacgcaacgaacgttactatcgctagtattagcgctattatttccgtcgatggcgtcgatggcgatgcatgtagcgcaaccggcggtagtactagcgtcgtcgcgtggtatagcgtcgtttgtttgtgaatatgcgtcgccgggtaaagcgacggaagtacgagttacggtattacgtcaagcggattcgcaagtaacggaagtatgtgcggcgacgtatatgatgggtaatgaactaacgtttttagatgattcgatatgtacgggtacgtcgtcgggtaatcaagttaatttaacgatacaaggtttacgagcgatggatacgggtttatatatatgtaaagtagaattaatgtatccgccgccgtattatctaggtataggtaatggtacgcaaatatatgtaatagatccggaaccgtgtccggattcggatcaagaaccgaaatcgtcggataaaacgcatacgtcgccgccgtcgccggcgccggaattattaggtggttcgtcggtatttttatttccgccgaaaccgaaagatacgctaatgatatcgcgtacgccggaagtaacgtgtgtagtagttgatgtatcgcatgaagatccggaagtaaaatttaattggtatgtagatggtgttgaagttcataatgcgaaaacgaaaccgcgtgaagaacaatataattcgacgtatcgtgttgtatcggtattaacggtattacatcaagattggttaaatggtaaagaatataaatgtaaagtttcgaataaagcgctaccggcgccgatagaaaaaacgatatcgaaagcgaaaggtcaaccgcgagaaccgcaagtatatacgctaccgccgtcgcgtgatgaactaacgaaaaatcaagtatcgttaacgtgtttagtaaaaggtttttatccgtcggatatagcggttgaatgggaatcgaatggtcaaccggaaaataattataaaacgacgccgccggttttagattcggatggttcgttttttctatattcgaaattaacggtagataaatcgcgatggcaacaaggtaatgtattttcgtgttcggtaatgcatgaagcgttacataatcattatacgcaaaaatcgttatcgctatcgccgggtaaa

SEQ ID NO: 153973 - DNA, 1149 bp, Artificial Sequence
  derived and/or modified sequence
atgggcgtgttgctcacccagcggactctgctttcactggtcctcgccctcctttttccatcgatggcatcgatggcgatgcacgtggctcaacctgcggtggtgctggcatcgtcacgcggcattgcatccttcgtttgtgagtacgccagccccggaaaagcgactgaagtgagagtaactgtgctcagacaggcagattcacaagtcacggaggtctgcgcagccacctatatgatgggtaatgaactgacgttccttgacgattcgatttgtactgggacctcgagcggaaatcaagtcaaccttaccattcaaggtctgagggcaatggataccgggctgtacatatgtaaggtggaacttatgtacccacctccttactacctggggattggaaatggtacccagatctacgtgatcgatccagaaccttgtcccgactccgatcaagagccaaagtcgtctgataaaacgcataccagccctccctcacctgcacctgagcttttgggaggctcaagcgtgttcctctttccccctaagccgaaggatactcttatgatcagcagaactccagaagtgacctgcgttgtggtagacgtctcacatgaggatccagaagtgaagtttaactggtatgtcgatggagtggaggtccataatgcaaagaccaaaccaagagaggagcagtacaactcgacttacagagtggtgagcgtcctgaccgttctgcatcaggactggcttaacggaaaagaatacaagtgcaaggtgtctaacaaagccctcccggcacctattgaaaaaacgatctccaaggcaaagggacaaccacgcgaacctcaagtgtacacgctgcccccttcgcgcgacgaactgaccaagaatcaggtgtctctgacctgtttggtcaagggcttttacccatctgacatagccgtcgagtgggaaagcaacggccagcctgaaaacaattacaagactactcctcctgtgctggattccgatggatcgttctttctgtactctaagctgactgtggacaagtctcgttggcagcaaggcaacgtgtttagctgttccgtgatgcacgaagctcttcataaccactacactcagaaaagcctctctcttagtcccggaaag

SEQ ID NO: 153974 - DNA, 1149 bp, Artificial Sequence
  derived and/or modified sequence
atgggagtgctgctcacccaaagaaccctcttgtcgctggtgctcgccctgctgttcccgagcatggcttcgatggcgatgcacgtggcacaaccggcggtggtgctcgcatcatccagaggaatcgcgtctttcgtctgtgaatacgcaagccctggaaaggcaaccgaagtgagagtcactgttctccggcaggctgactcgcaggtgactgaagtgtgcgccgcaacctacatgatgggcaacgaattgaccttccttgacgactccatctgcaccggcactagctccggaaaccaggtgaatcttaccatccaaggcctgagggccatggatacgggtctttacatctgtaaggtggaactcatgtacccaccgccgtactatctgggcatcggaaacggaacccagatctatgtgatcgatccggaaccgtgtcccgactcggaccaagagccgaagtcatccgacaagacccacacctcccctcctagcccagccccggagcttctgggaggatcgtcagtctttctcttccctcctaagccgaaggatactctcatgatctcgcggactccagaggtgacctgcgtggtggtggatgtgtcacacgaggatcccgaagtcaagtttaactggtacgtggacggcgtggaagtccacaacgcaaagacgaagccgagggaggaacaatacaattccacctaccgggtcgtgtctgtcttgactgtgctccatcaagactggctcaatggtaaggagtacaaatgcaaagtgagtaacaaagccctgcccgctccgatcgaaaaaaccatcagcaaagccaaaggacagccgcgcgagcctcaagtgtacactctcccgccgagccgggacgaactgactaagaatcaagtctccttgacttgtctcgtcaaggggttttacccatccgatatcgccgtggagtgggagtcaaacggccagccagagaacaattacaagactaccccgccggtgctggacagcgacggatcctttttcctttactccaaactgacggtggataagtcccggtggcagcaaggcaacgtgttctcctgctcggtgatgcatgaggccttgcacaaccactacactcagaagtcactgtcgctctccccgggcaag

SEQ ID NO: 153975 - DNA, 1149 bp, Artificial Sequence
  derived and/or modified sequence
atgggtgtgctgctgacacagcggacattgctttcactggtgctggccttgctttttccttccatggcgagcatggccatgcatgttgctcagcccgcagtggtgctggcgagctcccgggggatcgcttcttttgtgtgcgagtatgcatcccccggcaaggccactgaggtccgggttacagtgttgcggcaggcagactctcaggtcaccgaggtgtgcgcggcgacctacatgatgggaaacgaattgaccttcctcgacgatagcatatgcactggcactagcagcggtaatcaggtgaaccttacaatccagggcttgcgggctatggacaccggcctgtacatttgcaaagtggagctgatgtaccccccaccctactacctcgggattggtaacggaacacagatctatgtgatcgatccagaaccatgccctgattctgaccaggagcccaaatccagtgacaagacacatacgagccctccatcccccgccccagaactgctgggaggctcctctgtcttcctctttcctcccaagcccaaggacaccttgatgatctcaaggacccctgaggtaacatgtgttgtggtagatgtcagtcacgaggacccagaagtaaaattcaattggtatgtcgatggagtggaggtacataacgcaaagacaaaacccagagaagaacaatataacagcacttatcgggtggtaagcgtgttaaccgtcctccatcaagattggctcaatgggaaagagtataagtgtaaggtttctaacaaggccctcccggcgccgatagagaaaacgatttctaaggcaaaaggacaaccccgtgagccccaggtttatacccttcccccatccagggatgaacttactaaaaaccaggtgtctcttacctgtctggtaaaagggttttaccctagtgacatcgccgtcgaatgggagtctaatggacagccagaaaacaactacaagaccacccctcccgtgctggattcagatggttcctttttcctttattccaaactaacagtggacaagtcaaggtggcagcagggcaatgtcttcagttgttctgtgatgcacgaggcgttgcacaatcactatactcagaagtcattatcactgtcaccagggaag

SEQ ID NO: 153976 - DNA, 1149 bp, Artificial Sequence
  derived and/or modified sequence
atgggagtattattaactcaaagaacactactctcattagttttagctttattatttccatcaatggcatctatggctatgcatgtcgcacaaccagctgttgttttagcatcttcaagaggaattgcatcttttgtttgtgaatatgcttcaccaggaaaagctactgaagttagagtaacagttcttagacaagctgatagtcaagtaacagaagtttgtgctgcaacatatatgatgggtaacgagttaacatttttagatgattctatttgtactgggacttcatctggtaatcaagttaatcttactattcagggactacgagcaatggatactggtttatatatatgtaaagttgaattaatgtatccaccaccatattatttaggaattggtaatggaacacaaatttatgttatagatccagaaccatgtccagatagtgatcaagaaccaaaatcatcagataagactcatacttctccaccatcaccagcacctgaattacttggaggaagttcagtttttttatttcctcctaaaccaaaagacacacttatgatcagtaggacacctgaagttacctgtgtagttgttgatgtttcacatgaagatccagaagttaaatttaattggtatgttgatggagttgaagttcacaatgcaaagacaaaaccacgtgaagaacaatacaattcaacatatagagttgtttctgtacttaccgtacttcatcaagactggcttaatggaaaagaatataagtgtaaagttagtaataaagctctacctgctccaatagaaaaaactatatcaaaagctaaaggacaaccaagagaaccacaagtatatacattaccaccaagtcgtgatgaattaacaaagaaccaagtaagccttacatgtcttgttaaaggattctatccaagtgatatagcagttgaatgggaatctaatggacaaccagaaaataattataaaacaactccaccagttttagattctgatggttcattttttttatattctaaattaactgtagataagagtagatggcaacaaggaaatgtgttttcttgctctgttatgcatgaggcccttcataatcattacactcaaaaatctctttcacttagtccaggaaaa

SEQ ID NO: 153977 - DNA, 1149 bp, Artificial Sequence
  derived and/or modified sequence
atgggagtgctgcttacccagaggaccctgctgagcctggtgctggccctcttgttcccctcaatggccagcatggcaatgcacgtggcccagccggccgtggttctggcgtcgtcacgggggattgcatccttcgtgtgcgaatacgcgagccccggcaaggcgaccgaggtgcgggtgactgtgctgcgccaggctgactcccaagtgactgaggtctgcgccgcaacctacatgatgggaaacgaacttacgttcctggacgattcgatctgcaccggaacctcatcgggaaaccaagtgaatctgacgatccaaggtctgcgggctatggatactggcctgtacatctgcaaggtcgaactgatgtacccaccaccgtattacctgggaataggaaatggaacccagatctacgtgatcgacccggagccttgcccagacagcgaccaggagcctaagtcgagcgataagacccatacgtcccctccgtcgcccgcgcctgagttgctcggtggatcctcagtctttctgttcccaccgaagccaaaagacacgctcatgatctcgcgcacccctgaagttacctgcgtggtcgtggacgtgtcacatgaggaccccgaggtgaagttcaactggtacgtggacggtgtcgaagtgcataacgctaagactaaacctcgcgaggaacagtataactcgacttacagagttgtgagcgtgctgaccgtgctgcaccaagactggctcaacggaaaagaatacaagtgtaaggtgagcaacaaggccctgccggcgccgatcgagaaaaccatctccaaggccaaaggacaaccccgggagccccaagtgtacaccctgccgccttccagagatgagctcactaagaatcaggtgtcgctcacttgtctggtgaaagggttctacccctcagatattgccgtggagtgggaatccaacggacaaccagagaacaactacaagactaccccgccagtgctcgactcggatgggtcgttcttcctgtactccaaacttaccgtcgataaatcccggtggcaacagggcaatgtgttttcgtgcagcgtgatgcatgaggcgctccataaccattacacccagaagtcattgagcctctcacccggtaag

SEQ ID NO: 153978 - DNA, 1149 bp, Artificial Sequence
  derived and/or modified sequence
atgggagtgctgctgactcagcggacactgctctctctcgttttggccttgctgttcccaagtatggcttcgatggccatgcacgtggcccagcctgcggttgtgttggcaagttcaagaggaattgcctccttcgtgtgcgagtatgctagtccaggcaaggcaaccgaggtccgcgtgacagttctgcggcaggccgacagccaggtgaccgaggtgtgcgctgccacatacatgatgggcaacgagctcaccttccttgacgattctatttgtacaggaacttcctcagggaaccaagtgaatctgaccatccagggtctgcgagccatggataccggattgtacatatgtaaggtcgagctcatgtacccaccaccctattacctggggataggcaatggcactcaaatctatgtaatagatccagaaccatgtcctgattctgatcaggagcccaagtccagtgacaaaacgcatacaagcccgcctagccccgcccccgagcttctaggtggatcttccgtttttttgttcccacctaagccgaaagacacgcttatgataagtagaacccctgaagtgacctgcgtggtagttgatgtatctcacgaggatcccgaagtgaagtttaattggtatgttgatggggtcgaggtgcacaatgccaagacgaagccacgagaggagcagtacaacagtacataccgggtggtatcggtgctaactgtcctccaccaggattggctgaatggtaaagaatacaaatgtaaagtttccaataaagcgctgcccgctccgatcgagaagaccatcagcaaggccaagggacagccccgcgaaccccaagtgtacactctcccccctagccgcgatgaactgactaagaatcaggtgagcctgacctgtctggttaagggcttttaccccagcgatattgccgtggaatgggagagcaacggacagcctgaaaataactataaaaccaccccaccagttctcgattccgatggttctttctttctgtattccaaactgaccgtcgacaagagccgatggcagcagggaaatgtgtttagttgcagtgtgatgcacgaggctctgcataaccactacacacagaagtccctaagtctttcgcccggaaag

SEQ ID NO: 153979 - DNA, 672 bp, Artificial Sequence
  derived and/or modified sequence
atggcttgtctaggcttccagcggcataaggcacagcttaatttagcaaccaggacctggccctgtaccctgcttttcttcctcctattcattcctgttttttgtaaagcaatgcatgtcgcccagcctgccgtggtcctcgccagctctcggggcatcgctagtttcgtctgcgaatacgcttcacccggtaaagccacggaagtgagagtgactgtattgcgccaggccgactcacaggttaccgaagtgtgtgcagcgacatacatgatggggaacgaactgacgtttctcgatgactctatttgtacaggaacctcttccggcaatcaagttaaccttaccatccagggactgcgcgccatggataccggcctgtacatctgcaaagtcgagctgatgtatcccccaccttactacctgggaattggcaacggcacacaaatctacgtgattgacccagagccatgtcccgacagtgattttcttctgtggattctcgctgccgtaagctctggcctctttttttattcgttcctcttaaccgcagtcagcttaagcaagatgctaaaaaaacgttcgcctctgactacgggtgtgtacgtgaagatgccccccacggagcccgaatgtgagaagcagttccagccctatttcatcccgattaattag

SEQ ID NO: 153980 - DNA, 672 bp, Artificial Sequence
  derived and/or modified sequence
atggcctgcctgggcttccagaggcacaaggcccagctgaacctggccaccaggacctggccctgcaccctgctcttcttcctgctcttcatccctgtgttctgcaaggccatgcacgtggcccagcctgctgtggtgctggccagcagccggggcatcgccagctttgtgtgtgaatatgccagccctgggaaggccacagaggtgcgggtgacagtgctgcggcaggccgacagccaggtgacagaggtgtgtgccgccacctacatgatgggaaatgagctgaccttcctggatgacagcatctgcaccggcaccagcagcggcaaccaggtgaacctgaccatccagggcctgcgggccatggacaccggcctgtacatctgcaaggtggagctgatgtaccccccaccctactacctgggcattggaaatggcacccagatctacgtgattgatcctgagccctgcccagacagcgacttcctgctgtggatcctggccgctgtgagcagcggcctcttcttctacagcttcctgctgacagctgtgtccctgagcaagatgctgaagaagaggagccccctgaccaccggggtgtatgtgaagatgccacccacagagccagaatgtgagaagcagttccagccctacttcatccccatcaactag

SEQ ID NO: 153981 - DNA, 672 bp, Artificial Sequence
  derived and/or modified sequence
atggcctgcctgggcttccagcggcacaaggcccagctgaacctggcgacacgaacctggccgtgcaccttgctgtttttccttctgttcattccagtcttctgtaaagccatgcatgtagctcagccagctgtggttttggccagcagcagagggatcgcatcattcgtgtgtgagtacgcctcacccggtaaggccactgaagtgcgagttaccgtacttaggcaggcggatagccaggttactgaggtgtgcgccgccacgtatatgatgggcaacgagctaacatttctggatgactctatttgcacaggaacctctagtggcaaccaggtgaatctaacaattcaggggctgagggctatggatactggcctgtacatctgcaaagtcgagcttatgtacccacccccttattatctcgggatcggaaatggaacgcagatttacgtgattgatccagagccatgccctgactctgacttcctgctgtggatccttgctgcagtttcctcaggattgttcttttattcattcctactgactgcggtctccctctccaagatgctgaagaaacgctcgcctctaacaaccggggtgtacgtgaaaatgccccccacagagccagagtgcgagaagcaatttcagccctactttatcccgatcaactag

SEQ ID NO: 153982 - DNA, 672 bp, Artificial Sequence
  derived and/or modified sequence
atggcttgcctgggatttcaacgacacaaggctcaactgaatttagcgacaaggacatggccatgcaccctgcttttcttcctgttattcatccccgttttctgtaaggccatgcacgtcgctcagcccgcagttgtgctcgcaagttctaggggtattgcctcctttgtttgcgaatacgcctcccctggcaaagccaccgaagtgcgggtcaccgtcctgagacaagccgattcacaagtcaccgaggtttgtgcggcaacatatatgatgggaaatgaacttacattcctggacgactctatctgtacaggcacatccagcggcaaccaagtgaacctgacaatccagggcctaagagccatggacacaggactgtatatttgcaaagttgagctcatgtacccacccccatattacctcggaattggtaacggtacgcagatctacgtcatcgatcccgagccatgtcctgattctgatttcctgctctggatactggctgcagtttcctccggcctgtttttttatagctttctcctcacagccgtctctctgtcgaagatgcttaagaagcggtcccctttgactactggtgtgtatgtaaaaatgccccctactgagcccgaatgcgaaaagcagtttcagccatactttatcccaattaattag

SEQ ID NO: 153983 - DNA, 1977 bp, Artificial Sequence
  derived and/or modified sequence
gccttctgtgtgtgcacatgtgtaatacatatctgggatcaaagctatctatataaagtccttgattctgtgtgggttcaaacacatttcaaagcttcaggatcctgaaaggttttgctctacttcctgaagacctgaacaccgctcccataaagccatggcttgccttggatttcagcggcacaaggctcagctgaacctggctaccaggacctggccctgcactctcctgttttttcttctcttcatccctgtcttctgcaaagcaatgcacgtggcccagcctgctgtggtactggccagcagccgaggcatcgccagctttgtgtgtgagtatgcatctccaggcaaagccactgaggtccgggtgacagtgcttcggcaggctgacagccaggtgactgaagtctgtgcggcaacctacatgatggggaatgagttgaccttcctagatgattccatctgcacgggcacctccagtggaaatcaagtgaacctcactatccaaggactgagggccatggacacgggactctacatctgcaaggtggagctcatgtacccaccgccatactacctgggcataggcaacggaacccagatttatgtaattgatccagaaccgtgcccagattctgacttcctcctctggatccttgcagcagttagttcggggttgtttttttatagctttctcctcacagctgtttctttgagcaaaatgctaaagaaaagaagccctcttacaacaggggtctatgtgaaaatgcccccaacagagccagaatgtgaaaagcaatttcagccttattttattcccatcaattgagaaaccattatgaagaagagagtccatatttcaatttccaagagctgaggcaattctaacttttttgctatccagctatttttatttgtttgtgcatttggggggaattcatctctctttaatataaagttggatgcggaacccaaattacgtgtactacaatttaaagcaaaggagtagaaagacagagctgggatgtttctgtcacatcagctccactttcagtgaaagcatcacttgggattaatatggggatgcagcattatgatgtgggtcaaggaattaagttagggaatggcacagcccaaagaaggaaaaggcagggagcgagggagaagactatattgtacacaccttatatttacgtatgagacgtttatagccgaaatgatcttttcaagttaaattttatgccttttatttcttaaacaaatgtatgattacatcaaggcttcaaaaatactcacatggctatgttttagccagtgatgctaaaggttgtattgcatatatacatatatatatatatatatatatatatatatatatatatatatatatatatatatattttaatttgatagtattgtgcatagagccacgtatgtttttgtgtatttgttaatggtttgaatataaacactatatggcagtgtctttccaccttgggtcccagggaagttttgtggaggagctcaggacactaatacaccaggtagaacacaaggtcatttgctaactagcttggaaactggatgaggtcatagcagtgcttgattgcgtggaattgtgctgagttggtgttgacatgtgctttggggcttttacaccagttcctttcaatggtttgcaaggaagccacagctggtggtatctgagttgacttgacagaacactgtcttgaagacaatggcttactccaggagacccacaggtatgaccttctaggaagctccagttcgatgggcccaattcttacaaacatgtggttaatgccatggacagaagaaggcagcaggtggcagaatggggtgcatgaaggtttctgaaaattaacactgcttgtgtttttaactcaatattttccatgaaaatgcaacaacatgtataatatttttaattaaataaaaatctgtggtggtcgtttt

SEQ ID NO: 153984 - DNA, 672 bp, Artificial Sequence
  derived and/or modified sequence
atggcctgcctgggcttccagagacacaaggcccagctgaacctggccaccagaacctggccctgcaccctgctgttcttcctgctgttcatccccgtgttctgcaaggccatgcacgtggcccagcccgccgtggtgctggccagcagcagaggcatcgccagcttcgtgtgcgagtacgccagccccggcaaggccaccgaggtgagagtgaccgtgctgagacaggccgacagccaggtgaccgaggtgtgcgccgccacctacatgatgggcaacgagctgaccttcctggacgacagcatctgcaccggcaccagcagcggcaaccaggtgaacctgaccatccagggcctgagagccatggacaccggcctgtacatctgcaaggtggagctgatgtacccccccccctactacctgggcatcggcaacggcacccagatctacgtgatcgaccccgagccctgccccgacagcgacttcctgctgtggatcctggccgccgtgagcagcggcctgttcttctacagcttcctgctgaccgccgtgagcctgagcaagatgctgaagaagagaagccccctgaccaccggcgtgtacgtgaagatgccccccaccgagcccgagtgcgagaagcagttccagccctacttcatccccatcaactag

SEQ ID NO: 153985 - RNA, 1295 nt, Artificial Sequence
  derived and/or modified sequence
gggaaauaagagagaaaagaagaguaagaagaaauauaagagccaccaugggugucuugcuuacucagcggaccuugcugagccuuguguuggcgcuccucuuuccguccauggccucaauggccaugcaugucgcccagccugccgugguccuggcaucaucacgaggaauugcguccuuugugugugaguaugcgucgccgggaaaggcgaccgaaguaagagugacuguacugaggcaggcggauagccaggugacagaggucugugcagcgacuuauaugauggggaacgaguugacguucuuggaugacucgaucugcacggggacaucguccgggaaucaagugaacuugacgauucaagggcuccgcgcuauggacacuggccuguacauuugcaagguggaacuuauguacccgccacccuacuaucuuggaauugguaaugggacacagaucuacgugaucgacccugagcccugccccgacuccgaccaggaaccgaagagcucggacaagacgcacacaucgcccccuucgccugcucccgagcuucucgguggcagcuccgucuuucuguucccgccgaaaccaaaagauacccucaugaucucacggacccccgaaguaacaugugugguagucgaugucucgcacgaggauccagaggugaaguucaauugguauguggacggcgucgaaguccauaacgccaaaaccaaaccccgggaagagcaguacaacucgaccuaucgcguagucuccgucuugacgguacuccaccaggacugguugaacgggaaagaguacaagugcaaagucagcaacaaggcacucccugcgcccaucgagaaaacaaucucgaaagcaaagggacagcccagagagccccaaguguacacgcucccgccgucacgcgacgaauugacgaaaaaucaggugucacuuacguguuuggugaagggauucuacccguccgauaucgccgucgaaugggagucgaauggacagcccgagaacaacuauaagacgacucccccagugcucgacucagaugguucguucuuucuguacucgaagcucacaguagauaagucgagguggcagcagggaaauguguuuucgugcucggucaugcacgaagcguugcauaaucacuauacucaaaaaucacuuagccugucacccggaaagugauaagcugccuucugcggggcuugccuucuggccaugcccuucuucucucccuugcaccuguaccucuuggucuuugaauaaagccugaguaggaag

SEQ ID NO: 153986 - protein, 771 aa, Artificial Sequence
  derived and/or modified sequence
GVPVIKWKKDGIHLALGMDERKQQLSNGSLLIQNILHSRHHKPDEGLYQCEASLGDSGSIISRTAKVAVAGPLRFLSQTESVTAFMGDTVLLKCEVIGEPMPTIHWQKNQQDLTPIPGDSRVVVLPSGALQISRLQPGDIGIYRCSARNPASSRTGNEAEVRILSDPGLHRQLYFLQRPSNVVAIEGKDAVLECCVSGYPPPSFTWLRGEEVIQLRSKKYSLLGGSNLLISNVTDDDSGMYTCVVTYKNENISASAELTVLVPPWFLNHPSNLYAYESMDIEFECTVSGKPVPTVNWMKNGDVVIPSDYFQIVGGSNLRILGVVKSDEGFYQCVAENEAGNAQTSAQLIVPKPAIPSSSVLPSAPRDVVPVLVSSRFVRLSWRPPAEAKGNIQTFTVFFSREGDNRERALNTTQPGSLQLTVGNLKPEAMYTFRVVAYNEWGPGESSQPIKVATQPELQVPGPVENLQAVSTSPTSILITWEPPAYANGPVQGYRLFCTEVSTGKEQNIEVDGLSYKLEGLKKFTEYSLRFLAYNRYGPGVSTDDITVVTLSDVPSAPPQNVSLEVVNSRSIKVSWLPPPSGTQNGFITGYKIRHRKTTRRGEMETLEPNNLWYLFTGLEKGSQYSFQVSAMTVNGTGPPSNWYTAETPENDLDESQVPDQPSSLHVRPQTNCIIMSWTPPLNPNIVVRGYIIGYGVGSPYAETVRVDSKQRYYSIERLESSSHYVISLKAFNNAGEGVPLYESATTRSITVRRHNISKLHSNRPQTKHNV

SEQ ID NO: 153987 - protein, 1447 aa, Artificial Sequence
  derived and/or modified sequence
MENSLRCVWVPKLAFVLFGASLFSAHLQVTGFQIKAFTALRFLSEPSDAVTMRGGNVLLDCSAESDRGVPVIKWKKDGIHLALGMDERKQQLSNGSLLIQNILHSRHHKPDEGLYQCEASLGDSGSIISRTAKVAVAGPLRFLSQTESVTAFMGDTVLLKCEVIGEPMPTIHWQKNQQDLTPIPGDSRVVVLPSGALQISRLQPGDIGIYRCSARNPASSRTGNEAEVRILSDPGLHRQLYFLQRPSNVVAIEGKDAVLECCVSGYPPPSFTWLRGEEVIQLRSKKYSLLGGSNLLISNVTDDDSGMYTCVVTYKNENISASAELTVLVPPWFLNHPSNLYAYESMDIEFECTVSGKPVPTVNWMKNGDVVIPSDYFQIVGGSNLRILGVVKSDEGFYQCVAENEAGNAQTSAQLIVPKPAIPSSSVLPSAPRDVVPVLVSSRFVRLSWRPPAEAKGNIQTFTVFFSREGDNRERALNTTQPGSLQLTVGNLKPEAMYTFRVVAYNEWGPGESSQPIKVATQPELQVPGPVENLQAVSTSPTSILITWEPPAYANGPVQGYRLFCTEVSTGKEQNIEVDGLSYKLEGLKKFTEYSLRFLAYNRYGPGVSTDDITVVTLSDVPSAPPQNVSLEVVNSRSIKVSWLPPPSGTQNGFITGYKIRHRKTTRRGEMETLEPNNLWYLFTGLEKGSQYSFQVSAMTVNGTGPPSNWYTAETPENDLDESQVPDQPSSLHVRPQTNCIIMSWTPPLNPNIVVRGYIIGYGVGSPYAETVRVDSKQRYYSIERLESSSHYVISLKAFNNAGEGVPLYESATTRSITDPTDPVDYYPLLDDFPTSVPDLSTPMLPPVGVQAVALTHDAVRVSWADNSVPKNQKTSEVRLYTVRWRTSFSASAKYKSEDTTSLSYTATGLKPNTMYEFSVMVTKNRRSSTWSMTAHATTYEAAPTSAPKDLTVITREGKPRAVIVSWQPPLEANGKITAYILFYTLDKNIPIDDWIMETISGDRLTHQIMDLNLDTMYYFRIQARNSKGVGPLSDPILFRTLKVEHPDKMANDQGRHGDGGYWPVDTNLIDRSTLNEPPIGQMHPPHGSVTPQKNSNLLVIIVVTVGVITVLVVVIVAVICTRRSSAQQRKKRATHSAGKRKGSQKDLRPPDLWIHHEEMEMKNIEKPSGTDPAGRDSPIQSCQDLTPVSHSQSETQLGSKSTSHSGQDTEEAGSSMSTLERSLAARRAPRAKLMIPMDAQSNNPAVVSAIPVPTLESAQYPGILPSPTCGYPHPQFTLRPVPFPTLSVDRGFGAGRSQSVSEGPTTQQPPMLPPSQPEHSSSEEAPSRTIPTACVRPTHPLRSFANPLLPPPMSAIEPKVPYTPLLSQPGPTLPKTHVKTASLGLAGKARSPLLPVSVPTAPEVSEESHKPTEDSANVYEQDDLSEQMASLEGLMKQLNAITGSAF

SEQ ID NO: 153988 - DNA, 4344 bp, Artificial Sequence
  derived and/or modified sequence
atggagaacagcctgagatgcgtgtgggtgcccaagctggccttcgtgctgttcggcgccagcctgttcagcgcccacctgcaggtgaccggcttccagatcaaggccttcaccgccctgagattcctgagcgagcccagcgacgccgtgaccatgagaggcggcaacgtgctgctggactgcagcgccgagagcgacagaggcgtgcccgtgatcaagtggaagaaggacggcatccacctggccctgggcatggacgagagaaagcagcagctgagcaacggcagcctgctgatccagaacatcctgcacagcagacaccacaagcccgacgagggcctgtaccagtgcgaggccagcctgggcgacagcggcagcatcatcagcagaaccgccaaggtggccgtggccggccccctgagattcctgagccagaccgagagcgtgaccgccttcatgggcgacaccgtgctgctgaagtgcgaggtgatcggcgagcccatgcccaccatccactggcagaagaaccagcaggacctgacccccatccccggcgacagcagagtggtggtgctgcccagcggcgccctgcagatcagcagactgcagcccggcgacatcggcatctacagatgcagcgccagaaaccccgccagcagcagaaccggcaacgaggccgaggtgagaatcctgagcgaccccggcctgcacagacagctgtacttcctgcagagacccagcaacgtggtggccatcgagggcaaggacgccgtgctggagtgctgcgtgagcggctaccccccccccagcttcacctggctgagaggcgaggaggtgatccagctgagaagcaagaagtacagcctgctgggcggcagcaacctgctgatcagcaacgtgaccgacgacgacagcggcatgtacacctgcgtggtgacctacaagaacgagaacatcagcgccagcgccgagctgaccgtgctggtgcccccctggttcctgaaccaccccagcaacctgtacgcctacgagagcatggacatcgagttcgagtgcaccgtgagcggcaagcccgtgcccaccgtgaactggatgaagaacggcgacgtggtgatccccagcgactacttccagatcgtgggcggcagcaacctgagaatcctgggcgtggtgaagagcgacgagggcttctaccagtgcgtggccgagaacgaggccggcaacgcccagaccagcgcccagctgatcgtgcccaagcccgccatccccagcagcagcgtgctgcccagcgcccccagagacgtggtgcccgtgctggtgagcagcagattcgtgagactgagctggagaccccccgccgaggccaagggcaacatccagaccttcaccgtgttcttcagcagagagggcgacaacagagagagagccctgaacaccacccagcccggcagcctgcagctgaccgtgggcaacctgaagcccgaggccatgtacaccttcagagtggtggcctacaacgagtggggccccggcgagagcagccagcccatcaaggtggccacccagcccgagctgcaggtgcccggccccgtggagaacctgcaggccgtgagcaccagccccaccagcatcctgatcacctgggagccccccgcctacgccaacggccccgtgcagggctacagactgttctgcaccgaggtgagcaccggcaaggagcagaacatcgaggtggacggcctgagctacaagctggagggcctgaagaagttcaccgagtacagcctgagattcctggcctacaacagatacggccccggcgtgagcaccgacgacatcaccgtggtgaccctgagcgacgtgcccagcgcccccccccagaacgtgagcctggaggtggtgaacagcagaagcatcaaggtgagctggctgcccccccccagcggcacccagaacggcttcatcaccggctacaagatcagacacagaaagaccaccagaagaggcgagatggagaccctggagcccaacaacctgtggtacctgttcaccggcctggagaagggcagccagtacagcttccaggtgagcgccatgaccgtgaacggcaccggcccccccagcaactggtacaccgccgagacccccgagaacgacctggacgagagccaggtgcccgaccagcccagcagcctgcacgtgagaccccagaccaactgcatcatcatgagctggaccccccccctgaaccccaacatcgtggtgagaggctacatcatcggctacggcgtgggcagcccctacgccgagaccgtgagagtggacagcaagcagagatactacagcatcgagagactggagagcagcagccactacgtgatcagcctgaaggccttcaacaacgccggcgagggcgtgcccctgtacgagagcgccaccaccagaagcatcaccgaccccaccgaccccgtggactactaccccctgctggacgacttccccaccagcgtgcccgacctgagcacccccatgctgccccccgtgggcgtgcaggccgtggccctgacccacgacgccgtgagagtgagctgggccgacaacagcgtgcccaagaaccagaagaccagcgaggtgagactgtacaccgtgagatggagaaccagcttcagcgccagcgccaagtacaagagcgaggacaccaccagcctgagctacaccgccaccggcctgaagcccaacaccatgtacgagttcagcgtgatggtgaccaagaacagaagaagcagcacctggagcatgaccgcccacgccaccacctacgaggccgcccccaccagcgcccccaaggacctgaccgtgatcaccagagagggcaagcccagagccgtgatcgtgagctggcagccccccctggaggccaacggcaagatcaccgcctacatcctgttctacaccctggacaagaacatccccatcgacgactggatcatggagaccatcagcggcgacagactgacccaccagatcatggacctgaacctggacaccatgtactacttcagaatccaggccagaaacagcaagggcgtgggccccctgagcgaccccatcctgttcagaaccctgaaggtggagcaccccgacaagatggccaacgaccagggcagacacggcgacggcggctactggcccgtggacaccaacctgatcgacagaagcaccctgaacgagccccccatcggccagatgcaccccccccacggcagcgtgaccccccagaagaacagcaacctgctggtgatcatcgtggtgaccgtgggcgtgatcaccgtgctggtggtggtgatcgtggccgtgatctgcaccagaagaagcagcgcccagcagagaaagaagagagccacccacagcgccggcaagagaaagggcagccagaaggacctgagaccccccgacctgtggatccaccacgaggagatggagatgaagaacatcgagaagcccagcggcaccgaccccgccggcagagacagccccatccagagctgccaggacctgacccccgtgagccacagccagagcgagacccagctgggcagcaagagcaccagccacagcggccaggacaccgaggaggccggcagcagcatgagcaccctggagagaagcctggccgccagaagagcccccagagccaagctgatgatccccatggacgcccagagcaacaaccccgccgtggtgagcgccatccccgtgcccaccctggagagcgcccagtaccccggcatcctgcccagccccacctgcggctacccccacccccagttcaccctgagacccgtgcccttccccaccctgagcgtggacagaggcttcggcgccggcagaagccagagcgtgagcgagggccccaccacccagcagccccccatgctgccccccagccagcccgagcacagcagcagcgaggaggcccccagcagaaccatccccaccgcctgcgtgagacccacccaccccctgagaagcttcgccaaccccctgctgcccccccccatgagcgccatcgagcccaaggtgccctacacccccctgctgagccagcccggccccaccctgcccaagacccacgtgaagaccgccagcctgggcctggccggcaaggccagaagccccctgctgcccgtgagcgtgcccaccgcccccgaggtgagcgaggagagccacaagcccaccgaggacagcgccaacgtgtacgagcaggacgacctgagcgagcagatggccagcctggagggcctgatgaagcagctgaacgccatcaccggcagcgccttctag

SEQ ID NO: 153989 - DNA, 9590 bp, Artificial Sequence
  derived and/or modified sequence
atggagaatagtcttagatgtgtttgggtacccaagctggcttttgtactcttcggagcttccttgttcagcgcgcatcttcaagtaaccggttttcaaattaaagctttcacagcactgcgcttcctctcagaaccttctgatgccgtcacaatgcggggaggaaatgtcctcctcgactgctccgcggagtccgaccgaggagttccagtgatcaagtggaagaaagatggcattcatctggccttgggaatggatgaaaggaagcagcaactttcaaatgggtctctgctgatacaaaacatacttcattccagacaccacaagccagatgagggactttaccaatgtgaggcatctttaggagattctggctcaattattagtcggacagcaaaagttgcagtagcaggaccactgaggttcctttcacagacagaatctgtcacagccttcatgggagacacagtgctactcaagtgtgaagtcattggggagcccatgccaacaatccactggcagaagaaccaacaagacctgactccaatcccaggtgactcccgagtggtggtcttgccctctggagcattgcagatcagccgactccaaccgggggacattggaatttaccgatgctcagctcgaaatccagccagctcaagaacaggaaatgaagcagaagtcagaattttatcagatccaggactgcatagacagctgtattttctgcaaagaccatccaatgtagtagccattgaaggaaaagatgctgtcctggaatgttgtgtttctggctatcctccaccaagttttacctggttacgaggcgaggaagtcatccaactcaggtctaaaaagtattctttattgggtggaagcaacttgcttatctccaatgtgacagatgatgacagtggaatgtatacctgtgttgtcacatataaaaatgagaatattagtgcctctgcagagctcacagtcttggttccgccatggtttttaaatcatccttccaacctgtatgcctatgaaagcatggatattgagtttgaatgtacagtctctggaaagcctgtgcccactgtgaattggatgaagaatggagatgtggtcattcctagtgattattttcagatagtgggaggaagcaacttacggatacttggggtggtgaagtcagatgaaggcttttatcaatgtgtggctgaaaatgaggctggaaatgcccagaccagtgcacagctcattgtccctaagcctgctatcccaagctccagtgtcctcccttcggctcccagagatgtggtccctgtcttggtttccagccgatttgtccgtctcagctggcgcccacctgcagaagcgaaagggaacattcaaactttcacggtctttttctccagagaaggtgacaacagggaacgagcattgaatacaacacagcctgggtcccttcagctcactgtgggaaacctgaagccagaagccatgtacacctttcgagttgtggcttacaatgaatggggaccgggagagagttctcaacccatcaaggtggccacacagcctgagttgcaagttccagggccagtagaaaacctgcaagctgtatctacctcacctacctcaattcttattacctgggaaccccctgcctatgcaaacggtccagtccaaggttacagattgttctgcactgaggtgtccacaggaaaagaacagaatatagaggttgatggactatcttataaactggaaggcctgaaaaaattcaccgaatatagtcttcgattcttagcttataatcgctatggtccgggcgtctctactgatgatataacagtggttacactttctgacgtgccaagtgccccgcctcagaacgtctccctggaagtggtcaattcaagaagtatcaaagttagctggctgcctcctccatcaggaacacaaaatggatttattaccggctataaaattcgacacagaaagacgacccgcaggggtgagatggaaacactggagccaaacaacctctggtacctattcacaggactggagaaaggaagtcagtacagtttccaggtgtcagccatgacagtcaatggtactggaccaccttccaactggtatactgcagagactccagagaatgatctagatgaatctcaagttcctgatcaaccaagctctcttcatgtgaggccccagactaactgcatcatcatgagttggactcctcccttgaacccaaacatcgtggtgcgaggttatattatcggttatggcgttgggagcccttacgctgagacagtgcgtgtggacagcaagcagcgatattattccattgagaggttagagtcaagttcccattatgtaatctccctaaaagcttttaacaatgccggagaaggagttcctctttatgaaagtgccaccaccaggtctataaccgatcccactgacccagttgattattatcctttgcttgatgatttccccacctcggtcccagatctctccacccccatgctcccaccagtaggtgtacaggctgtggctcttacccatgatgctgtgagggtcagctgggcagacaactctgtccctaagaaccaaaagacgtctgaggtgcgactttacaccgtccggtggagaaccagcttttctgcaagtgcaaaatacaagtcagaagacacaacatctctaagttacacagcaacaggcctcaaaccaaacacaatgtatgaattctcggtcatggtaacaaaaaacagaaggtccagtacttggagcatgactgcacatgccaccacgtatgaagcagcccccacctctgctcccaaggacttgacagtcattactagggaagggaagcctcgtgccgtcattgtgagttggcagcctcccttggaagccaatgggaaaattactgcttacatcttattttataccttggacaagaacatcccaattgatgactggattatggaaacaatcagtggtgataggcttactcatcaaatcatggatctcaaccttgatactatgtattactttcgaattcaagcacgaaattcaaaaggagtggggccactctctgatcctatcctcttcaggactctgaaagtggaacaccctgacaaaatggctaatgaccaaggtcgtcatggagatggaggttattggccagttgatactaatttgattgatagaagcaccctaaatgagccgccaattggacaaatgcaccccccgcatggcagtgtcactcctcagaagaacagcaacctgcttgtgatcattgtggtcaccgttggtgtcatcacagtgctggtagtggtcatcgtggctgtgatttgcacccgacgctcttcagcccagcagagaaagaaacgggccacccacagtgctggcaaaaggaagggcagccagaaggacctccgaccccctgatctttggatccatcatgaagaaatggagatgaaaaatattgaaaagccatctggcactgaccctgcaggaagggactctcccatccaaagttgccaagacctcacaccagtcagccacagccagtcagaaacccaactgggaagcaaaagcacctctcattcaggtcaagacactgaggaagcagggagctctatgtccactctggagaggtcgctggctgcacgccgagccccccgggccaagctcatgattcccatggatgcccagtccaacaatcctgctgtcgtgagcgccatcccggtgccaacgctagaaagtgcccagtacccaggaatcctcccgtctcccacctgtggatatccccacccgcagttcactctccggcctgtgccattcccaacactctcagtggaccgaggtttcggagcaggaagaagtcagtcagtgagtgaaggaccaactacccaacaaccacctatgctgcccccatctcagcctgagcattctagcagcgaggaggcaccaagcagaaccatccccacagcttgtgttcgaccaactcacccactccgcagctttgctaatcctttgctacctccaccaatgagtgcaatagaaccgaaagtcccttacacaccacttttgtctcagccagggcccactcttcctaagacccatgtgaaaacagcctcccttgggttggctggaaaagcaagatcccctttgcttcctgtgtctgtgccaacagcccctgaagtgtctgaggagagccacaaaccaacagaggattcagccaatgtgtatgaacaggatgatctgagtgaacaaatggcaagtttggaaggactcatgaagcagcttaatgccatcacaggctcagccttttaacatgtatttctgaatggatgaggtgaattttccgggaactttgcagcataccaattacccataaacagcacacctgtgtccaagaactctaaccagtgtacaggtcacccatcaggaccactcagttaaggaagatcctgaagcagttcagaaggaataagcattccttctttcacaggcatcaggaattgtcaaatgatgattatgagttccctaaacaaaagcaaagatgcattttcactgcaatgtcaaagtttaagctgctagaatagtcatgggcctttgtcactgcagtgaccacactgtcataactaatacctatgttttcctttgtcaaggcctgttgtttaatgtgtaggtctagtcttacaaaatgcaagtgcattatttaagcctgtaccatgccatggcaaaccagtgcaagctcactattttgttttcaacttaaacatacaaagcacccatgggaatctctcatgccatagcaccaaaggattggatgttttccttacagcacaaaaagtaaatagtaaacaaacaaaaggcagagaatgcttatgtttgtaactcagtcattcatcttgcacaagtggtggatattagtgagtggctaaaaattcacctattttggcaagtatttgtaaatccacccttggttaatatgtatgtctggagtccaggaatataaaaatctgcaactagtggcattctgccagcagcagtacatttctggaaagaggatataatatgcaatcttctcagacacatggtaattatatgcttaagcttgtaataggacagttttcaatttgggtggcttttgtgccataccacactgtgatacaatttcaaagcttcactaaggccatcttccttaggagtttggccagaagaatgcccccaccccttcaccccatccctccctgagttctccttggcaactagcgttgggtgaaatggccagctccacatgtcatatggtgcactggccaatgtcgcctgtcttctaatcccgtagaaatggcagactccctgagagcaggaagagaaggaaaataaaaggtagcttctaacagtaccttctcttaaagaatgccaactctgcctacagggtcagtgttggcaagcattggccaccagacccttttgttaagggaaacttttacactacacctgtgtcagagtcagggggaagcagaggggcaggtgccacctgacacttccgacatgtaaatccagcagatacttttcaaagcagcatcttaaactgtggactacagttttaaacttctattgccatgtttatctacagcttggaactagctaaaattaagaacattttgtatgcagcattttagtttctgaattttcagctgcatttggagttaatccctgtttatgcagctgaatcgccaaaagggagctagtttgcatatttatcagttaggtgacttgaaaacccaatgagagagtttcagctgaattattcctttcagctctgcctttgatttcaagcttgagtaggtcataattttaaaagagcatggaagggataggatctttacaacctaatagctccttttattaggtgggtaattatatatgaatccctgaataaaatattttgagcaaaatggcactgtaacagaagtaataattcagtttatttttttacagttttatgtcgggaaggaaatctgatgtcaaagagagggctgttcaaatggttcattagaaagtccggtccatttgcgaatttgttccttcaacaagagtgctcattcaagttactcagattttctggaagtcttttctgaagagctatgtgatgttgttctatgggacagactactcttatttaacatctgggcacttaggtagacaaccttctactgacctggaataaagtgtttcctaacataatattgaattattcagaaataatccattacttcaaaaaagaaaatattcattgggctagcccaaccttctctaggccctaagaattattacctcccctttctaattctagcaaacatggaacattctccttaggcacttgacacccacgagggtaatcctgagtgctcagtttggaataggttgcaaatctcagattttagggattgagtcacaccttcaatctatagaatgaagttgaccaattaaaaaaaaaaaaaaaacctatcattttcacaaatttctagatccttctagtcaaaaataattatttaggaaataaaatttttaaaaatccatttaaatacatgttatttgtcttcagtggaagttatatttctgctgcatgcttttgaaactttcttcattaaatagaatggtttgtcttagtaactggcaatgccagtattagcaccatgcatttaatctataatacaatcaatttaaacatcctcaaaaaactctagtatcatttacctggtagtattaatatacaatgatgtcaccacaacttttgtataactctgttccctttaccctcaaatgattcatatatgtatataattgcctgcccaagttttcaggtaacttattaatttcccagtctcctgatctcttgacaagaagaaacctgtgaatactgcaaactagcctctgacttcctcctactgagtctagttcatggtatccaggactctttatgctcataactctctctgattcccattgggtgatacctgacagccaaccagccgctctgccaccagaactcatttctccctgaaaaagaagaaaatcatatttggcagagcattctctggtctgccctgtaatgtgcttaaatgtcaggcaacatcctcttttttttaaaaaaaatggtatttttctttaaatttcaccctaataagaaagctattttctctcctctgcagaaatttctgcatttgtgaaacttataaaaatttagatagttcaaatgtataaagaatatttggatgatgctctagccaaaagttaaatatttcgtagtgaatcatagccaataagaaaccagtcatacttgcctctttgaataacagagatataagcttctagaatatttaaataatgaagttttacatttgggtattataaaatgcatactcaattgaatgagctgaaaaaaataccaagccagtgatataagtggagatttattaaggattcctgttgagtatattcttagtttcctcaaaatagggattattcaaaattaggtgtatgttcaatctcctgctttggttccagctacacaaggagagccatcctgtgctagtgtgatgtttcagacaacattctgaaactaaaatgtttggcacttattggcttttccaataaagaatctcttaagtacaggtatttctggaagctgttggtgtctgtgcttgaagatgattgctgatacttatccaccctttgggtacttctgttgactttgtttaaataatcatcttatggttgtccccaaatgtaatatggtatctcagatatagcagctggactgtaattacaacaaaaggttacctctaaagataacatcttaccattttagataaaattgtgtcccagaattcttatggtttcggaatgtacatttctagtcaatgaaagaaagaaaaatggaaaaattgtctagtttcaggcatgtttaaagaaaacaaagtcatctgaactttaaaatagatgcagagcagggttactttccctttcactcagttcccttcatgcaaccacaggcagtcctgcaggccagaggttactatcctaacctgctcataaccatatactatacagagcccacaactttctggagatgcagaagcagccatacactcaagtctctgtttttgtaaatcacattcaaagcaacattttactcataatttgcatttctctggtgactttcagaaatcactttagtattgtacagaaaagctttttatttgagtctagtgtttaaaattaaattggatacttgggaaaatcatagataggtgttttgtatgatattccattccaatgcaaaatatatgtacccatgcctcaatgtatcttgctatctaaatacctgttgccaaaaagtattgatttgggaaaaaaaatgccaatttcctggtcagtgaggttatgtaaaagacaaaataccacacccatatcagcaaatgaatattactactcatctggactcttcgttgccactattgcataacgttcacgtggcagacttccagttgcactctctgaaggacttttttctcttactctcaatagagagcctttgtacattgtcatcctatgattgttgttggtagaagagcaagagcaaaactctgcaagatttaataaacacaggggcatgggccaagggatctcactgtgtgctgaacatgtattttcagatgcaagaaaggaatgatggagaggaggagaaatgctgttttttattattgtagggtaaatctgacaattctgaactttgtgaattgtcagcttgtttgggggaagggtgggcgggtatggggtgtactttttataagtaatatttaatttattatttagagtggcttctttttggataatttatgataaaaagggagatctggttgggatctagatacggctgttaaagctgcagtgttccatacctcagagggaccactttggaaatgaattgtccattgctgagtatgaagagatgtccagtccaggcaaagccttcactgaagttccatcatcgccacttctccctttttagggtcattcaaagaagataacaccaaacctaaataattctgaaagcattttgcagatcagtgctactcattcaaagggctttgcaactcaaacagattgttagtgtgctagtgataagtttatttggtagaaatgggtatactacagctttaactagccttagtgagaaaagaaattttttgttgttacaaaacaccttttttaacaaaaaggtattttgagcctacaaaaagtttctttaaactgtcagattctagcattgttaaccaaattagactagtgattgcaatatttaagtgtaaatcttgttctacaagaaaggaaacttgcttacagtttaaaacaatgactgtttctacacatgatcttgtatactactacacaaggaaaagggggttttgtaaacactgtagaacagtctcatattcatttttttatagaaatgttattccaatggtgcattttttgtttaataaataaagttttgatacaaa

SEQ ID NO: 153990 - DNA, 4344 bp, Artificial Sequence
  derived and/or modified sequence
atggaaaactcgttgcggtgcgtttgggtgccaaaactggcatttgtgctgtttggcgcctctttgttttcagcgcatctccaggtgacaggcttccagatcaaagcgttcaccgcgttgcgattcctctctgaaccttcggatgcagttaccatgagaggcggtaacgtgctgctagattgcagtgccgagtcagacagaggagtgccagtcatcaagtggaagaaagacgggattcacctcgctctgggaatggatgagcggaagcagcaactgtcaaatggcagtctactcattcagaacattctgcactcccggcatcataagcccgacgaggggctctaccagtgtgaggcctctctgggggatagtggctccatcatttcccggacagcgaaagtggccgtggctggccctctgcgatttcttagtcaaaccgaatccgttacagcttttatgggcgatacagttctgttgaagtgtgaagtaatcggggagcccatgcctacaatccactggcagaagaatcagcaggatctgacgccaattccaggggacagccgagttgttgtcctgccctccggagccctgcagatcagcaggctccagccaggagatatcggcatttaccgttgttcagcccggaacccagcctcctctcggacggggaatgaagctgaagtgcgcatcctctcagaccctggactgcaccggcaactatactttttacagagaccaagcaacgttgtcgcgatcgaaggaaaagatgctgttttggaatgttgcgtttctggctatcccccaccatctttcacttggctgcggggggaagaggtaatccaactgcggtctaaaaagtatagcctgctgggtgggagcaatctgctgatctccaacgtgacagacgatgattcaggtatgtacacgtgcgtcgtcacttataaaaatgaaaacatcagcgcctccgctgagttgaccgtacttgtccccccttggttcctgaatcacccatccaacctctatgcctatgagagtatggatattgagtttgaatgtacggtatccggcaagccagtgcctacagtgaactggatgaaaaacggagatgttgtcatccctagcgattactttcaaatcgttggcggcagcaatttgaggattctgggtgtggtgaagtcagatgagggattctaccagtgcgtggccgaaaacgaggcaggcaatgctcaaacaagcgcccagcttattgtgcctaagcctgctattccctccagctcagtgttgccaagtgctcccagagacgtggtgcccgtgctcgttagtagtagatttgtcaggttgtcatggagaccacccgccgaggcaaagggtaatattcagaccttcaccgtcttcttttcaagagagggagataatcgcgagagggcactaaatactacacaaccaggctctttacaactaacggttggaaaccttaagccagaggctatgtatacttttcgcgtggtcgcttacaacgaatggggacccggtgaatcctctcagcccatcaaagtagctacccagcctgagttacaggttcctgggccggtcgaaaatctgcaagcagtatccacaagcccaacaagtatcctgattacctgggaaccacccgcatacgctaatggtcccgtccaggggtatcgactgttctgcaccgaagtgtcaaccggaaaggaacagaatatcgaagtggacggactgagttacaagctggagggtctgaaaaagttcaccgagtattcactccgcttcctggcctacaatagatatgggccaggtgttagcaccgacgatatcacagtagttaccctgagtgacgttccatccgcccctccacaaaatgtgtctctggaggttgtgaacagtaggtccattaaggtgtcctggttgcccccaccctccggtacacaaaacggattcattaccggctataaaatacggcaccgtaagaccacccggaggggagaaatggaaaccctggaaccaaacaacttgtggtatcttttcactgggcttgaaaaaggatcccaatactcctttcaggtgagtgccatgactgtgaatggcacaggacccccctcgaactggtacactgcagagacccccgaaaacgacttagatgagtcccaggtgccagaccagccctcaagtctgcatgttagacctcaaaccaactgcataatcatgagctggacacctccgcttaatcctaacattgtggtacgagggtatataatcggatatggggtaggatccccttatgccgagacggtcagagtggattctaaacagcggtactacagtattgaaaggcttgaaagttcaagtcattacgtgatcagtctgaaggctttcaataatgccggggaaggggtcccactttacgagtccgctactactaggtccattacggatcccaccgatcccgtggattattatcccctgctggacgactttccaacgtctgtccctgaccttagcacacccatgttgcccccagtgggagtgcaggcagtggctctgacgcacgacgccgtcagggtgtcttgggcagacaactccgtgccgaaaaaccagaaaacttccgaagtacgtctctataccgttaggtggaggacctctttttcggccagcgcgaaatacaagtctgaagatacgaccagcctaagttatactgccaccggcctcaagcccaataccatgtatgagttttcagttatggtgaccaagaataggcgatcaagcacatggtctatgacagcccatgctacaacatatgaggcagcccctactagcgccccaaaggacctcaccgttatcactcgggagggcaaacctcgtgccgtaatcgttagttggcagccacctctcgaagcaaacgggaagatcacagcttacatcctcttttataccctcgataagaacatccccatcgatgactggattatggagacaatttccggagacagactgacgcaccagattatggacctcaacctggacactatgtactattttcgcatccaagcccgcaacagcaagggcgtcggccccttaagcgaccctatactgtttcgtacgctgaaagtcgagcaccctgacaagatggccaacgatcaggggcgacatggagacggcggatattggccagtggataccaacctgattgatagatccactcttaatgagcctcctattggccaaatgcacccgccacatgggtcagtgacccctcagaagaatagcaatctgctggtcattatcgtggtgacggttggcgtcataaccgtgctggtagtggtaatcgtggcggtgatctgcacgagaaggtccagtgcgcagcagcgtaaaaagcgggctacgcattcggctggcaagcggaagggctcccagaaagatctgcgccctccggacctgtggatacaccatgaagagatggaaatgaaaaatattgagaaacccagtggaactgatcctgcaggaagagatagccctatacagtcctgtcaggatctgactccagtgtcacacagtcagagcgagactcagctgggtagcaaatctaccagtcactccggccaggatactgaagaggctgggtcttccatgtccacactggagcgctcactggccgctcgtcgggcacctcgggccaagctaatgatccctatggacgcccagagcaataatcctgcagttgtttcagccatccctgtccctaccctcgaatctgcccaataccctggaatcttgccaagcccgacttgcggataccctcatccgcagtttacgctccggccggtgcccttccccactctatctgtggatcgaggatttggcgccggacgtagtcagagtgttagcgaaggcccgaccacccaacagcctcccatgctcccaccatctcagccagaacactcgtcttccgaggaggcgccaagccggaccatacctacggcatgtgttcggcctacccaccccttgcgttcttttgctaatcctcttctccctccgcctatgagcgctatcgaacccaaagtgccctacacacccctgctttcccagccaggaccgacgctccccaaaactcacgtcaagacagccagcctcggcctggccggcaaagctaggagcccattgcttcccgtttccgtccccacagctcctgaagtttcagaggagagccacaaaccaaccgaggactcagccaacgtgtatgaacaggatgatctgagtgagcaaatggcttctctggagggcctaatgaagcagttaaatgccatcacaggctcagccttttag

SEQ ID NO: 153991 - DNA, 4344 bp, Artificial Sequence
  derived and/or modified sequence
atggagaacagcctgcgctgtgtgtgggtgcccaagctggcctttgtgctgtttggagccagcctcttcagcgcccacctgcaggtgacaggcttccagatcaaggccttcaccgccctgcgcttcctgtctgagcccagtgatgctgtgaccatgaggggcggcaatgtgctgctggactgcagcgctgagagtgaccggggcgtgcctgtgatcaagtggaagaaggatggcatccacctggccctgggcatggatgagaggaagcagcagctgagcaatggcagcctgctgatccagaacatcctgcacagccgccaccacaagccagatgagggcctgtaccagtgtgaggccagcctgggggacagcggcagcatcatcagcaggacagccaaggtggccgtggccggccccctgcgcttcctgagccagacagagagcgtgacagccttcatgggagacacagtgctgctgaagtgtgaggtgattggagagcccatgcccaccatccactggcagaagaaccagcaggacctgacccccatccctggggacagccgggtggtggtgctgcccagcggggccctgcagatcagccggctgcagcccggggacatcggcatctaccgctgcagcgccagaaatcctgccagcagcaggactggaaatgaggccgaggtgcgcatcctgagtgaccccggcctgcaccggcagctgtacttcctgcagaggcccagcaatgtggtggccatcgagggcaaggatgctgtgctggagtgctgcgtgtctggctaccccccacccagcttcacctggctgcggggggaggaggtgatccagctgcggagcaagaagtacagcctgctgggcggcagcaacctgctgatcagcaatgtgacagatgatgattctggcatgtacacctgtgtggtgacctacaagaatgaaaacatcagcgccagcgctgagctgactgtgctggtgcccccctggttcctgaaccaccccagcaacctgtatgcctatgaatccatggacatcgagtttgaatgtactgtgtctgggaagcctgtgcccaccgtgaactggatgaagaatggagatgtggtgatccccagcgactacttccagatcgtgggcggcagcaacctgcgcatcctgggcgtggtgaagagtgatgagggcttctaccagtgtgtggctgaaaatgaggccggaaatgcccagaccagcgcccagctgattgtgcccaagccagccatccccagcagctctgtgctgcccagcgcccccagagatgtggtgcctgtgctggtgagcagcagatttgtgcggctgtcctggaggcctcctgctgaggccaagggcaacatccagaccttcaccgtcttcttcagccgggagggggacaaccgggagcgggccctgaacaccacccagcccggcagcctgcagctgactgtgggcaacctgaagccagaggccatgtacaccttccgggtggtggcctacaatgagtggggccctggagagagcagccagcccatcaaggtggccacccagcctgagctgcaggtgcccggccctgtggagaacctgcaggccgtgtccaccagccccaccagcatcctgatcacctgggagcccccagcctatgccaatggacctgtgcagggctaccgcctcttctgcacagaggtgtccacaggcaaggagcagaacatcgaggtggatggcctgagctacaagctggagggcctgaagaagttcacagagtacagcctgcgcttcctggcctacaacagatatggccctggggtgtccacagatgacatcaccgtggtgaccctgagtgatgtgcccagcgccccaccccagaatgtgtccctggaggtggtgaacagccgcagcatcaaggtgtcctggctgcccccacccagcggcacccagaatggcttcatcaccggctacaagatccgccacaggaagaccaccaggagaggagagatggagaccctggagcccaacaacctgtggtacctgttcaccggcctggagaagggcagccagtacagcttccaggtgtctgccatgacagtgaatggcaccggcccccccagcaactggtacacagctgagaccccagaaaatgacctggatgagagccaggtgcctgaccagcccagcagcctgcacgtgcggccccagaccaactgcatcatcatgtcctggaccccacccctgaaccccaacatcgtggtgcggggctacatcatcggctacggcgtgggcagcccctatgcagagaccgtgcgggtggacagcaagcagcgctactacagcattgagcggctggagagcagcagccactacgtgatcagcctgaaggccttcaacaatgctggggagggcgtgcccctgtatgaaagtgccaccaccaggagcatcacagaccccacagatcctgtggactactaccccctgctggatgacttccccacctctgtgcctgacctgagcacccccatgctgccccctgtgggcgtgcaggccgtggccctgacccatgatgctgtgcgggtgtcctgggccgacaacagcgtgcccaagaaccagaagaccagcgaggtgcggctgtacacagtgcgctggaggaccagcttcagcgccagcgccaagtacaagtctgaggacaccaccagcctgagctacacagccaccggcctgaagcccaacaccatgtatgagttctctgtgatggtgaccaagaacagaagaagcagcacctggagcatgacagcccacgccaccacctatgaggccgcccccaccagcgcccccaaggacctgaccgtcatcacccgggagggcaagccccgggccgtcatcgtgtcctggcagccccccctggaggccaacgggaagatcacagcctacatcctcttctacaccctggacaagaacatccccattgatgactggatcatggagaccatcagcggggaccggctgacccaccagatcatggacctgaacctggacaccatgtactacttccgcatccaggccaggaacagcaagggcgtgggccccctgagtgaccccatcctcttccgcaccctgaaggtggagcacccagacaagatggccaatgaccagggcagacatggagatggcggctactggcctgtggacaccaacctgattgacaggagcaccctgaatgagccccccatcggccagatgcacccccctcatggctctgtgaccccccagaagaacagcaacctgctggtgatcatcgtggtgacagtgggcgtcatcaccgtgctggtggtggtgattgtggccgtcatctgcaccaggaggagcagcgcccagcagaggaagaagagggccacccacagcgctgggaagaggaagggcagccagaaggacctgcggcccccagacctgtggatccaccacgaggagatggagatgaagaacatcgagaagcccagcggcacagatcctgctggccgggacagccccatccagagctgccaggacctgacccctgtgagccacagccagagcgagacccagctgggcagcaagagcaccagccacagcggccaggacacagaggaggccggcagctccatgagcaccctggagaggagcctggccgcccggcgggccccccgggccaagctgatgatccccatggatgcccagagcaacaacccagctgtggtgtctgccatccctgtgcccaccctggagagcgcccagtacccaggcatcctgcccagccccacctgtggctacccccacccccagttcaccctgcggcctgtgcccttccccaccctgtctgtggaccggggctttggagctggccgcagccagagcgtgtctgagggccccaccacccagcagccccccatgctgccccccagccagcctgagcacagcagcagcgaggaggcccccagcaggaccatccccacagcctgtgtgcggcccacccaccccctgcggagctttgccaaccccctgctgcccccacccatgtctgccatcgagcccaaggtgccctacacccccctgctgagccagcccggccccaccctgcccaagacccacgtgaagacagccagcctgggcctggccggcaaggcccggagccccctgctgcctgtgtctgtgcccacagcccctgaggtgtctgaggagagccacaagcccacagaggacagcgccaacgtgtatgagcaggatgacctgtctgagcagatggccagcctggagggcctgatgaagcagctgaatgccatcactggaagtgccttctag

SEQ ID NO: 153992 - DNA, 4344 bp, Artificial Sequence
  derived and/or modified sequence
atggagaacagcctgcggtgcgtgtgggtgcccaagctggccttcgtgctgtttggagcgtcactgttcagcgcccacttgcaagtgaccggcttccagatcaaggcttttaccgccctgcgattcctctcagaaccatccgacgcggttacaatgcggggtggcaacgtcctccttgactgttctgcagagtctgaccgaggagtgccggtgattaaatggaagaaggatggtattcatctggccttgggaatggatgaacgcaaacagcagctgtccaacggatcattgctcatccagaacattcttcattctcggcaccacaagcccgatgagggcttgtaccaatgtgaggccagtctgggggatagcggcagcatcatctccaggacggccaaagtggccgttgctggaccattacgattcctcagccagactgagagtgtcactgctttcatgggggataccgtgttgctcaagtgcgaggtgattggggagccaatgcccaccatccactggcagaaaaatcagcaagatctaacgccaattcccggggactcccgggttgtcgtgcttccaagtggggccctgcagataagcagactgcagccaggcgatattgggatttatcggtgctctgcccggaacccggcaagctccaggaccgggaacgaagccgaagtgcgcatcctgtctgatcccggattgcatagacaactttattttttacaacggcccagcaacgtcgtcgcgattgaaggaaaggatgccgtgttagagtgctgtgtgtccggatacccccccccctcattcacgtggctccgtggggaagaggtcattcaactgcgctctaaaaagtactctttactggggggaagtaacttattgatcagcaacgtgacagacgacgacagcggaatgtacacctgtgtcgtaacttataaaaacgaaaacatctcggcatctgcggagctgacggtgctggtgccgccttggttcttaaatcacccttcaaacttgtatgcatatgaatccatggacatcgagttcgagtgtaccgtttccgggaagccggtccctactgtgaactggatgaaaaatggagatgtagtgatcccgagcgactactttcagatcgtgggcgggtctaacctgcggatcttgggtgttgtcaagtcagacgagggtttttatcagtgcgtggcggaaaacgaggccggcaacgcacagacctctgctcagctgattgtccccaagcctgccattccatcgagcagtgtgctgccatccgcgccccgcgatgtagtgccggtcttggtctccagcagattcgtgagactcagctggcgaccgcccgccgaggctaagggcaatatacagacattcacagtcttcttcagtagggagggagacaaccgagaacgggcactgaacacaacacagccgggtagcttacagcttactgtggggaacttgaaacccgaagctatgtacacctttcgggtcgtcgcctacaacgagtgggggcccggcgagtcttcacagcccatcaaagtggcaactcagccagagctgcaagtccccggtccagtggaaaacctgcaggccgtgtccacatcacctacttctatcctgatcacttgggaacctcccgcttatgccaatggaccagtccagggctaccgtcttttttgcactgaggtcagcacaggcaaggaacagaatatagaggtcgacggcctgagctacaagctggaaggcttgaagaaatttacggagtactctctccggttcctcgcttacaatcgctacggccctggcgtctctaccgacgacatcaccgttgtgacactgtccgacgtaccgtcagctccacctcaaaacgtgtccctcgaagtggtgaactccagatctatcaaggtcagttggctccccccgccctcgggaactcaaaacggctttatcacaggttacaagattcgtcataggaagacgacacgtaggggcgaaatggagactctcgagccaaacaatctctggtatctcttcacgggcctcgaaaagggatcacagtattcgttccaagtgagtgcgatgactgttaacgggactggcccgcctagcaactggtacaccgcagaaacaccagagaatgacctcgacgaatcacaggtgccagatcagccctcatcattgcatgtacggcctcagaccaattgtattatcatgtcttggactccccccctgaatccgaacatcgtcgtcagaggttacattatcgggtatggggttggctcaccctacgcggaaacagtgagagttgactctaaacagcgctattactctatcgaacgactggagagcagcagtcactatgtgattagcctgaaagcatttaacaatgctggcgaaggagtgccactgtacgaatccgcaacgacccgttctataacggacccaaccgaccccgtggactattacccactcctagacgattttcctacaagtgtgcccgacctgagtacccccatgctaccccctgtgggcgtgcaagcagtggcacttacacatgacgctgttagggtcagctgggccgacaactctgtccccaaaaatcaaaagacctctgaggtgagactgtacacagtgcgttggagaactagcttctctgctagcgctaagtacaagtccgaggacaccaccagtctaagttatacggccactggactcaaaccgaacaccatgtacgagttctccgtgatggtgaccaagaataggcggtcttcgacctggtctatgactgcacacgccacaacatatgaggcagcccctacaagcgcccccaaggatctgacggtgataactagggagggaaagcctcgtgcagtgattgttagctggcagccccccttagaagcaaatggtaagatcactgcatacattcttttttacaccctggacaagaacatcccgatagatgattggatcatggagactatctccggagatcggttgacacatcagatcatggatctgaatcttgatacaatgtattacttcagaattcaggctaggaattctaagggtgtgggaccattatctgaccccatcttattccgcactctgaaagttgagcatcccgataagatggccaacgatcagggtagacacggagatggagggtattggcccgtggacacaaatctgatcgaccgatcaacactgaacgaacccccaattggacaaatgcaccccccccacgggtccgtgaccccgcagaaaaactcgaacctgctggtcataatagtagtcaccgtgggcgttattactgtcttggttgtggtgatcgtggcagtgatttgcacaaggaggagctccgcccagcagcgcaaaaagcgcgccactcacagtgccgggaagcggaagggaagccagaaggacctcagacctccagatctctggatccaccacgaggagatggagatgaagaacattgaaaaaccatccggaaccgatccagccgggcgcgattctccaattcagagttgtcaggacctgactcccgtttcacactctcagtctgagacccagttgggaagtaagtccacatcccacagtggtcaagacactgaggaggcaggttcgagtatgagcactctggagcgtagcctggcggctcgccgagcccctcgggccaagttgatgatccccatggatgctcaaagtaacaatcccgcagtggtttctgccattccggtgccaacactagagagtgcacaatacccaggcattctgccttccccaacctgtggctatccccacccacagttcacactgagacccgtcccgtttcccactctgtcagttgaccggggctttggagctgggcggtcccagtcagtttccgagggcccaaccactcagcagcccccaatgttaccccctagccagcctgagcacagctcctccgaggaagctccatcacggactatccctacagcgtgtgtaagacccacccacccattgagatccttcgccaaccctctgcttcctcccccgatgtccgctatcgagcccaaggtaccttataccccccttttatcccaacctggaccgaccctaccaaaaacccacgtaaagacagctagtctcggactcgccggaaaagcccgaagccctttgttgcccgtcagtgtccctactgcccccgaggtctctgaagagagccataaacccacagaggactctgccaatgtgtatgagcaggatgacctgtcggagcaaatggcttccctggaaggcctgatgaagcagctgaacgctatcactggttctgccttctag

SEQ ID NO: 153993 - DNA, 4343 bp, Artificial Sequence
  derived and/or modified sequence
atggaaaacagcctgaggtgcgtctgggtgccaaaattggcctttgttttgtttggggctagcctgttcagcgcacatcttcaagtgaccggattccaaatcaaagcattcaccgcgctacggttccttagcgaacccagcgacgccgtgaccatgcgaggcggtaacgtgctgcttgattgctctgcagagtcagaccgaggagtgcccgtgatcaaatggaagaaggacgggattcacctggcccttggaatggacgaaaggaagcagcagctttcaaatggtagcctgctgatccagaatatactacattctcgccaccataaacctgatgaaggtctctatcaatgcgaagccagtttgggggactccggatctattatttcccgcacagcaaaagttgctgtcgcgggtccactgcgctttctcagtcagaccgagtccgtgaccgcctttatgggagataccgtgctgttgaagtgtgaggtgattggtgagcctatgccaaccattcactggcagaagaatcagcaagatcttactcccatccccggagattcccgtgtggtcgttctgcctagtggagctctccagatatcaagactccagcccggtgacatcgggatctatcgctgtagtgctagaaatccagcctcttcccgtactggaaacgaggccgaggtgagaatcttatccgatcctggactccataggcaactgtattttctacagagaccttccaacgtggtcgccattgagggtaaagacgctgttctggagtgttgtgtctccggctacccccctccttcatttacctggctgcggggagaagaagtgatccagctgaggtctaaaaaatacagcctgttggggggttcgaatctgctgatatcgaacgtgacagacgacgactctggaatgtacacttgcgtggtgacttacaagaacgagaacattagtgctagtgccgagctaaccgttctggttccaccctggttcctgaatcaccctagcaatctctacgcttatgagtccatggacatcgagttcgagtgcaccgtgagcggcaaaccggtcccaaccgtaaattggatgaagaatggggatgtggtgatcccctctgattactttcagatcgtcggaggatctaacctgcgcatattgggagtagtgaaatccgacgaaggtttctaccagtgcgtggcagagaacgaagccggaaacgcacagacctcagcacagctcattgtacctaagccagcgatcccttctagctcagtgctccctagcgcaccccgtgacgtagtccccgtgctggtgagcagtaggtttgtcaggctgtcgtggcgacctcccgctgaagccaagggtaatatccagaccttcaccgtatttttttctcgggagggggacaacagagagagagctcttaataccacacaacccggtagccttcaactgactgtcggcaatctgaaacccgaagctatgtacacatttagggtagtggcctataacgaatggggcccaggagagagttctcagccgatcaaagtggctacccagccggagttacaggtgccagggccagtcgaaaacctgcaggctgtgtcaacaagccctaccagcatccttattacatgggagccacccgcatatgctaacggacccgtgcaggggtatcgcctgttctgtaccgaggtttctaccggaaaggaacaaaacattgaagtggacggcctgtcctacaaactggaggggcttaagaagtttaccgagtacagccttcgcttcctggcttataatcgctacggacctggcgtgagcaccgatgacatcacagtcgtgactctgtctgacgtgccatcagcacctccacagaacgtgtcactggaggttgtcaattcaaggtcaattaaggtgtcttggcttcctccgccatccgggacccagaatggctttattaccggctacaagataagacaccgcaagactacgcgtaggggggagatggagacactagagcctaataatctgtggtatttattcacgggactggaaaagggctctcagtacagttttcaagtttcagcaatgactgttaatgggactgggcctcccagtaattggtatacagcggaaacacctgagaacgatctggatgagtctcaggtgcctgatcagcctagctctctgcacgtgaggccccagaccaactgcattattatgtcttggactcccccattaaacccaaatattgtggtgcgaggctacattatcggatatggggtgggatctccatatgccgagaccgtcagagtggatagcaaacaaagatactatagcattgagcgtctggaatcgtccagtcattacgtcatctcattgaaagcattcaataacgccggagaaggtgtgccactttacgagagtgctacaacacgctctataaccgaccctacggatccagtagactattaccccttattggacgactttcccactagtgttcccgatcttagcacccccatgctccctccagtgggcgtacaagcagtggctctgacgcacgacgccgtcagggttagttgggctgataattcagtgcctaagaatcagaagacatcagaggtacgactctacactgtccggtggaggactagtttctccgcaagtgcaaaatacaaatcagaagacacaacctctttatcgtacaccgctacggggctgaagcctaacacaatgtatgagttttctgtaatggtgactaagaaccgccgatcttctacttggtctatgactgcgcacgccaccacatatgaggctgcaccaacttccgcaccaaaagacctcaccgtgatcacacgggagggcaaaccgcgagccgtcatcgtctcttggcagcctccgctggaggccaacgggaaaataactgcttacatcctgttttacacactggataagaatatccctatagatgattggatcatggaaactatctctggagatcggcttacacatcaaatcatggacctaaacctagacacaatgtactacttccgcatccaggccagaaactccaagggggtggggccactgtcggacccaattctgttcagaactttaaaggtggaacaccccgataagatggccaacgaccagggaagacatggagacgggggatactggccagtggacaccaacctgatcgatcggtccactcttaatgagccaccgattggccaaatgcatcccccacacggttccgtcactccgcaaaaaaactcaaacctgctcgtgataatcgtagtgacggttggggttatcacggtccttgtcgttgttatcgtggcagtcatctgcactaggaggagtagtgcccagcagagaaaaaaaagagccacacacagcgctggcaaacgcaaaggctcgcagaaggatctgcgaccacctgacctgtggattcaccatgaagagatggagatgaaaaatatcgaaaagccctcaggaaccgacccggctgggagagattcccccattcagagctgtcaggatctaacccccgtgagccattcccagtcggagacacagctgggaagtaagtctactagccatagcggacaagataccgaggaagcaggatccagtatgagtaccctggagaggtcactggcagcaagacgtgccccacgggctaagctcatgataccgatggacgcacagagtaacaatcccgcagtggtctccgctattccagtgccaactctggaaagtgcccagtaccctggcattctcccttctcctacttgtgggtatccccatccacagtttactctcagaccggtcccttttcccactttaagcgtcgatcggggattcggcgcaggacgatctcagtcagtgtccgaaggtccgacaactcagcagccacctatgctgcctccatctcagccggaacattcttcctccgaagaagcaccttcccgtacgattcccacggcttgtgtgcgccctactcaccctttacggtccttcgctaatccgctgctgcctcccccaatgagcgccatcgagccaaaagtgccgtacactccgctgctgtctcagccgggaccgacgttgcccaagacacacgtgaaaactgcctccctgggcctggccggaaaggcgaggagccctctcctgccagtcagcgtgcccaccgctcctgaagtcagcgaggagagtcataaaccgaccgaggattcagcgaatgtttacgaacaggacgacctgtctgaacagatggcaagcctcgaaggcctgatgaagcaattaaacgcaatcacaggttccgcatttta

SEQ ID NO: 153994 - DNA, 285 bp, Artificial Sequence
  derived and/or modified sequence
atgaggactctggctatcctggctgcaatcctgcttgtggctcttcaggctcaagccgagcccctacaagctcgggctgatgaggtcgcagccgctcctgagcagattgcagcggatattcctgaggtggtggtttctctggcgtgggacgagtcactggcacccaagcaccccggaagtaggaaaaacatggattgctactgcaggatccctgcgtgcatcgccggtgaacgccgttacgggacttgtatttatcagggtcgcctgtgggccttctgctgctag

SEQ ID NO: 153995 - DNA, 285 bp, Artificial Sequence
  derived and/or modified sequence
atgagaactctagccatacttgccgcgattttactggtcgctctgcaggctcaagccgaacctctgcaagcacgggccgatgaggttgccgcagcccctgaacagatagcagctgacatccccgaagtggtggtttctctggcttgggatgaatctcttgcccctaagcaccccgggagccgcaaaaatatggattgctattgtaggatcccagcttgcattgcaggtgaacggcgatatgggacatgtatctatcaaggtcgcctttgggctttctgctgttag

SEQ ID NO: 153996 - DNA, 285 bp, Artificial Sequence
  derived and/or modified sequence
atgagaaccctggccatcctggccgccatcctgctggtggccctgcaggcccaggccgagcccctgcaggccagagccgacgaggtggccgccgcccccgagcagatcgccgccgacatccccgaggtggtggtgagcctggcctgggacgagagcctggcccccaagcaccccggcagcagaaagaacatggactgctactgcagaatccccgcctgcatcgccggcgagagaagatacggcacctgcatctaccagggcagactgtgggccttctgctgctag

SEQ ID NO: 153997 - DNA, 285 bp, Artificial Sequence
  derived and/or modified sequence
atgaggactcttgccatcttggccgctattctcctggtggcactccaggcgcaagctgaacccttacaggctagggccgatgaggtcgccgctgcccccgaacagatcgcagccgacatccctgaggtggtggtgtctctggcctgggacgagtctttagccccaaaacacccggggtcccggaaaaacatggattgctattgtcgcataccagcttgtattgccggggagagaagatatgggacgtgcatctaccaggggaggctgtgggcattctgttgctag

SEQ ID NO: 153998 - DNA, 285 bp, Artificial Sequence
  derived and/or modified sequence
atgaggaccctggccatcctggccgccatcctgctggtggccctgcaggcccaggccgagcccctgcaggcccgggcagatgaggtggccgccgcccctgagcagattgctgctgacatccctgaggtggtggtgtccctggcctgggatgagagcctggcccccaagcaccctggcagcaggaagaacatggactgctactgccgcatcccagcctgcatcgccggggagcggcgctatggcacctgcatctaccagggccgcctgtgggccttctgctgctag

SEQ ID NO: 153999 - DNA, 285 bp, Artificial Sequence
  derived and/or modified sequence
atgcggaccctggccatcctggccgccatcctgctggtggccctgcaagcacaggccgagcccctgcaggctagggccgatgaggtagccgccgctcctgaacaaatcgcagcagacataccggaggtggtggtatccttggcttgggatgagagtctggctcctaaacatcctggctcaagaaaaaacatggactgctattgtagaatccccgcatgtatcgccggggagcggaggtacggcacatgtatctaccaggggcgactgtgggcattctgttgttag

SEQ ID NO: 154000 - RNA, 285 nt, Artificial Sequence
  derived and/or modified sequence
augagaacucuagccauacuugccgcgauuuuacuggucgcucugcaggcucaagccgaaccucugcaagcacgggccgaugagguugccgcagccccugaacagauagcagcugacauccccgaaguggugguuucucuggcuugggaugaaucucuugccccuaagcaccccgggagccgcaaaaauauggauugcuauuguaggaucccagcuugcauugcaggugaacggcgauaugggacauguaucuaucaaggucgccuuugggcuuucugcuguuag

SEQ ID NO: 154001 - protein, 50 aa, Artificial Sequence
  derived and/or modified sequence
LDTIKCLQGNNNCHIQKCPWFLLQVSTCYKGKGRCCQKRRWFARSHVYHV

SEQ ID NO: 154002 - protein, 37 aa, Artificial Sequence
  derived and/or modified sequence
DQYKCLQHGGFCLRSSCPSNTKLQGTCKPDKPNCCKS

SEQ ID NO: 154003 - protein, 68 aa, Artificial Sequence
  derived and/or modified sequence
MRTSYLLLFTLCLLLSEMASGGNFLTGLGHRSDHYNCVSSGGQCLYSACPIFTKIQGTCYRGKAKCCK

SEQ ID NO: 154004 - protein, 36 aa, Artificial Sequence
  derived and/or modified sequence
DHYNCVSSGGQCLYSACPIFTKIQGTCYRGKAKCCK

SEQ ID NO: 154005 - protein, 42 aa, Artificial Sequence
  derived and/or modified sequence
IGPDTKKCVQRKNACHYFECPWLYYSVGTCYKGKGKCCQKRY

SEQ ID NO: 154006 - protein, 69 aa, Artificial Sequence
  derived and/or modified sequence
MKTHYFLLVMICFLFSQMEPGVGILTSLGRRTDQYKCLQHGGFCLRSSCPSNTKLQGTCKPDKPNCCKS

SEQ ID NO: 154007 - protein, 36 aa, Artificial Sequence
  derived and/or modified sequence
DSYICARKGGTCNLSPCPLYNRIEGTCYRGKAKCCI

SEQ ID NO: 154008 - protein, 36 aa, Artificial Sequence
  derived and/or modified sequence
DSYICARKGGTCNLSPCPLYNRVEGTCYRGKAKCCI

SEQ ID NO: 154009 - protein, 36 aa, Artificial Sequence
  derived and/or modified sequence
DHYNCVSSGGQCLYSACPIFTKIQGTCYGGKAKCCK

SEQ ID NO: 154010 - protein, 51 aa, Artificial Sequence
  derived and/or modified sequence
AVGSLKSIGYEAELDHCHTNGGYCVRAICPPSARRPGSCFPEKNPCCKYMK

SEQ ID NO: 154011 - protein, 36 aa, Artificial Sequence
  derived and/or modified sequence
DHYNCVRSGGQCLYSACPIYTRIQGTCYHGKAKCCK

SEQ ID NO: 154012 - protein, 35 aa, Artificial Sequence
  derived and/or modified sequence
DQYICARKGGTCNFSPCPLFTRIDGTCYRGKAKCC

SEQ ID NO: 154013 - protein, 36 aa, Artificial Sequence
  derived and/or modified sequence
DHYICAKKGGTCNFSPCPLFNRIEGTCYSGKAKCCI

SEQ ID NO: 154014 - protein, 36 aa, Artificial Sequence
  derived and/or modified sequence
DTIACIENKDTCRLKNCPRLHNVVGTCYEGKGKCCH

SEQ ID NO: 154015 - protein, 36 aa, Artificial Sequence
  derived and/or modified sequence
DHYNCVRSGGQCLYSACPIYTKIQGTCYHGKAKCCK

SEQ ID NO: 154016 - protein, 36 aa, Artificial Sequence
  derived and/or modified sequence
DHYICVRSGGQCLYSACPIYTKIQGTCYHGKAKCCK

SEQ ID NO: 154017 - protein, 36 aa, Artificial Sequence
  derived and/or modified sequence
DHYNCVRSGGQCLYSACPIYTKIQGTCYQGKAKCCK

SEQ ID NO: 154018 - protein, 37 aa, Artificial Sequence
  derived and/or modified sequence
DQYRCLQNGGFCLRSSCPSHTKLQGTCKPDKPNCCRS

SEQ ID NO: 154019 - protein, 36 aa, Artificial Sequence
  derived and/or modified sequence
DHYNCVKGGGQCLYSACPIYTKVQGTCYGGKAKCCK

SEQ ID NO: 154020 - protein, 42 aa, Artificial Sequence
  derived and/or modified sequence
TDQDTAKCVQKKNVCYYFECPWLSISVSTCYKGKAKCCQKRY

SEQ ID NO: 154021 - protein, 41 aa, Artificial Sequence
  derived and/or modified sequence
ESDTVTCRKMKGKCSFLLCPFFKRSSGTCYNGLAKCCRPFW

SEQ ID NO: 154022 - DNA, 207 bp, Artificial Sequence
  derived and/or modified sequence
atgagaacaagctacctactgctgttcactctgtgtcttctgcttagtgagatggcttctggcggtaattttcttactggtttgggccatagatcagaccactacaattgcgttagttccggcggtcagtgtttgtactcagcatgtccaatctttactaaaatccagggcacatgttacagggggaaagcaaagtgctgtaagtag

SEQ ID NO: 154023 - DNA, 207 bp, Artificial Sequence
  derived and/or modified sequence
atgaggaccagctacctgctgctcttcaccctgtgcctgctgctgtctgagatggccagcggcggcaacttcctgaccggcctgggccacagaagtgaccactacaactgtgtgagcagcggcggccagtgcctgtacagcgcctgccccatcttcaccaagatccagggcacctgctaccggggcaaggccaagtgctgcaagtag

SEQ ID NO: 154024 - DNA, 207 bp, Artificial Sequence
  derived and/or modified sequence
atgcggaccagctacctgctgctgttcaccctgtgcctgctgctgtccgagatggcatcaggcgggaacttccttaccggactaggccatcgctctgaccactacaactgcgtgtccagtggggggcagtgcctctactccgcgtgtcccatctttacaaagatccaggggacttgctaccggggaaaagccaagtgttgtaagtag

SEQ ID NO: 154025 - DNA, 207 bp, Artificial Sequence
  derived and/or modified sequence
atgcggacctcgtacctgctgctatttactctctgccttctcctctcagagatggcttctggcggaaatttcctgacagggttaggccatagaagtgatcactataattgtgtctctagcgggggacagtgtctgtactccgcttgtccaatttttaccaagatacagggaacatgctatcgcggaaaggctaagtgctgtaaatag

SEQ ID NO: 154026 - DNA, 207 bp, Artificial Sequence
  derived and/or modified sequence
atgagaaccagctacctgctgctgttcaccctgtgcctgctgctgagcgagatggccagcggcggcaacttcctgaccggcctgggccacagaagcgaccactacaactgcgtgagcagcggcggccagtgcctgtacagcgcctgccccatcttcaccaagatccagggcacctgctacagaggcaaggccaagtgctgcaagtag

SEQ ID NO: 154027 - DNA, 478 bp, Artificial Sequence
  derived and/or modified sequence
cttgactgtggcacctcccttcagttccgtcgacgaggttgtgcaatccaccagtcttataaatacagtgacgctccagcctctggaagcctctgtcagctcagcctccaaaggagccagcgtctccccagttcctgaaatcctgggtgttgcctgccagtcgccatgagaacttcctaccttctgctgtttactctctgcttacttttgtctgagatggcctcaggtggtaactttctcacaggccttggccacagatctgatcattacaattgcgtcagcagtggagggcaatgtctctattctgcctgcccgatctttaccaaaattcaaggcacctgttacagagggaaggccaagtgctgcaagtgagctgggagtgaccagaagaaatgacgcagaagtgaaatgaactttttataagcattcttttaataaaggaaaattgcttttgaagtatacctcctttgggccaaaa

SEQ ID NO: 154028 - protein, 1273 aa, Artificial Sequence
  derived and/or modified sequence
MEPPGGSLGPGRGTRDKKKGRSPDELPSAGGDGGKSKKFTLKRLMADELERFTSMRIKKEKEKPNSAHRNSSASYGDDPTAQSLQDVSDEQVLVLFEQMLLDMNLNEEKQQPLREKDIIIKREMVSQYLYTSKAGMSQKESSKSAMMYIQELRSGLRDMPLLSCLESLRVSLNNNPVSWVQTFGAEGLASLLDILKRLHDEKEETAGSYDSRNKHEIIRCLKAFMNNKFGIKTMLETEEGILLLVRAMDPAVPNMMIDAAKLLSALCILPQPEDMNERVLEAMTERAEMDEVERFQPLLDGLKSGTTIALKVGCLQLINALITPAEELDFRVHIRSELMRLGLHQVLQDLREIENEDMRVQLNVFDEQGEEDSYDLKGRLDDIRMEMDDFNEVFQILLNTVKDSKAEPHFLSILQHLLLVRNDYEARPQYYKLIEECISQIVLHKNGADPDFKCRHLQIEIEGLIDQMIDKTKVEKSEAKAAELEKKLDSELTARHELQVEMKKMESDFEQKLQDLQGEKDALHSEKQQIATEKQDLEAEVSQLTGEVAKLTKELEDAKKEMASLSAAAITVPPSVPSRAPVPPAPPLPGDSGTIIPPPPAPGDSTTPPPPPPPPPPPPPLPGGVCISSPPSLPGGTAISPPPPLSGDATIPPPPPLPEGVGIPSPSSLPGGTAIPPPPPLPGSARIPPPPPPLPGSAGIPPPPPPLPGEAGMPPPPPPLPGGPGIPPPPPFPGGPGIPPPPPGMGMPPPPPFGFGVPAAPVLPFGLTPKKLYKPEVQLRRPNWSKLVAEDLSQDCFWTKVKEDRFENNELFAKLTLTFSAQTKRTKKAKKDQEGGEEKKSVQKKKVKELKVLDSKTAQNLSIFLGSFRMPYQEIKNVILEVNEAVLTESMIQNLIKQMPEPEQLKMLSELKDEYDDLAESEQFGVVMGTVPRLRPRLNAILFKLQFSEQVENIKPEIVSVTAACEELRKSESFSNLLEITLLVGNYMNAGSRNAGAFGFNISFLCKLRDTKSTDQKMTLLHFLAELCENDYPDVLKFPDELAHVEKASRVSAENLQKNLDQMKKQISDVERDVQNFPAATDEKDKFVEKMTIFVKDAQEQYNKLRMMHSNMETLYKELGEYFLFDPKKLSVEEFFMDLHNFRNMFLQAVKENQKRRETEEKMRRAKLAKEKAEKERLEKQQKREQLIDMNAEGDETGVMDSLLEALQSGAAFRRKRGPRQANRKAGCAVTSLLASELTKDDAMAAVPAKVSKNSETFPTILEEAKELVGRAS

SEQ ID NO: 154029 - protein, 1269 aa, Artificial Sequence
  derived and/or modified sequence
MEPPGGSLGPGRGTRDKKKGRSPDELPSAGGDGGKSKKFTLKRLMADELERFTSMRIKKEKEKPNSAHRNSSASYGDDPTAQSLQDVSDEQVLVLFEQMLLDMNLNEEKQQPLREKDIIIKREMVSQYLYTSKAGMSQKESSKSAMMYIQELRSGLRDMPLLSCLESLRVSLNNNPVSWVQTFGAEGLASLLDILKRLHDEKEETAGSYDSRNKHEIIRCLKAFMNNKFGIKTMLETEEGILLLVRAMDPAVPNMMIDAAKLLSALCILPQPEDMNERVLEAMTERAEMDEVERFQPLLDGLKSGTTIALKVGCLQLINALITPAEELDFRVHIRSELMRLGLHQVLQDLREIENEDMRVQLNVFDEQGEEDSYDLKGRLDDIRMEMDDFNEVFQILLNTVKDSKAEPHFLSILQHLLLVRNDYEARPQYYKLIEECISQIVLHKNGADPDFKCRHLQIEIEGLIDQMIDKTKVEKSEAKAAELEKKLDSELTARHELQVEMKKMESDFEQKLQDLQGEKDALHSEKQQIATEKQDLEAEVSQLTGEVAKLTKELEDAKKEMASLSAAAITVPPSVPSRAPVPPAPPLPGDSGTIIPPPPAPGDSTTPPPPPPPPPPPPPLPGGVCISSPPSLPGGTAISPPPPLSGDATIPPPPPLPEGVGIPSPSSLPGGTAIPPPPPLPGSARIPPPPPPLPGSAGIPPPPPPLPGEAGMPPPPPPLPGGPGIPPPPPFPGGPGIPPPPPGMGMPPPPPFGFGVPAAPVLPFGLTPKKLYKPEVQLRRPNWSKLVAEDLSQDCFWTKVKEDRFENNELFAKLTLTFSAQTKTKKDQEGGEEKKSVQKKKVKELKVLDSKTAQNLSIFLGSFRMPYQEIKNVILEVNEAVLTESMIQNLIKQMPEPEQLKMLSELKDEYDDLAESEQFGVVMGTVPRLRPRLNAILFKLQFSEQVENIKPEIVSVTAACEELRKSESFSNLLEITLLVGNYMNAGSRNAGAFGFNISFLCKLRDTKSTDQKMTLLHFLAELCENDYPDVLKFPDELAHVEKASRVSAENLQKNLDQMKKQISDVERDVQNFPAATDEKDKFVEKMTSFVKDAQEQYNKLRMMHSNMETLYKELGEYFLFDPKKLSVEEFFMDLHNFRNMFLQAVKENQKRRETEEKMRRAKLAKEKAEKERLEKQQKREQLIDMNAEGDETGVMDSLLEALQSGAAFRRKRGPRQANRKAGCAVTSLLASELTKDDAMAAVPAKVSKNSETFPTILEEAKELVGRAS

SEQ ID NO: 154030 - protein, 1272 aa, Artificial Sequence
  derived and/or modified sequence
MEPPGGSLGPGRGTRDKKKGRSPDELPSAGGDGGKSKKFTLKRLMADELERFTSMRIKKEKEKPNSAHRNSSASYGDDPTAQSLQDVSDEQVLVLFEQMLLDMNLNEEKQQPLREKDIIIKREMVSQYLYTSKAGMSQKESSKSAMMYIQELRSGLRDMPLLSCLESLRVSLNNNPVSWVQTFGAEGLASLLDILKRLHDEKEETAGSYDSRNKHEIIRCLKAFMNNKFGIKTMLETEEGILLLVRAMDPAVPNMMIDAAKLLSALCILPQPEDMNERVLEAMTERAEMDEVERFQPLLDGLKSGTTIALKVGCLQLINALITPAEELDFRVHIRSELMRLGLHQVLQDLREIENEDMRVQLNVFDEQGEEDSYDLKGRLDDIRMEMDDFNEVFQILLNTVKDSKAEPHFLSILQHLLLVRNDYEARPQYYKLIEECISQIVLHKNGADPDFKCRHLQIEIEGLIDQMIDKTKVEKSEAKAAELEKKLDSELTARHELQVEMKKMESDFEQKLQDLQGEKDALHSEKQQIATEKQDLEAEVSQLTGEVAKLTKELEDAKKEMASLSAAAITVPPSVPSRAPVPPAPPLPGDSGTIIPPPPAPGDSTTPPPPPPPPPPPPPLPGGVCISSPPSLPGGTAISPPPPLSGDATIPPPPPLPEGVGIPSPSSLPGGTAIPPPPPLPGSARIPPPPPPLPGSAGIPPPPPPLPGEAGMPPPPPPLPGGPGIPPPPPFPGGPGIPPPPPGMGMPPPPPFGFGVPAAPVLPFGLTPKKLYKPEVQLRRPNWSKLVAEDLSQDCFWTKVKEDRFENNELFAKLTLTFSAQTKTSKAKKDQEGGEEKKSVQKKKVKELKVLDSKTAQNLSIFLGSFRMPYQEIKNVILEVNEAVLTESMIQNLIKQMPEPEQLKMLSELKDEYDDLAESEQFGVVMGTVPRLRPRLNAILFKLQFSEQVENIKPEIVSVTAACEELRKSESFSNLLEITLLVGNYMNAGSRNAGAFGFNISFLCKLRDTKSTDQKMTLLHFLAELCENDYPDVLKFPDELAHVEKASRVSAENLQKNLDQMKKQISDVERDVQNFPAATDEKDKFVEKMTSFVKDAQEQYNKLRMMHSNMETLYKELGEYFLFDPKKLSVEEFFMDLHNFRNMFLQAVKENQKRRETEEKMRRAKLAKEKAEKERLEKQQKREQLIDMNAEGDETGVMDSLLEALQSGAAFRRKRGPRQANRKAGCAVTSLLASELTKDDAMAAVPAKVSKNSETFPTILEEAKELVGRAS

SEQ ID NO: 154031 - DNA, 3822 bp, Artificial Sequence
  derived and/or modified sequence
atggagccccccggcggcagcctgggccccggcagaggcaccagagacaagaagaagggcagaagccccgacgagctgcccagcgccggcggcgacggcggcaagagcaagaagttcaccctgaagagactgatggccgacgagctggagagattcaccagcatgagaatcaagaaggagaaggagaagcccaacagcgcccacagaaacagcagcgccagctacggcgacgaccccaccgcccagagcctgcaggacgtgagcgacgagcaggtgctggtgctgttcgagcagatgctgctggacatgaacctgaacgaggagaagcagcagcccctgagagagaaggacatcatcatcaagagagagatggtgagccagtacctgtacaccagcaaggccggcatgagccagaaggagagcagcaagagcgccatgatgtacatccaggagctgagaagcggcctgagagacatgcccctgctgagctgcctggagagcctgagagtgagcctgaacaacaaccccgtgagctgggtgcagaccttcggcgccgagggcctggccagcctgctggacatcctgaagagactgcacgacgagaaggaggagaccgccggcagctacgacagcagaaacaagcacgagatcatcagatgcctgaaggccttcatgaacaacaagttcggcatcaagaccatgctggagaccgaggagggcatcctgctgctggtgagagccatggaccccgccgtgcccaacatgatgatcgacgccgccaagctgctgagcgccctgtgcatcctgccccagcccgaggacatgaacgagagagtgctggaggccatgaccgagagagccgagatggacgaggtggagagattccagcccctgctggacggcctgaagagcggcaccaccatcgccctgaaggtgggctgcctgcagctgatcaacgccctgatcacccccgccgaggagctggacttcagagtgcacatcagaagcgagctgatgagactgggcctgcaccaggtgctgcaggacctgagagagatcgagaacgaggacatgagagtgcagctgaacgtgttcgacgagcagggcgaggaggacagctacgacctgaagggcagactggacgacatcagaatggagatggacgacttcaacgaggtgttccagatcctgctgaacaccgtgaaggacagcaaggccgagccccacttcctgagcatcctgcagcacctgctgctggtgagaaacgactacgaggccagaccccagtactacaagctgatcgaggagtgcatcagccagatcgtgctgcacaagaacggcgccgaccccgacttcaagtgcagacacctgcagatcgagatcgagggcctgatcgaccagatgatcgacaagaccaaggtggagaagagcgaggccaaggccgccgagctggagaagaagctggacagcgagctgaccgccagacacgagctgcaggtggagatgaagaagatggagagcgacttcgagcagaagctgcaggacctgcagggcgagaaggacgccctgcacagcgagaagcagcagatcgccaccgagaagcaggacctggaggccgaggtgagccagctgaccggcgaggtggccaagctgaccaaggagctggaggacgccaagaaggagatggccagcctgagcgccgccgccatcaccgtgccccccagcgtgcccagcagagcccccgtgccccccgccccccccctgcccggcgacagcggcaccatcatcccccccccccccgcccccggcgacagcaccacccccccccccccccccccccccccccccccccccccccccctgcccggcggcgtgtgcatcagcagcccccccagcctgcccggcggcaccgccatcagcccccccccccccctgagcggcgacgccaccatccccccccccccccccctgcccgagggcgtgggcatccccagccccagcagcctgcccggcggcaccgccatccccccccccccccccctgcccggcagcgccagaatcccccccccccccccccccctgcccggcagcgccggcatcccccccccccccccccccctgcccggcgaggccggcatgccccccccccccccccccctgcccggcggccccggcatccccccccccccccccttccccggcggccccggcatccccccccccccccccggcatgggcatgcccccccccccccccttcggcttcggcgtgcccgccgcccccgtgctgcccttcggcctgacccccaagaagctgtacaagcccgaggtgcagctgagaagacccaactggagcaagctggtggccgaggacctgagccaggactgcttctggaccaaggtgaaggaggacagattcgagaacaacgagctgttcgccaagctgaccctgaccttcagcgcccagaccaagagaaccaagaaggccaagaaggaccaggagggcggcgaggagaagaagagcgtgcagaagaagaaggtgaaggagctgaaggtgctggacagcaagaccgcccagaacctgagcatcttcctgggcagcttcagaatgccctaccaggagatcaagaacgtgatcctggaggtgaacgaggccgtgctgaccgagagcatgatccagaacctgatcaagcagatgcccgagcccgagcagctgaagatgctgagcgagctgaaggacgagtacgacgacctggccgagagcgagcagttcggcgtggtgatgggcaccgtgcccagactgagacccagactgaacgccatcctgttcaagctgcagttcagcgagcaggtggagaacatcaagcccgagatcgtgagcgtgaccgccgcctgcgaggagctgagaaagagcgagagcttcagcaacctgctggagatcaccctgctggtgggcaactacatgaacgccggcagcagaaacgccggcgccttcggcttcaacatcagcttcctgtgcaagctgagagacaccaagagcaccgaccagaagatgaccctgctgcacttcctggccgagctgtgcgagaacgactaccccgacgtgctgaagttccccgacgagctggcccacgtggagaaggccagcagagtgagcgccgagaacctgcagaagaacctggaccagatgaagaagcagatcagcgacgtggagagagacgtgcagaacttccccgccgccaccgacgagaaggacaagttcgtggagaagatgaccatcttcgtgaaggacgcccaggagcagtacaacaagctgagaatgatgcacagcaacatggagaccctgtacaaggagctgggcgagtacttcctgttcgaccccaagaagctgagcgtggaggagttcttcatggacctgcacaacttcagaaacatgttcctgcaggccgtgaaggagaaccagaagagaagagagaccgaggagaagatgagaagagccaagctggccaaggagaaggccgagaaggagagactggagaagcagcagaagagagagcagctgatcgacatgaacgccgagggcgacgagaccggcgtgatggacagcctgctggaggccctgcagagcggcgccgccttcagaagaaagagaggccccagacaggccaacagaaaggccggctgcgccgtgaccagcctgctggccagcgagctgaccaaggacgacgccatggccgccgtgcccgccaaggtgagcaagaacagcgagaccttccccaccatcctggaggaggccaaggagctggtgggcagagccagctag

SEQ ID NO: 154032 - DNA, 3810 bp, Artificial Sequence
  derived and/or modified sequence
atggagccccccggcggcagcctgggccccggcagaggcaccagagacaagaagaagggcagaagccccgacgagctgcccagcgccggcggcgacggcggcaagagcaagaagttcaccctgaagagactgatggccgacgagctggagagattcaccagcatgagaatcaagaaggagaaggagaagcccaacagcgcccacagaaacagcagcgccagctacggcgacgaccccaccgcccagagcctgcaggacgtgagcgacgagcaggtgctggtgctgttcgagcagatgctgctggacatgaacctgaacgaggagaagcagcagcccctgagagagaaggacatcatcatcaagagagagatggtgagccagtacctgtacaccagcaaggccggcatgagccagaaggagagcagcaagagcgccatgatgtacatccaggagctgagaagcggcctgagagacatgcccctgctgagctgcctggagagcctgagagtgagcctgaacaacaaccccgtgagctgggtgcagaccttcggcgccgagggcctggccagcctgctggacatcctgaagagactgcacgacgagaaggaggagaccgccggcagctacgacagcagaaacaagcacgagatcatcagatgcctgaaggccttcatgaacaacaagttcggcatcaagaccatgctggagaccgaggagggcatcctgctgctggtgagagccatggaccccgccgtgcccaacatgatgatcgacgccgccaagctgctgagcgccctgtgcatcctgccccagcccgaggacatgaacgagagagtgctggaggccatgaccgagagagccgagatggacgaggtggagagattccagcccctgctggacggcctgaagagcggcaccaccatcgccctgaaggtgggctgcctgcagctgatcaacgccctgatcacccccgccgaggagctggacttcagagtgcacatcagaagcgagctgatgagactgggcctgcaccaggtgctgcaggacctgagagagatcgagaacgaggacatgagagtgcagctgaacgtgttcgacgagcagggcgaggaggacagctacgacctgaagggcagactggacgacatcagaatggagatggacgacttcaacgaggtgttccagatcctgctgaacaccgtgaaggacagcaaggccgagccccacttcctgagcatcctgcagcacctgctgctggtgagaaacgactacgaggccagaccccagtactacaagctgatcgaggagtgcatcagccagatcgtgctgcacaagaacggcgccgaccccgacttcaagtgcagacacctgcagatcgagatcgagggcctgatcgaccagatgatcgacaagaccaaggtggagaagagcgaggccaaggccgccgagctggagaagaagctggacagcgagctgaccgccagacacgagctgcaggtggagatgaagaagatggagagcgacttcgagcagaagctgcaggacctgcagggcgagaaggacgccctgcacagcgagaagcagcagatcgccaccgagaagcaggacctggaggccgaggtgagccagctgaccggcgaggtggccaagctgaccaaggagctggaggacgccaagaaggagatggccagcctgagcgccgccgccatcaccgtgccccccagcgtgcccagcagagcccccgtgccccccgccccccccctgcccggcgacagcggcaccatcatcccccccccccccgcccccggcgacagcaccacccccccccccccccccccccccccccccccccccccccccctgcccggcggcgtgtgcatcagcagcccccccagcctgcccggcggcaccgccatcagcccccccccccccctgagcggcgacgccaccatccccccccccccccccctgcccgagggcgtgggcatccccagccccagcagcctgcccggcggcaccgccatccccccccccccccccctgcccggcagcgccagaatcccccccccccccccccccctgcccggcagcgccggcatcccccccccccccccccccctgcccggcgaggccggcatgccccccccccccccccccctgcccggcggccccggcatccccccccccccccccttccccggcggccccggcatccccccccccccccccggcatgggcatgcccccccccccccccttcggcttcggcgtgcccgccgcccccgtgctgcccttcggcctgacccccaagaagctgtacaagcccgaggtgcagctgagaagacccaactggagcaagctggtggccgaggacctgagccaggactgcttctggaccaaggtgaaggaggacagattcgagaacaacgagctgttcgccaagctgaccctgaccttcagcgcccagaccaagaccaagaaggaccaggagggcggcgaggagaagaagagcgtgcagaagaagaaggtgaaggagctgaaggtgctggacagcaagaccgcccagaacctgagcatcttcctgggcagcttcagaatgccctaccaggagatcaagaacgtgatcctggaggtgaacgaggccgtgctgaccgagagcatgatccagaacctgatcaagcagatgcccgagcccgagcagctgaagatgctgagcgagctgaaggacgagtacgacgacctggccgagagcgagcagttcggcgtggtgatgggcaccgtgcccagactgagacccagactgaacgccatcctgttcaagctgcagttcagcgagcaggtggagaacatcaagcccgagatcgtgagcgtgaccgccgcctgcgaggagctgagaaagagcgagagcttcagcaacctgctggagatcaccctgctggtgggcaactacatgaacgccggcagcagaaacgccggcgccttcggcttcaacatcagcttcctgtgcaagctgagagacaccaagagcaccgaccagaagatgaccctgctgcacttcctggccgagctgtgcgagaacgactaccccgacgtgctgaagttccccgacgagctggcccacgtggagaaggccagcagagtgagcgccgagaacctgcagaagaacctggaccagatgaagaagcagatcagcgacgtggagagagacgtgcagaacttccccgccgccaccgacgagaaggacaagttcgtggagaagatgaccagcttcgtgaaggacgcccaggagcagtacaacaagctgagaatgatgcacagcaacatggagaccctgtacaaggagctgggcgagtacttcctgttcgaccccaagaagctgagcgtggaggagttcttcatggacctgcacaacttcagaaacatgttcctgcaggccgtgaaggagaaccagaagagaagagagaccgaggagaagatgagaagagccaagctggccaaggagaaggccgagaaggagagactggagaagcagcagaagagagagcagctgatcgacatgaacgccgagggcgacgagaccggcgtgatggacagcctgctggaggccctgcagagcggcgccgccttcagaagaaagagaggccccagacaggccaacagaaaggccggctgcgccgtgaccagcctgctggccagcgagctgaccaaggacgacgccatggccgccgtgcccgccaaggtgagcaagaacagcgagaccttccccaccatcctggaggaggccaaggagctggtgggcagagccagctag

SEQ ID NO: 154033 - DNA, 3819 bp, Artificial Sequence
  derived and/or modified sequence
atggagccccccggcggcagcctgggccccggcagaggcaccagagacaagaagaagggcagaagccccgacgagctgcccagcgccggcggcgacggcggcaagagcaagaagttcaccctgaagagactgatggccgacgagctggagagattcaccagcatgagaatcaagaaggagaaggagaagcccaacagcgcccacagaaacagcagcgccagctacggcgacgaccccaccgcccagagcctgcaggacgtgagcgacgagcaggtgctggtgctgttcgagcagatgctgctggacatgaacctgaacgaggagaagcagcagcccctgagagagaaggacatcatcatcaagagagagatggtgagccagtacctgtacaccagcaaggccggcatgagccagaaggagagcagcaagagcgccatgatgtacatccaggagctgagaagcggcctgagagacatgcccctgctgagctgcctggagagcctgagagtgagcctgaacaacaaccccgtgagctgggtgcagaccttcggcgccgagggcctggccagcctgctggacatcctgaagagactgcacgacgagaaggaggagaccgccggcagctacgacagcagaaacaagcacgagatcatcagatgcctgaaggccttcatgaacaacaagttcggcatcaagaccatgctggagaccgaggagggcatcctgctgctggtgagagccatggaccccgccgtgcccaacatgatgatcgacgccgccaagctgctgagcgccctgtgcatcctgccccagcccgaggacatgaacgagagagtgctggaggccatgaccgagagagccgagatggacgaggtggagagattccagcccctgctggacggcctgaagagcggcaccaccatcgccctgaaggtgggctgcctgcagctgatcaacgccctgatcacccccgccgaggagctggacttcagagtgcacatcagaagcgagctgatgagactgggcctgcaccaggtgctgcaggacctgagagagatcgagaacgaggacatgagagtgcagctgaacgtgttcgacgagcagggcgaggaggacagctacgacctgaagggcagactggacgacatcagaatggagatggacgacttcaacgaggtgttccagatcctgctgaacaccgtgaaggacagcaaggccgagccccacttcctgagcatcctgcagcacctgctgctggtgagaaacgactacgaggccagaccccagtactacaagctgatcgaggagtgcatcagccagatcgtgctgcacaagaacggcgccgaccccgacttcaagtgcagacacctgcagatcgagatcgagggcctgatcgaccagatgatcgacaagaccaaggtggagaagagcgaggccaaggccgccgagctggagaagaagctggacagcgagctgaccgccagacacgagctgcaggtggagatgaagaagatggagagcgacttcgagcagaagctgcaggacctgcagggcgagaaggacgccctgcacagcgagaagcagcagatcgccaccgagaagcaggacctggaggccgaggtgagccagctgaccggcgaggtggccaagctgaccaaggagctggaggacgccaagaaggagatggccagcctgagcgccgccgccatcaccgtgccccccagcgtgcccagcagagcccccgtgccccccgccccccccctgcccggcgacagcggcaccatcatcccccccccccccgcccccggcgacagcaccacccccccccccccccccccccccccccccccccccccccccctgcccggcggcgtgtgcatcagcagcccccccagcctgcccggcggcaccgccatcagcccccccccccccctgagcggcgacgccaccatccccccccccccccccctgcccgagggcgtgggcatccccagccccagcagcctgcccggcggcaccgccatccccccccccccccccctgcccggcagcgccagaatcccccccccccccccccccctgcccggcagcgccggcatcccccccccccccccccccctgcccggcgaggccggcatgccccccccccccccccccctgcccggcggccccggcatccccccccccccccccttccccggcggccccggcatccccccccccccccccggcatgggcatgcccccccccccccccttcggcttcggcgtgcccgccgcccccgtgctgcccttcggcctgacccccaagaagctgtacaagcccgaggtgcagctgagaagacccaactggagcaagctggtggccgaggacctgagccaggactgcttctggaccaaggtgaaggaggacagattcgagaacaacgagctgttcgccaagctgaccctgaccttcagcgcccagaccaagaccagcaaggccaagaaggaccaggagggcggcgaggagaagaagagcgtgcagaagaagaaggtgaaggagctgaaggtgctggacagcaagaccgcccagaacctgagcatcttcctgggcagcttcagaatgccctaccaggagatcaagaacgtgatcctggaggtgaacgaggccgtgctgaccgagagcatgatccagaacctgatcaagcagatgcccgagcccgagcagctgaagatgctgagcgagctgaaggacgagtacgacgacctggccgagagcgagcagttcggcgtggtgatgggcaccgtgcccagactgagacccagactgaacgccatcctgttcaagctgcagttcagcgagcaggtggagaacatcaagcccgagatcgtgagcgtgaccgccgcctgcgaggagctgagaaagagcgagagcttcagcaacctgctggagatcaccctgctggtgggcaactacatgaacgccggcagcagaaacgccggcgccttcggcttcaacatcagcttcctgtgcaagctgagagacaccaagagcaccgaccagaagatgaccctgctgcacttcctggccgagctgtgcgagaacgactaccccgacgtgctgaagttccccgacgagctggcccacgtggagaaggccagcagagtgagcgccgagaacctgcagaagaacctggaccagatgaagaagcagatcagcgacgtggagagagacgtgcagaacttccccgccgccaccgacgagaaggacaagttcgtggagaagatgaccagcttcgtgaaggacgcccaggagcagtacaacaagctgagaatgatgcacagcaacatggagaccctgtacaaggagctgggcgagtacttcctgttcgaccccaagaagctgagcgtggaggagttcttcatggacctgcacaacttcagaaacatgttcctgcaggccgtgaaggagaaccagaagagaagagagaccgaggagaagatgagaagagccaagctggccaaggagaaggccgagaaggagagactggagaagcagcagaagagagagcagctgatcgacatgaacgccgagggcgacgagaccggcgtgatggacagcctgctggaggccctgcagagcggcgccgccttcagaagaaagagaggccccagacaggccaacagaaaggccggctgcgccgtgaccagcctgctggccagcgagctgaccaaggacgacgccatggccgccgtgcccgccaaggtgagcaagaacagcgagaccttccccaccatcctggaggaggccaaggagctggtgggcagagccagctag

SEQ ID NO: 154034 - DNA, 5792 bp, Artificial Sequence
  derived and/or modified sequence
attcatgaggcgcgcgcagcccggcatgctaatgaggcggggcgcggcggctggctaaagagcgactgggcggcggcgggcgcggagctgccaggcgggagcggcgtaggcgcggggtcgccggccagcgtgaaccgggacatggagccgcccggcgggagcctggggcccggccgcgggacccgggacaagaagaagggccggagcccagatgagctgccctcggcgggcggcgacggcggcaaatctaagaaatttactctgaagcggctcatggcagatgagctggagagatttaccagcatgagaattaagaaggagaaggaaaagcccaattctgctcatagaaattcttctgcatcatatggggatgatcccacagcacagtcattgcaagatgtttcagatgaacaagtgctggttctctttgaacagatgctgctggatatgaacctgaatgaggagaaacagcaacctttgagggagaaggacatcatcatcaagagggagatggtgtcccaatacttgtacacctccaaggctggcatgagccagaaggagagctctaagtctgccatgatgtatattcaggagttgaggtcaggcttgcgggatatgcctctgctcagctgcctggagtcccttcgtgtgtctctcaacaacaaccctgtcagttgggtgcaaacatttggtgctgaaggcttggcctccttattggacattcttaaacgacttcatgatgagaaagaagagactgctgggagttacgatagccggaacaagcatgagatcattcgctgcttgaaagcttttatgaacaacaagtttggaatcaagaccatgttggagacagaagaaggaatcctactgctggtcagagccatggatcctgctgttcccaacatgatgattgatgcagctaagctgctttctgctctttgtattctaccgcagccagaggacatgaatgaaagggttttggaggcaatgacagaaagagctgagatggatgaagtggaacgtttccagccgctgctggatggattaaaaagtggaaccactattgcactgaaggttggatgcctacagctgatcaatgctctcatcacaccagcggaggaacttgacttccgagttcacatcagaagtgaactgatgcgtttggggctacatcaggtgttgcaggaccttcgagagattgaaaatgaagatatgagagtgcaactaaatgtgtttgatgaacaaggggaagaggattcctatgacctgaagggacggctggatgacattcgcatggagatggatgactttaatgaagtctttcagattctcttaaacacagtgaaggattcaaaggcagagccacacttcctttccatcctgcagcacttactcttggtccgaaatgactatgaggccagacctcagtactataagttgattgaagaatgtatttcccagatagttctgcacaagaacggggctgatcctgacttcaagtgccggcacctccagattgagattgagggattaattgatcaaatgattgataagacaaaggtggagaaatctgaagccaaagctgcagagctggaaaagaagttggactcagagttaacagcccgacatgagctacaggtggaaatgaaaaagatggaaagtgactttgagcagaagcttcaagatcttcagggagaaaaagatgcactgcattctgaaaagcagcaaattgccacagagaaacaggacctggaagcagaggtgtcccagctcacaggagaggttgccaagctgacaaaggaactggaagatgccaagaaagaaatggcttccctctctgcggcagctattactgtacctccttctgttcctagtcgtgctcctgttccccctgcccctcctttacctggtgactctggcactattattccaccaccacctgctcctggggatagtaccactcctcctcctcctcctcctcctcctcctcctccacctcctttgcctgggggtgtttgcatctcctcacccccttctttacctggaggtactgctatctctccaccccctcctttgtctggggatgctaccatccctccaccccctcctttgcctgagggtgttggcatcccttcaccctcttctttgcctggaggtactgccatccccccacctcctcctttgcctgggagtgctagaatccccccaccaccacctcctttgcctgggagtgctggaattccccccccacctcctcccttgcctggagaagcaggaatgccacctcctcctccccctcttcctggtggtcctggaatccctccacctcctccatttcccggaggccctggcattcctccacctccacccggaatgggtatgcctccacctcccccatttggatttggagttcctgcagccccagttctgccatttggattaacccccaaaaagctttataagccagaggtgcagctccggaggccaaactggtccaagcttgtggctgaggacctctcccaggactgcttctggacaaaggtgaaggaggaccgctttgagaacaatgaacttttcgccaaacttacccttaccttctctgcccagaccaagagaacaaagaaggccaagaaggatcaagaaggtggagaagaaaagaaatctgtgcaaaagaaaaaagtaaaagagttaaaggtgttggattcaaagacagcccagaatctctcaatctttttgggttccttccgcatgccctatcaagagattaagaatgtcatcctggaggtgaatgaggctgttctgactgagtctatgatccagaacctcattaagcaaatgccagagccagagcagttaaaaatgctttctgaactgaaggatgaatatgatgacctggctgagtcagagcagtttggcgtggtgatgggcactgtgccccgactgcggcctcgcctcaatgccattctcttcaagctacaattcagcgagcaagtggagaatatcaagccagagattgtgtctgtcactgctgcatgtgaggagttacgtaagagtgagagcttttccaatctcctagagattaccttgcttgttggaaattacatgaatgctggctccagaaatgctggtgcttttggcttcaatatcagcttcctctgtaagcttcgagacaccaagtccacagatcagaagatgacgttgttacacttcttggctgagttgtgtgagaatgactatcccgatgtcctcaagtttccagacgagcttgcccatgtggagaaagccagccgagtttctgctgaaaacttgcaaaagaacctagatcagatgaagaaacaaatttctgatgtggaacgtgatgttcagaatttcccagctgccacagatgaaaaagacaagtttgttgaaaaaatgaccatctttgtgaaggatgcacaggaacagtataacaagctgcggatgatgcattctaacatggagaccctctataaggagctgggcgagtacttcctctttgaccccaagaagttgtctgttgaagaatttttcatggatcttcacaattttcggaatatgtttttgcaagcagtcaaggagaaccagaagcggcgggagacagaagaaaagatgaggcgagcaaaactagccaaggagaaggcagagaaggagcggctagagaagcagcagaagagagagcaactcatagacatgaatgcagagggcgatgagacaggtgtgatggacagtcttctagaagccctgcagtcaggggcagcattccgacggaagagagggccccgtcaagccaacaggaaggccgggtgtgcagtcacatctctgctagcttcggagctgaccaaggatgatgccatggctgctgttcctgccaaggtgtccaagaacagtgagacattccccacaatccttgaggaagccaaggagttggttggccgtgcaagctaatgtgggtcctgtgaccgcggcagctcctcagcggagccgcagactgtcctgccctgcagcatgtgcctaaaggctcaaggggatattcctctggggtggccactcccaccaccctgaccctgtctttctctctggcctgctgctctctcaacatcacatacagcttcagctgcctggaggccagaaggaaagggcagtgcaggggaggcctgagcccgacttagccagccctggctgttgtattaccaaagcagggtccatgtttgctgccttaaccctgtctcctctctgttactcagagggcctcatctcagacaaggcccagcctgctttttctcagccctgactttctaatgggctttcccccctaggtcagtcttgctggatttgtgcttttcttttgtggtttctctggccctgagaatagcatggggcttgtaaacctttgggctagatccctcctttcattgctgttgtctctgctcttccctctcctggctgtggttatttattattagtggtgtggcactgggagctgctcctaaggaagcagggagcaaatcccacctttaccccaccttcctgggaaaggcctccaaagcaaaggatctggaccagtttccctgctgtgctgtggcccaggccagagcctgtgggcaggcaggcagggcatagcgacagtgtgggacctgcccccagcttctgccacgctttatgcccttgcctctctggacgctctgcaccaaccccaggctactgagccaccttccctcctcatgccttccctgagctttggtgcatctcatctggactatgggttgtactgtgaccatcccaacacctcaccctctgtctacaaggaaatgggaggtggagcctcctggctgagaaattgttttgcaaatggatctatttttgtatgaaaaaaaaaatttttttaaagaaaactgttccttccccctttcccctccataatgtaagaagctttggtggcaggttacagagttctgggatttcttctcacaggcccaatcctgaatgtgcccctggaccttctggacccttgagtccaaggcagatcctctctcccagggaatccgacacaggaggaaccccttctctggttgagctgggccaggcctaagagtagcaggaactctaagaccacagagttttttataaatgtataaatgtatcaagccaaatgtgcagatgctaactggacattctggggaactgggcaccaggagtgccttcatacactgtaccccagctctcttctaaaagagaagtgggtgggcacactgaactgtttggtggccccaaccacaggaagctgcaattctctggcttagggtgatacttttgccctccttgtgcccctctcagctttccatccccagctaggaagaaagaatggcactcttgggcttggcccagaattagagttattagagcaagagagagcttaggaagcatgagggcaactatagtgaggccttattgccaggagggagggttttggttgctggcgcttgtgtataaaggggcaagagcagctcctttggactattcctgggaggactctgatgcagggcgtctgttgctcccctgggtcacctcctccctgctcgctgacatctggggctttgaccctttcttttttaatctacttttgctaagatgcatttaataaaaaaaaagagagagagagagaggtgtgagggacaaaatgcaaacctatttcccttgcctcataggcttctgggatgtcatcacctccagtttgttggttttgtttccaactgttaataaagcattgaaacagt

SEQ ID NO: 154035 - DNA, 5786 bp, Artificial Sequence
  derived and/or modified sequence
attcatgaggcgcgcgcagcccggcatgctaatgaggcggggcgcggcggctggctaaagagcgactgggcggcggcgggcgcggagctgccaggcgggagcggcgtaggcgcggggtcgccggccagcgtgaaccgggacatggagccgcccggcgggagcctggggcccggccgcgggacccgggacaagaagaagggccggagcccagatgagctgccctcggcgggcggcgacggcggcaaatctaagaaatttactctgaagcggctcatggcagatgagctggagagatttaccagcatgagaattaagaaggagaaggaaaagcccaattctgctcatagaaattcttctgcatcatatggggatgatcccacagcacagtcattgcaagatgtttcagatgaacaagtgctggttctctttgaacagatgctgctggatatgaacctgaatgaggagaaacagcaacctttgagggagaaggacatcatcatcaagagggagatggtgtcccaatacttgtacacctccaaggctggcatgagccagaaggagagctctaagtctgccatgatgtatattcaggagttgaggtcaggcttgcgggatatgcctctgctcagctgcctggagtcccttcgtgtgtctctcaacaacaaccctgtcagttgggtgcaaacatttggtgctgaaggcttggcctccttattggacattcttaaacgacttcatgatgagaaagaagagactgctgggagttacgatagccggaacaagcatgagatcattcgctgcttgaaagcttttatgaacaacaagtttggaatcaagaccatgttggagacagaagaaggaatcctactgctggtcagagccatggatcctgctgttcccaacatgatgattgatgcagctaagctgctttctgctctttgtattctaccgcagccagaggacatgaatgaaagggttttggaggcaatgacagaaagagctgagatggatgaagtggaacgtttccagccgctgctggatggattaaaaagtggaaccactattgcactgaaggttggatgcctacagctgatcaatgctctcatcacaccagcggaggaacttgacttccgagttcacatcagaagtgaactgatgcgtttggggctacatcaggtgttgcaggaccttcgagagattgaaaatgaagatatgagagtgcaactaaatgtgtttgatgaacaaggggaagaggattcctatgacctgaagggacggctggatgacattcgcatggagatggatgactttaatgaagtctttcagattctcttaaacacagtgaaggattcaaaggcagagccacacttcctttccatcctgcagcacttactcttggtccgaaatgactatgaggccagacctcagtactataagttgattgaagaatgtatttcccagatagttctgcacaagaacggggctgatcctgacttcaagtgccggcacctccagattgagattgagggattaattgatcaaatgattgataagacaaaggtggagaaatctgaagccaaagctgcagagctggaaaagaagttggactcagagttaacagcccgacatgagctacaggtggaaatgaaaaagatggaaagtgactttgagcagaagcttcaagatcttcagggagaaaaagatgcactgcattctgaaaagcagcaaattgccacagagaaacaggacctggaagcagaggtgtcccagctcacaggagaggttgccaagctgacaaaggaactggaagatgccaagaaagaaatggcttccctctctgcggcagctattactgtacctccttctgttcctagtcgtgctcctgttccccctgcccctcctttacctggtgactctggcactattattccaccaccacctgctcctggggatagtaccactcctcctcctcctcctcctcctcctcctcctccacctcctttgcctgggggtgtttgcatctcctcacccccttctttacctggaggtactgctatctctccaccccctcctttgtctggggatgctaccatccctccaccccctcctttgcctgagggtgttggcatcccttcaccctcttctttgcctggaggtactgccatccccccacctcctcctttgcctgggagtgctagaatccccccaccaccacctcctttgcctgggagtgctggaattccccccccacctcctcccttgcctggagaagcaggaatgccacctcctcctccccctcttcctggtggtcctggaatccctccacctcctccatttcccggaggccctggcattcctccacctccacccggaatgggtatgcctccacctcccccatttggatttggagttcctgcagccccagttctgccatttggattaacccccaaaaagctttataagccagaggtgcagctccggaggccaaactggtccaagcttgtggctgaggacctctcccaggactgcttctggacaaaggtgaaggaggaccgctttgagaacaatgaacttttcgccaaacttacccttaccttctctgcccagaccaagaccaagaaggatcaagaaggtggagaagaaaagaaatctgtgcaaaagaaaaaagtaaaagagttaaaggtgttggattcaaagacagcccagaatctctcaatctttttgggttccttccgcatgccctatcaagagattaagaatgtcatcctggaggtgaatgaggctgttctgactgagtctatgatccagaacctcattaagcaaatgccagagccagagcagttaaaaatgctttctgaactgaaggatgaatatgatgacctggctgagtcagagcagtttggcgtggtgatgggcactgtgccccgactgcggcctcgcctcaatgccattctcttcaagctacaattcagcgagcaagtggagaatatcaagccagagattgtgtctgtcactgctgcatgtgaggagttacgtaagagtgagagcttttccaatctcctagagattaccttgcttgttggaaattacatgaatgctggctccagaaatgctggtgcttttggcttcaatatcagcttcctctgtaagcttcgagacaccaagtccacagatcagaagatgacgttgttacacttcttggctgagttgtgtgagaatgactatcccgatgtcctcaagtttccagacgagcttgcccatgtggagaaagccagccgagtttctgctgaaaacttgcaaaagaacctagatcagatgaagaaacaaatttctgatgtggaacgtgatgttcagaatttcccagctgccacagatgaaaaagacaagtttgttgaaaaaatgaccagctttgtgaaggatgcacaggaacagtataacaagctgcggatgatgcattctaacatggagaccctctataaggagctgggcgagtacttcctctttgaccccaagaagttgtctgttgaagaatttttcatggatcttcacaattttcggaatatgtttttgcaagcagtcaaggagaaccagaagcggcgggagacagaagaaaagatgaggcgagcaaaactagccaaggagaaggcagagaaggagcggctagagaagcagcagaagagagagcaactcatagacatgaatgcagagggcgatgagacaggtgtgatggacagtcttctagaagccctgcagtcaggggcagcattccgacggaagagagggccccgtcaagccaacaggaaggccgggtgtgcagtcacatctctgctagcttcggagctgaccaaggatgatgccatggctgctgttcctgccaaggtgtccaagaacagtgagacattccccacaatccttgaggaagccaaggagttggttggccgtgcaagctaatgtgggtcctgtgaccgcggcagctcctcagcggagccgcagactgtcctgccctgcagcatgtgcctaaaggctcaaggggatattcctctggggtggccactcccaccaccctgaccctgtctttctctctggcctgctgctctctcaacatcacatacagcttcagctgcctggaggccagaaggaaagggcagtgcaggggaggcctgagcccgacttagccagccctggctgttgtattaccaaagcagggtccatgtttgctgccttaaccctgtctcctctctgttactcagagggcctcatctcagacaaggcccagcctgctttttctcagccctgactttctaatgggctttcccccctaggtcagtcttgctggatttgtgcttttcttttgtggtttctctggccctgagaatagcatggggcttgtaaacctttgggctagatccctcctttcattgctgttgtctctgctcttccctctcctggctgtggttatttattattagtggtgtggcactgggagctgctcctaaggaagcagggagcaaatcccacctttaccccaccttcctgggaaaggcctccaaagcaaaggatctggaccagtttccctgctgtgctgtggcccaggccagagcctgtgggcaggcaggcagggcatagcgacagtgtgggacctgcccccagcttctgccacgctttatgcccttgcctctctggacgctctgcaccaaccccaggctactgagccaccttccctcctcatgccttccctgagctttggtgcatctcatctggactatgggttgtactgtgaccatcccaacacctcaccctctgtctacaaggaaatgggaggtggagcctcctggctgagaaattgttttgcaaatggatctatttttgtatgaaaaaaaaaatttttttaaagaaaactgttccttccccctttcccctccataatgtaagaagctttggtggcaggttacagagttctgggatttcttctcacaggcccaatcctgaatgtgcccctggaccttctggacccttgagtccaaggcagatcctctctcccagggaatccgacacaggaggaaccccttctctggttgagctgggccaggcctaagagtagcaggaactctaagaccacagagttttttataaatgtataaatgtatcaagccaaatgtgcagatgctaactggacattctggggaactgggcaccaggagtgccttcatacactgtaccccagctctcttctaaaagagaagtgggtgggcacactgaactgtttggtggccccaaccacaggaagctgcaattctctggcttagggtgatacttttgccctccttgtgcccctctcagctttccatccccagctaggaagaaagaatggcactcttgggcttggcccagaattagagttattagagcaagagagagcttaggaagcatgagggcaactatagtgaggccttattgccaggagggagggttttggttgctggcgcttgtgtataaaggggcaagagcagctcctttggactattcctgggaggactctgatgcagggcgtctgttgctcccctgggtcacctcctccctgctcgctgacatctggggctttgaccctttcttttttaatctacttttgctaagatgcatttaataaaaaaaaagagagagagagagaggtgtgagggacaaaatgcaaacctatttcccttgcctcataggcttctgggatgtcatcacctccagtttgttggttttgtttccaactgttaataaagcattgaaacagtactgcc

SEQ ID NO: 154036 - DNA, 5789 bp, Artificial Sequence
  derived and/or modified sequence
attcatgaggcgcgcgcagcccggcatgctaatgaggcggggcgcggcggctggctaaagagcgactgggcggcggcgggcgcggagctgccaggcgggagcggcgtaggcgcggggtcgccggccagcgtgaaccgggacatggagccgcccggcgggagcctggggcccggccgcgggacccgggacaagaagaagggccggagcccagatgagctgccctcggcgggcggcgacggcggcaaatctaagaaatttactctgaagcggctcatggcagatgagctggagagatttaccagcatgagaattaagaaggagaaggaaaagcccaattctgctcatagaaattcttctgcatcatatggggatgatcccacagcacagtcattgcaagatgtttcagatgaacaagtgctggttctctttgaacagatgctgctggatatgaacctgaatgaggagaaacagcaacctttgagggagaaggacatcatcatcaagagggagatggtgtcccaatacttgtacacctccaaggctggcatgagccagaaggagagctctaagtctgccatgatgtatattcaggagttgaggtcaggcttgcgggatatgcctctgctcagctgcctggagtcccttcgtgtgtctctcaacaacaaccctgtcagttgggtgcaaacatttggtgctgaaggcttggcctccttattggacattcttaaacgacttcatgatgagaaagaagagactgctgggagttacgatagccggaacaagcatgagatcattcgctgcttgaaagcttttatgaacaacaagtttggaatcaagaccatgttggagacagaagaaggaatcctactgctggtcagagccatggatcctgctgttcccaacatgatgattgatgcagctaagctgctttctgctctttgtattctaccgcagccagaggacatgaatgaaagggttttggaggcaatgacagaaagagctgagatggatgaagtggaacgtttccagccgctgctggatggattaaaaagtggaaccactattgcactgaaggttggatgcctacagctgatcaatgctctcatcacaccagcggaggaacttgacttccgagttcacatcagaagtgaactgatgcgtttggggctacatcaggtgttgcaggaccttcgagagattgaaaatgaagatatgagagtgcaactaaatgtgtttgatgaacaaggggaagaggattcctatgacctgaagggacggctggatgacattcgcatggagatggatgactttaatgaagtctttcagattctcttaaacacagtgaaggattcaaaggcagagccacacttcctttccatcctgcagcacttactcttggtccgaaatgactatgaggccagacctcagtactataagttgattgaagaatgtatttcccagatagttctgcacaagaacggggctgatcctgacttcaagtgccggcacctccagattgagattgagggattaattgatcaaatgattgataagacaaaggtggagaaatctgaagccaaagctgcagagctggaaaagaagttggactcagagttaacagcccgacatgagctacaggtggaaatgaaaaagatggaaagtgactttgagcagaagcttcaagatcttcagggagaaaaagatgcactgcattctgaaaagcagcaaattgccacagagaaacaggacctggaagcagaggtgtcccagctcacaggagaggttgccaagctgacaaaggaactggaagatgccaagaaagaaatggcttccctctctgcggcagctattactgtacctccttctgttcctagtcgtgctcctgttccccctgcccctcctttacctggtgactctggcactattattccaccaccacctgctcctggggatagtaccactcctcctcctcctcctcctcctcctcctcctccacctcctttgcctgggggtgtttgcatctcctcacccccttctttacctggaggtactgctatctctccaccccctcctttgtctggggatgctaccatccctccaccccctcctttgcctgagggtgttggcatcccttcaccctcttctttgcctggaggtactgccatccccccacctcctcctttgcctgggagtgctagaatccccccaccaccacctcctttgcctgggagtgctggaattccccccccacctcctcccttgcctggagaagcaggaatgccacctcctcctccccctcttcctggtggtcctggaatccctccacctcctccatttcccggaggccctggcattcctccacctccacccggaatgggtatgcctccacctcccccatttggatttggagttcctgcagccccagttctgccatttggattaacccccaaaaagctttataagccagaggtgcagctccggaggccaaactggtccaagcttgtggctgaggacctctcccaggactgcttctggacaaaggtgaaggaggaccgctttgagaacaatgaacttttcgccaaacttacccttaccttctctgcccagaccaagacttccaaagccaagaaggatcaagaaggtggagaagaaaagaaatctgtgcaaaagaaaaaagtaaaagagttaaaggtgttggattcaaagacagcccagaatctctcaatctttttgggttccttccgcatgccctatcaagagattaagaatgtcatcctggaggtgaatgaggctgttctgactgagtctatgatccagaacctcattaagcaaatgccagagccagagcagttaaaaatgctttctgaactgaaggatgaatatgatgacctggctgagtcagagcagtttggcgtggtgatgggcactgtgccccgactgcggcctcgcctcaatgccattctcttcaagctacaattcagcgagcaagtggagaatatcaagccagagattgtgtctgtcactgctgcatgtgaggagttacgtaagagtgagagcttttccaatctcctagagattaccttgcttgttggaaattacatgaatgctggctccagaaatgctggtgcttttggcttcaatatcagcttcctctgtaagcttcgagacaccaagtccacagatcagaagatgacgttgttacacttcttggctgagttgtgtgagaatgactatcccgatgtcctcaagtttccagacgagcttgcccatgtggagaaagccagccgagtttctgctgaaaacttgcaaaagaacctagatcagatgaagaaacaaatttctgatgtggaacgtgatgttcagaatttcccagctgccacagatgaaaaagacaagtttgttgaaaaaatgaccagctttgtgaaggatgcacaggaacagtataacaagctgcggatgatgcattctaacatggagaccctctataaggagctgggcgagtacttcctctttgaccccaagaagttgtctgttgaagaatttttcatggatcttcacaattttcggaatatgtttttgcaagcagtcaaggagaaccagaagcggcgggagacagaagaaaagatgaggcgagcaaaactagccaaggagaaggcagagaaggagcggctagagaagcagcagaagagagagcaactcatagacatgaatgcagagggcgatgagacaggtgtgatggacagtcttctagaagccctgcagtcaggggcagcattccgacggaagagagggccccgtcaagccaacaggaaggccgggtgtgcagtcacatctctgctagcttcggagctgaccaaggatgatgccatggctgctgttcctgccaaggtgtccaagaacagtgagacattccccacaatccttgaggaagccaaggagttggttggccgtgcaagctaatgtgggtcctgtgaccgcggcagctcctcagcggagccgcagactgtcctgccctgcagcatgtgcctaaaggctcaaggggatattcctctggggtggccactcccaccaccctgaccctgtctttctctctggcctgctgctctctcaacatcacatacagcttcagctgcctggaggccagaaggaaagggcagtgcaggggaggcctgagcccgacttagccagccctggctgttgtattaccaaagcagggtccatgtttgctgccttaaccctgtctcctctctgttactcagagggcctcatctcagacaaggcccagcctgctttttctcagccctgactttctaatgggctttcccccctaggtcagtcttgctggatttgtgcttttcttttgtggtttctctggccctgagaatagcatggggcttgtaaacctttgggctagatccctcctttcattgctgttgtctctgctcttccctctcctggctgtggttatttattattagtggtgtggcactgggagctgctcctaaggaagcagggagcaaatcccacctttaccccaccttcctgggaaaggcctccaaagcaaaggatctggaccagtttccctgctgtgctgtggcccaggccagagcctgtgggcaggcaggcagggcatagcgacagtgtgggacctgcccccagcttctgccacgctttatgcccttgcctctctggacgctctgcaccaaccccaggctactgagccaccttccctcctcatgccttccctgagctttggtgcatctcatctggactatgggttgtactgtgaccatcccaacacctcaccctctgtctacaaggaaatgggaggtggagcctcctggctgagaaattgttttgcaaatggatctatttttgtatgaaaaaaaaaatttttttaaagaaaactgttccttccccctttcccctccataatgtaagaagctttggtggcaggttacagagttctgggatttcttctcacaggcccaatcctgaatgtgcccctggaccttctggacccttgagtccaaggcagatcctctctcccagggaatccgacacaggaggaaccccttctctggttgagctgggccaggcctaagagtagcaggaactctaagaccacagagttttttataaatgtataaatgtatcaagccaaatgtgcagatgctaactggacattctggggaactgggcaccaggagtgccttcatacactgtaccccagctctcttctaaaagagaagtgggtgggcacactgaactgtttggtggccccaaccacaggaagctgcaattctctggcttagggtgatacttttgccctccttgtgcccctctcagctttccatccccagctaggaagaaagaatggcactcttgggcttggcccagaattagagttattagagcaagagagagcttaggaagcatgagggcaactatagtgaggccttattgccaggagggagggttttggttgctggcgcttgtgtataaaggggcaagagcagctcctttggactattcctgggaggactctgatgcagggcgtctgttgctcccctgggtcacctcctccctgctcgctgacatctggggctttgaccctttcttttttaatctacttttgctaagatgcatttaataaaaaaaaagagagagagagagaggtgtgagggacaaaatgcaaacctatttcccttgcctcataggcttctgggatgtcatcacctccagtttgttggttttgtttccaactgttaataaagcattgaaacagt

SEQ ID NO: 154037 - DNA, 2676 bp, Artificial Sequence
  derived and/or modified sequence
attcatgaggcgcgcgcagcccggcatgctaatgaggcggggcgcggcggctggctaaagagcgactgggcggcggcgggcgcggagctgccaggcgggagcggcgtaggcgcggggtcgccggccagcgtgaaccgggacatggagccgcccggcgggagcctggggcccggccgcgggacccgggacaagaagaagggccggagcccagatgagctgccctcggcgggcggcgacggcggcaaatctaagaaatttactctgaagcggctcatggcagatgagctggagagatttaccagcatgagaattaagaaggagaaggaaaagcccaattctgctcatagaaattcttctgcatcatatggggatgatcccacagcacagtcattgcaagatgtttcagatgaacaagtgctggttctctttgaacagatgctgctggatatgaacctgaatgaggagaaacagcaacctttgagggagaaggacatcatcatcaagagggagatggtgtcccaatacttgtacacctccaaggctggcatgagccagaaggagagctctaagtctgccatgatgtatattcaggagttgaggtcaggcttgcgggatatgcctctgctcagctgcctggagtcccttcgtgtgtctctcaacaacaaccctgtcagttgggtgcaaacatttggtgctgaaggcttggcctccttattggacattcttaaacgacttcatgatgagaaagaagagactgctgggagttacgatagccggaacaagcatgagatcattcgctgcttgaaagcttttatgaacaacaagtttggaatcaagaccatgttggagacagaagaaggaatcctactgctggtcagagccatggatcctgctgttcccaacatgatgattgatgcagctaagctgctttctgctctttgtattctaccgcagccagaggacatgaatgaaagggttttggaggcaatgacagaaagagctgagatggatgaagtggaacgtttccagccgctgctggatggattaaaaagtggaaccactattgcactgaaggttggatgcctacagctgatcaatgctctcatcacaccagcggaggaacttgacttccgagttcacatcagaagtgaactgatgcgtttggggctacatcaggtgttgcaggaccttcgagagattgaaaatgaagatatgagagtgcaactaaatgtgtttgatgaacaaggggaagaggattcctatgacctgaagggacggctggatgacattcgcatggagatggatgactttaatgaagtctttcagattctcttaaacacagtgaaggattcaaaggcagagccacacttcctttccatcctgcagcacttactcttggtccgaaatgactatgaggccagacctcagtactataagttgattgaagaatgtatttcccagatagttctgcacaagaacggggctgatcctgacttcaagtgccggcacctccagattgagattgagggattaattgatcaaatgattgataagacaaaggtggagaaatctgaagccaaagctgcagagctggaaaagaagttggactcagagttaacagcccgacatgagctacaggtggaaatgaaaaagatggaaagtgactttgagcagaagcttcaagatcttcagggagaaaaagatgcactgcattctgaaaagcagcaaattgccacagagaaacaggacctggaagcagaggtgtcccagctcacaggagaggttgccaagctgacaaaggaactggaagatgccaagaaagaaatggcttccctctctgcggcagctattactgtacctccttctgttcctagtcgtgctcctgttccccctgcccctcctttacctggtgactctggcactattattccaccaccacctgctcctggggatagtaccactcctcctcctcctcctcctcctcctcctcctccacctcctttgcctgggggtgtttgcatctcctcacccccttctttacctggaggtactgctatctctccaccccctcctttgtctggggatgctaccatccctccaccccctcctttgcctgagggtgttggcatcccttcaccctcttctttgcctggaggtactgccatccccccacctcctcctttgcctgggagtgctagaatccccccaccaccacctcctttgcctgggagtgctggaattccccccccacctcctcccttgcctggagaagcaggaatgccacctcctcctccccctcttcctggtggtcctggaatccctccacctcctccatttcccggaggccctggcattcctccacctccacccggaatgggtatgcctccacctcccccatttggatttggagttcctgcagccccagttctgccatttggattaacccccaaaaagctttataagccagaggtgcagctccggaggccaaactggtccaagcttgtggctgaggacctctcccaggactgcttctggacaaaggtgaaggaggaccgctttgagaacaatgaacttttcgccaaacttacccttaccttctctgcccagaccaagagtgaaaaggccaagaaggatcaagaaggtggagaagaaaagaaatctgtgcaaaagaaaaaa

SEQ ID NO: 154038 - DNA, 3822 bp, Artificial Sequence
  derived and/or modified sequence
atggagcccccagggggatccctcggacctggacggggtactcgcgacaaaaaaaagggccggtctccggacgaactgccttccgctggcggagacggcgggaaatctaagaaattcacactgaaacggctgatggccgacgaattagagagattcacgtctatgaggatcaaaaaggaaaaagaaaaacccaactcagctcacaggaatagctccgcctcttatggcgatgacccaactgcacagtctttgcaagatgtctccgacgaacaagttctagtcctctttgaacagatgctgctggacatgaacttgaatgaagaaaagcaacaaccactgcgagaaaaggatatcataattaagcgagaaatggttagtcagtatctgtatacctccaaagcaggaatgagccaaaaagaatcctcaaaaagcgccatgatgtatattcaggagttacggtcaggcttacgggatatgcccctcctgagttgccttgagagcctgcgagtgtcacttaataacaatccggtctcgtgggtacagacattcggagccgaaggacttgctagcctccttgacatcttaaagagactgcacgacgaaaaggaggaaaccgcaggatcatatgactcccgcaacaagcacgagataatccgatgcctgaaggcgtttatgaataataaatttggaataaagacaatgctggagacagaagaaggcattctcctcctggtccgtgctatggatcctgccgtgcccaacatgatgattgacgctgcaaagctgctgtcagccttgtgcattctcccacaaccagaagatatgaacgaacgcgttcttgaggccatgacagaacgggctgagatggatgaggtggagcggttccagcctctgttggacgggctgaagtcgggcaccactatcgcccttaaagtcgggtgtttgcagctgattaatgccttgataacacccgctgaggagctcgatttccgcgtccacatcagatccgagctgatgagactgggactccatcaggtcctccaggacctgcgagagatcgagaacgaggacatgagggtccagctgaacgttttcgatgaacagggggaagaggactcttacgatctgaagggccggctagacgacattcgcatggagatggacgacttcaatgaggtctttcaaatcctgctgaacactgtgaaagattcgaaggccgagccacattttctttctattttacaacacctgctgttagtgcgaaatgactacgaagctaggccacagtactacaaactgattgaggagtgtatatctcagatagttctgcataagaatggtgcagatcccgactttaaatgccgtcatctccagatcgaaattgagggccttatagatcagatgattgacaagacaaaggtcgagaagagcgaggcgaaagcagccgagctcgaaaaaaaactcgattctgaactgactgccaggcacgagctgcaggttgagatgaagaagatggaatctgactttgaacagaaactgcaggacttgcagggggagaaggatgcacttcactccgagaagcagcaaatcgccaccgaaaagcaggacctcgaggctgaggtgtcacagctgactggcgaggtcgctaagctgactaaggaactggaagacgccaaaaaggagatggcatccttatcagccgctgccatcaccgtgcctcctagcgttccatccagggcacctgtccctccagccccccctttgcccggcgattccggaaccataatacctccaccccccgcaccaggagattcgactacacctccccctccaccccctccacctcctcccccccctcctttgcccgggggtgtgtgcatcagctctcctccgagcctgcccggaggaaccgcaatttctccccccccacccttgagcggggacgccacgattcctcccccgccccccttgccagagggtgtgggcatacccagtcctagttcactgccaggaggaaccgctatccccccacctccccccctgcccggatctgccagaatccctccacccccacccccgttaccgggcagtgcggggattccccctccacctcctccactccccggcgaagctggtatgccgcccccccctccccctctgccaggcggaccagggataccccccccacctccattccctggcgggcccgggattccaccaccaccgcctggcatgggaatgcctcctccacctcccttcggattcggtgtcccagcagcccccgtactgcctttcggcctgacgccaaagaagctatacaagccagaggtgcagctcagacgtcctaactggtctaagctagtcgctgaggacctttcacaagactgtttttggaccaaggtcaaagaagatcgtttcgaaaacaacgagctgttcgcgaaactcactctgaccttcagtgcacagacaaagagaacaaaaaaagcaaagaaggatcaggaaggtggagaggagaaaaaatcagtgcaaaaaaagaaggtgaaagaacttaaggtcctggactccaagacagctcaaaacctgtccatctttttggggtcattcaggatgccgtaccaggaaataaaaaatgtgattcttgaagtaaatgaggcggtgcttacagaaagtatgatccaaaatctgataaagcagatgcctgaacctgaacagctaaagatgctgtccgagttgaaagatgagtatgacgacttggccgagtccgaacaattcggcgtcgtgatgggcaccgtcccccgcttgagaccaaggttgaacgctatattattcaaactgcagtttagtgaacaggtggagaacattaaacccgagatcgtgagcgttactgcagcatgcgaagagctgaggaagagcgaatccttcagtaacttgttggagataaccctgcttgtcggcaattacatgaacgctggatcccgcaatgctggagcttttgggtttaacattagctttctgtgcaagttacgcgataccaagagcaccgatcagaagatgacgttgctgcatttcctcgctgaactgtgtgagaacgactatcccgacgttctgaaattccccgatgagttggcgcacgtggaaaaggcttcccgggtgagtgctgaaaatttgcagaagaatctggaccagatgaaaaaacagatcagtgacgtagagcgggacgtgcagaacttccccgccgcgactgacgagaaagataaattcgtggagaaaatgactatatttgtgaaggacgcccaggagcaatacaataaactaagaatgatgcactctaacatggaaacactgtacaaggaactcggtgagtacttccttttcgatcctaaaaagttatctgtggaagagtttttcatggacctgcataattttcgaaatatgttcctacaggctgtcaaagagaatcagaagcgccgtgaaactgaagagaagatgagaagagctaagttagcgaaagagaaggccgaaaaggaacgtctcgagaagcagcagaagagggagcagctcatagacatgaacgctgaaggggatgaaacaggcgtgatggactcccttcttgaagctctgcagtcaggcgccgcctttcgccgtaagagaggaccaaggcaggctaacagaaaggcaggatgcgctgtgaccagcctcctggctagtgagctgaccaaggacgacgctatggcggcagtacccgccaaggtgagcaagaactccgagaccttccctactatcctcgaagaagcgaaggagctcgtcggaagggcctcctag

SEQ ID NO: 154039 - DNA, 3810 bp, Artificial Sequence
  derived and/or modified sequence
atggagccccctgggggtagcctcgggccaggcaggggaactagagacaagaaaaagggccgcagcccagacgaactgccaagtgcaggaggcgatggaggcaagagtaagaagttcactcttaaaagactaatggctgacgaactcgagcgattcaccagtatgcgaattaagaaggagaaggaaaaacctaatagcgcacaccggaactcttctgcttcttacggagatgacccgacggctcagtcactgcaggatgtgtccgacgagcaggttctggttctattcgaacaaatgctgcttgacatgaacttaaatgaggaaaagcagcaaccactgcgggaaaaggacatcattattaagagagaaatggtgtcccagtatctctatacttccaaggcagggatgagtcagaaagaatcttctaaatcggctatgatgtatattcaggagctacgatcaggactgcgcgatatgccgcttctgtcatgcttggaaagcctgcgcgttagcttgaacaacaacccagtgtcctgggttcagaccttcggcgccgaaggattggccagcctgctggatatcctcaagcggcttcacgacgagaaggaggagaccgctgggtcatatgatagccgcaacaagcacgagatcatccgctgtctcaaggcattcatgaataataaatttgggatcaaaacaatgctggagaccgaagaaggaatactactcctcgtgcgagctatggatccagctgtgccgaatatgatgattgatgctgccaagttgctgtctgccctatgtatcctaccccagcccgaagacatgaatgaacgggtattggaggccatgacggagcgggccgagatggatgaagtcgagaggtttcaaccactgcttgacggactcaagtcaggtaccaccatcgccctgaaggtaggatgcctgcagttgataaatgctctaataactccagccgaggaactggactttcgggttcatataagatccgaattgatgcggctcggcctccatcaggtgcttcaggacctgagagaaatcgagaatgaagatatgcgcgtacagctcaacgtcttcgatgagcaaggggaggaggactcctacgacttaaaagggaggctggatgacatcagaatggaaatggatgatttcaatgaggtcttccagatacttctgaataccgtcaaagattcaaaagctgagcctcactttctcagtattttgcagcacttattgttagtccggaacgattacgaagctcggccccagtactacaaactgatcgaagaatgcatttcccagattgtgctgcataagaatggggctgatccagacttcaaatgccggcaccttcaaatcgagattgagggcttaatagaccagatgattgacaagactaaagtcgaaaaaagcgaggcaaaagcggcagagctggagaagaaattggacagcgaactcacggcccggcatgagctgcaggtagagatgaaaaaaatggaaagtgacttcgagcagaagctgcaggatcttcaaggagaaaaagacgcgctccattccgagaagcagcaaatagcaaccgagaagcaggacctggaagcagaggtgtctcagcttaccggagaggtggctaaactgacaaaggaactggaagatgccaagaaagagatggcaagtctgtctgccgccgccattacggtgccaccgagtgtgccatctcgagcccccgtgcctcccgctccaccacttccaggagattccggaacaataatcccaccaccaccagctccaggtgattccacgacacctccccctccacctccaccaccccctccacccccaccattacctggcggagtctgcatcagttctcccccttctctacctggcgggaccgccatctcacctcctccacccctgtctggggacgctaccatcccccccccccccccgttgcccgagggagtcggcatccccagcccttcgagcctgcctgggggcaccgccattcctcccccccctccactccctggctccgctagaatccctcctccaccgccccctttaccagggagcgctgggatccccccaccaccacctccactgcccggggaagcgggcatgcccccgcctcccccccctctgccaggggggcccggaatccctcccccaccccccttccctgggggacccggcattccccccccacctcccggtatgggtatgccacctccccccccgttcggttttggcgtgcccgccgcgccggttctcccattcggactcacaccaaaaaaactctacaagcccgaagtgcagctgaggagaccgaattggagcaaactggtggccgaggacctcagtcaggattgcttttggacaaaggtgaaagaagataggtttgagaacaatgaattattcgccaaacttacactgacctttagcgcgcaaactaaaaccaagaaggaccaggaggggggggaggagaaaaagagcgtacagaaaaaaaaggtgaaagagctgaaggtgctggacagcaaaaccgcccagaacctgtccatcttcttgggctcatttcgcatgccataccaagagataaagaatgtgatccttgaggtcaacgaagcagtgctgaccgaatcaatgatccaaaatctgatcaaacaaatgcctgaacccgaacagcttaagatgctcagtgagctgaaagatgaatatgacgacctggctgaaagcgaacagttcggggtggtgatggggaccgtacctcgactcagacctaggttgaatgctatcttgttcaaactgcagttcagtgaacaagtcgagaatattaaaccagagatcgtttcggttacggcagcatgcgaagagcttcgaaaaagcgaatctttctcaaatctcctggagatcacactgctggtcggaaactatatgaacgcgggcagtagaaatgccggcgcttttggattcaacataagcttcctttgtaaacttcgggacacaaaaagcacagatcagaagatgacactgttgcacttcctggccgaattgtgcgaaaacgattaccctgacgtgctcaaatttcccgacgagttggcgcatgtggagaaagcaagccgagtttctgccgaaaatctgcagaagaacctagatcagatgaagaagcagatttcagatgtggagcgggacgtacagaacttccctgctgctacggacgagaaagataagttcgtagagaagatgacatcgttcgtgaaagacgcacaggagcagtataataagctgaggatgatgcactctaatatggagacactctataaagagctgggggagtacttcctttttgaccctaaaaagttgagtgtagaggagttttttatggatttacataacttccgcaatatgttcctgcaggccgtcaaggaaaaccaaaagcgtcgcgaaacagaagaaaagatgcgccgcgccaagctggcgaaagaaaaggccgaaaaagaaagattggagaaacagcagaagagagaacagctgatcgacatgaacgcagaaggtgacgagactggggtgatggattccctgcttgaagctctgcagagcggcgccgcatttcgacggaagagaggtcctcgccaggctaacagaaaagcgggctgtgcggtgacttctctgctggcctcagagctgaccaaggatgacgcaatggctgctgtgcctgccaaggtctctaaaaactccgaaacattccccacaatcctcgaggaggccaaagagctggtggggagagcttcctag

SEQ ID NO: 154040 - DNA, 3819 bp, Artificial Sequence
  derived and/or modified sequence
atggaaccgcccggtggaagtctgggaccaggccgagggacccgggataagaaaaaagggcgctcccctgacgagttgccaagcgctgggggggatggaggcaaatctaagaagttcactctgaaacgtctcatggccgacgaactagagcggtttacttccatgcggataaagaaggagaaggaaaagccaaactccgcccaccgtaactcctccgcctcttatggtgacgaccctactgcacagagcctccaggacgtctctgatgagcaagtcctggtcctcttcgagcagatgctgctcgatatgaacctgaacgaggaaaaacagcaacctctgcgagagaaggatatcataattaagagggaaatggtttcacagtatctgtacacatccaaggccggaatgtctcagaaggaatcttccaaatcggccatgatgtatatccaggaactaaggtcaggtttgagggatatgccattgcttagctgtctggaatccctccgggtgagtctcaacaataatccagtctcatgggttcaaaccttcggggccgagggcctggcctcacttctcgatatactgaagcgcctgcacgatgagaaagaggagacagccggcagctacgactcacgaaacaagcatgagatcatcaggtgcctaaaggcctttatgaacaacaaatttggtatcaaaacaatgctggaaaccgaggaaggtatcttgctgttagtgcgggcaatggatcccgccgttcccaacatgatgattgacgcagcaaagctcctgtccgctctgtgcatactgccccagccagaggatatgaacgaaagagtccttgaggccatgacagagcgggctgaaatggacgaggtagaaagattccagcccttgctcgacggcttgaaatccggcacaactatagctcttaaggtcggttgcctccagctgataaacgctctcataacccctgccgaggagctggactttagagtccacattcgctccgagctgatgcggctaggacttcaccaggtgctccaggatctccgggaaattgaaaatgaggatatgcgagtccagctaaatgtctttgatgagcagggcgaagaagacagctatgacctgaaaggaaggcttgacgacatccggatggaaatggatgacttcaacgaagttttccagatactgctgaatactgtgaaggattccaaggccgagccccattttctcagcatcttgcagcacctgctgctcgtgaggaatgactatgaagcacggcctcaatattacaaactgatcgaagaatgtatttcccagattgtgctccacaagaacggcgcagatccagatttcaaatgtcgacatctgcagatcgagatagaagggctgatcgatcagatgattgacaagactaaagtcgaaaaaagcgaagctaaagccgcggaactggagaaaaaactcgacagcgagctgaccgccagacatgagctacaagtagaaatgaagaaaatggagagcgacttcgagcagaaactgcaggatttacagggcgagaaggatgctctacacagcgagaagcaacaaattgctaccgagaagcaggacttggaggccgaagtgtcccagctaacaggggaggtagctaagttgaccaaggagctggaagacgctaagaaggagatggcctccctgtctgccgcagccattactgttcccccatccgtgccttcccgggctccagtgccacctgcacctccacttcctggagacagcggaacaatcatcccacctccccccgcgccaggtgacagtaccactccgccaccccccccccctcctccccccccacctccacccttgccaggtggtgtttgcataagtagtcctccaagcctgcctggcggtacagcgatcagccctccccccccactgtctggtgacgctacgatccctcccccaccccctttgcctgaaggggtcggaatcccctctcccagttcactccccgggggaacggcaatcccccctcctcccccccttccgggcagtgccagaatcccgccccctccaccacccctgcccggatctgctggaatccctcctcccccacctccgctgccaggggaagcaggcatgcctcccccacccccgcccctgcccggcggcccaggcataccccctccccctcccttccccggaggccccggtatacctccgcctcctccggggatgggcatgccacctccgcctccttttggcttcggagttccagcagctccagtgttaccttttggcctgacgcctaagaagttgtataaaccagaggttcagctgaggagaccaaattggtctaaactggtggcagaagacctctctcaggattgtttctggacaaaggtcaaggaagatcgattcgaaaataatgaactgtttgcgaaactcactctgaccttttctgcccagactaagacctccaaagcaaaaaaggatcaagaaggtggcgaggaaaaaaaatctgttcagaagaagaaggtcaaggagttaaaagtgctagacagtaagactgctcagaatcttagtattttcctgggcagcttcaggatgccttaccaggaaatcaagaacgtgatcttagaagtgaatgaggccgtgctgactgagagtatgattcagaacctcattaagcaaatgcccgaacctgagcaattgaagatgctgtccgagcttaaagatgaatacgatgatctggcagaatccgagcagtttggggtggtgatggggacagtcccaagacttcgccctcgattgaatgcgatcctgttcaagctgcagttcagcgagcaggtggagaatattaagccagaaattgtgagcgttactgccgcgtgcgaggaactccgtaagagtgagagcttctcaaacctgctcgagattaccctgctggtgggaaattatatgaacgctggctcccgaaacgcaggcgcttttggctttaatatctcctttctctgtaagctgcgggacactaagtccacagatcagaaaatgacacttctgcactttctcgctgaactgtgcgaaaacgattaccccgacgtgctgaagttccctgatgagctggctcatgtcgagaaagcatcacgggtgtcagcagagaatctgcaaaaaaacctggaccagatgaagaagcagatttccgacgtcgaaagagacgtccaaaactttccggctgctacggacgagaaggataagttcgtcgaaaagatgacgagctttgtgaaggatgcccaggaacagtacaataagctcagaatgatgcattccaacatggagaccctgtataaggaactgggagagtactttctgttcgatcctaagaaactgtctgtggaggagttcttcatggatctgcacaatttcagaaacatgttcctgcaagctgttaaggagaaccagaagcgaagagagactgaggaaaagatgaggcgcgcaaaactggccaaagaaaaagccgagaaagagcggctggagaagcaacaaaaaagagagcagttaattgatatgaatgctgagggagatgagaccggggttatggacagcctgctggaggccctccagtccggggctgctttccgtagaaagcgcgggccccggcaggcaaaccgtaaggccggatgtgcagtcacaagcctgctggcaagcgaactgaccaaggatgacgccatggctgccgtgccagcaaaggtctctaagaattccgagactttcccgaccattcttgaggaggcaaaagagctagtcggccgcgcatcctag

SEQ ID NO: 154041 - DNA, 3822 bp, Artificial Sequence
  derived and/or modified sequence
atggagcccccaggcggcagcctgggccctggccggggcacccgggacaagaagaagggccgcagcccagatgagctgcccagcgctggaggagatggcggcaagagcaagaagttcaccctgaagaggctgatggctgatgagctggagcgcttcacctccatgaggatcaagaaggagaaggagaagcccaacagcgcccacaggaacagcagcgccagctatggagatgaccccacagcccagagcctgcaggatgtgtctgatgagcaggtgctggtgctgtttgagcagatgctgctggacatgaacctgaatgaggagaagcagcagcccctgcgggagaaggacatcatcatcaagcgggagatggtgtcccagtacctgtacaccagcaaggccggcatgagccagaaggagagcagcaagagcgccatgatgtacatccaggagctgcggagcggcctgcgggacatgcccctgctgagctgcctggagagcctgcgggtgtccctgaacaacaaccctgtgtcctgggtgcagacctttggagctgagggcctggccagcctgctggacatcctgaagaggctgcatgatgagaaggaggagacagctggcagctatgacagcaggaacaagcatgagatcatccgctgcctgaaggccttcatgaacaacaagtttggcatcaagaccatgctggagacagaggagggcatcctgctgctggtgcgggccatggaccctgctgtgcccaacatgatgattgatgctgccaagctgctgagcgccctgtgcatcctgccccagcctgaggacatgaatgaaagagtgctggaggccatgacagaaagagctgagatggatgaggtggagcgcttccagcccctgctggatggcctgaagagcggcaccaccatcgccctgaaggtgggctgcctgcagctgatcaatgccctgatcaccccagctgaggagctggacttccgggtgcacatccgctctgagctgatgaggctgggcctgcaccaggtgctgcaggacctgcgggagattgaaaatgaagacatgagggtgcagctgaatgtgtttgatgagcagggcgaggaggacagctatgacctgaagggccgcctggatgacatccgcatggagatggatgacttcaatgaggtgttccagatcctgctgaacacagtgaaggacagcaaggccgagccccacttcctgagcatcctgcagcacctgctgctggtgagaaatgactatgaggcccggccccagtactacaagctgattgaggagtgcatcagccagatcgtgctgcacaagaatggagctgaccctgacttcaagtgccgccacctgcagattgaaattgagggcctgattgaccagatgattgacaagaccaaggtggagaagtctgaggccaaggctgctgagctggagaagaagctggacagcgagctgacagcccggcatgagctgcaggtggagatgaagaagatggagagtgactttgagcagaagctgcaggacctgcagggcgagaaggatgccctgcacagcgagaagcagcagatcgccacagagaagcaggacctggaggccgaggtgtcccagctgactggagaggtggccaagctgaccaaggagctggaggatgccaagaaggagatggccagcctgtctgctgctgccatcaccgtgcccccatctgtgcccagccgggcccctgtgcccccagccccacccctgcccggggacagcggcaccatcatccccccacctccagcccctggggacagcaccaccccacctcctcctcctcctcctcctcctcctcctccacccctgcccggcggcgtgtgcatcagcagcccccccagcctgcccggcggcacagccatcagccccccaccacccctgtctggagatgccaccatccccccacctccacccctgcctgagggcgtgggcatccccagccccagcagcctgcccggcggcacagccatccccccacctccacccctgcccggcagcgcccgcatccccccacctcctccacccctgcccggcagcgctggcatccccccacctcctccacccctgcccggggaggccggcatgcctcctcctcctccacccctgcccggcggccctggcatccccccacctccacccttccctgggggccctggcatccccccacctcctcctggcatgggcatgcctcctcctcctccatttggatttggagtgcctgctgcccctgtgctgcccttcggcctgacccccaagaagctgtacaagccagaggtgcagctgcggcggcccaactggagcaagctggtggccgaggacctgagccaggactgcttctggaccaaggtgaaggaggacagatttgaaaataatgagctgtttgccaagctgaccctgaccttcagcgcccagaccaagaggaccaagaaggccaagaaggaccaggagggcggggaggagaagaagtctgtgcagaagaagaaggtgaaggagctgaaggtgctggacagcaagacagcccagaacctgagcatcttcctgggcagcttcaggatgccctaccaggagatcaagaatgtcatcctggaggtgaatgaagctgtgctgacagagagcatgatccagaacctgatcaagcagatgcctgagcctgagcagctgaagatgctgtctgagctgaaggatgaatatgatgacctggccgagagcgagcagtttggagtggtgatgggcaccgtgccccggctgcggccccggctgaatgccatcctcttcaagctgcagttcagcgagcaggtggagaacatcaagccagagatcgtgtctgtgacagctgcctgtgaggagctgaggaagtctgagagcttcagcaacctgctggagatcaccctgctggtgggcaactacatgaatgccggcagcagaaatgctggggccttcggcttcaacatctccttcctgtgcaagctgcgggacaccaagagcacagaccagaagatgaccctgctgcacttcctggccgagctgtgtgaaaatgactacccagatgtgctgaagttcccagatgagctggcccacgtggagaaggccagccgggtgtctgctgagaacctgcagaagaacctggaccagatgaagaagcagatcagtgatgtggagagagatgtgcagaacttccctgctgccacagatgagaaggacaagtttgtggagaagatgaccatctttgtgaaggatgcccaggagcagtacaacaagctgaggatgatgcacagcaacatggagaccctgtacaaggagctgggggagtacttcctgtttgaccccaagaagctgtctgtggaggagttcttcatggacctgcacaacttcaggaacatgttcctgcaggccgtgaaggagaaccagaagaggcgggagacagaggagaagatgaggcgggccaagctggccaaggagaaggccgagaaggagcggctggagaagcagcagaagcgggagcagctgattgacatgaatgcagaaggagatgaaacaggagtgatggacagcctgctggaggccctgcagagcggggccgccttccggaggaagaggggcccccggcaggccaacaggaaggccggctgtgctgtgaccagcctgctggccagcgagctgaccaaggatgatgccatggctgctgtgcctgccaaggtgtccaagaacagcgagaccttccccaccatcctggaggaggccaaggagctggtgggccgggccagctag

SEQ ID NO: 154042 - DNA, 3810 bp, Artificial Sequence
  derived and/or modified sequence
atggagcccccaggcggcagcctgggccctggccggggcacccgggacaagaagaagggccgcagcccagatgagctgcccagcgctggaggagatggcggcaagagcaagaagttcaccctgaagaggctgatggctgatgagctggagcgcttcacctccatgaggatcaagaaggagaaggagaagcccaacagcgcccacaggaacagcagcgccagctatggagatgaccccacagcccagagcctgcaggatgtgtctgatgagcaggtgctggtgctgtttgagcagatgctgctggacatgaacctgaatgaggagaagcagcagcccctgcgggagaaggacatcatcatcaagcgggagatggtgtcccagtacctgtacaccagcaaggccggcatgagccagaaggagagcagcaagagcgccatgatgtacatccaggagctgcggagcggcctgcgggacatgcccctgctgagctgcctggagagcctgcgggtgtccctgaacaacaaccctgtgtcctgggtgcagacctttggagctgagggcctggccagcctgctggacatcctgaagaggctgcatgatgagaaggaggagacagctggcagctatgacagcaggaacaagcatgagatcatccgctgcctgaaggccttcatgaacaacaagtttggcatcaagaccatgctggagacagaggagggcatcctgctgctggtgcgggccatggaccctgctgtgcccaacatgatgattgatgctgccaagctgctgagcgccctgtgcatcctgccccagcctgaggacatgaatgaaagagtgctggaggccatgacagaaagagctgagatggatgaggtggagcgcttccagcccctgctggatggcctgaagagcggcaccaccatcgccctgaaggtgggctgcctgcagctgatcaatgccctgatcaccccagctgaggagctggacttccgggtgcacatccgctctgagctgatgaggctgggcctgcaccaggtgctgcaggacctgcgggagattgaaaatgaagacatgagggtgcagctgaatgtgtttgatgagcagggcgaggaggacagctatgacctgaagggccgcctggatgacatccgcatggagatggatgacttcaatgaggtgttccagatcctgctgaacacagtgaaggacagcaaggccgagccccacttcctgagcatcctgcagcacctgctgctggtgagaaatgactatgaggcccggccccagtactacaagctgattgaggagtgcatcagccagatcgtgctgcacaagaatggagctgaccctgacttcaagtgccgccacctgcagattgaaattgagggcctgattgaccagatgattgacaagaccaaggtggagaagtctgaggccaaggctgctgagctggagaagaagctggacagcgagctgacagcccggcatgagctgcaggtggagatgaagaagatggagagtgactttgagcagaagctgcaggacctgcagggcgagaaggatgccctgcacagcgagaagcagcagatcgccacagagaagcaggacctggaggccgaggtgtcccagctgactggagaggtggccaagctgaccaaggagctggaggatgccaagaaggagatggccagcctgtctgctgctgccatcaccgtgcccccatctgtgcccagccgggcccctgtgcccccagccccacccctgcccggggacagcggcaccatcatccccccacctccagcccctggggacagcaccaccccacctcctcctcctcctcctcctcctcctcctccacccctgcccggcggcgtgtgcatcagcagcccccccagcctgcccggcggcacagccatcagccccccaccacccctgtctggagatgccaccatccccccacctccacccctgcctgagggcgtgggcatccccagccccagcagcctgcccggcggcacagccatccccccacctccacccctgcccggcagcgcccgcatccccccacctcctccacccctgcccggcagcgctggcatccccccacctcctccacccctgcccggggaggccggcatgcctcctcctcctccacccctgcccggcggccctggcatccccccacctccacccttccctgggggccctggcatccccccacctcctcctggcatgggcatgcctcctcctcctccatttggatttggagtgcctgctgcccctgtgctgcccttcggcctgacccccaagaagctgtacaagccagaggtgcagctgcggcggcccaactggagcaagctggtggccgaggacctgagccaggactgcttctggaccaaggtgaaggaggacagatttgaaaataatgagctgtttgccaagctgaccctgaccttcagcgcccagaccaagaccaagaaggaccaggagggcggggaggagaagaagtctgtgcagaagaagaaggtgaaggagctgaaggtgctggacagcaagacagcccagaacctgagcatcttcctgggcagcttcaggatgccctaccaggagatcaagaatgtcatcctggaggtgaatgaagctgtgctgacagagagcatgatccagaacctgatcaagcagatgcctgagcctgagcagctgaagatgctgtctgagctgaaggatgaatatgatgacctggccgagagcgagcagtttggagtggtgatgggcaccgtgccccggctgcggccccggctgaatgccatcctcttcaagctgcagttcagcgagcaggtggagaacatcaagccagagatcgtgtctgtgacagctgcctgtgaggagctgaggaagtctgagagcttcagcaacctgctggagatcaccctgctggtgggcaactacatgaatgccggcagcagaaatgctggggccttcggcttcaacatctccttcctgtgcaagctgcgggacaccaagagcacagaccagaagatgaccctgctgcacttcctggccgagctgtgtgaaaatgactacccagatgtgctgaagttcccagatgagctggcccacgtggagaaggccagccgggtgtctgctgagaacctgcagaagaacctggaccagatgaagaagcagatcagtgatgtggagagagatgtgcagaacttccctgctgccacagatgagaaggacaagtttgtggagaagatgaccagctttgtgaaggatgcccaggagcagtacaacaagctgaggatgatgcacagcaacatggagaccctgtacaaggagctgggggagtacttcctgtttgaccccaagaagctgtctgtggaggagttcttcatggacctgcacaacttcaggaacatgttcctgcaggccgtgaaggagaaccagaagaggcgggagacagaggagaagatgaggcgggccaagctggccaaggagaaggccgagaaggagcggctggagaagcagcagaagcgggagcagctgattgacatgaatgcagaaggagatgaaacaggagtgatggacagcctgctggaggccctgcagagcggggccgccttccggaggaagaggggcccccggcaggccaacaggaaggccggctgtgctgtgaccagcctgctggccagcgagctgaccaaggatgatgccatggctgctgtgcctgccaaggtgtccaagaacagcgagaccttccccaccatcctggaggaggccaaggagctggtgggccgggccagctag

SEQ ID NO: 154043 - DNA, 3819 bp, Artificial Sequence
  derived and/or modified sequence
atggagcccccaggcggcagcctgggccctggccggggcacccgggacaagaagaagggccgcagcccagatgagctgcccagcgctggaggagatggcggcaagagcaagaagttcaccctgaagaggctgatggctgatgagctggagcgcttcacctccatgaggatcaagaaggagaaggagaagcccaacagcgcccacaggaacagcagcgccagctatggagatgaccccacagcccagagcctgcaggatgtgtctgatgagcaggtgctggtgctgtttgagcagatgctgctggacatgaacctgaatgaggagaagcagcagcccctgcgggagaaggacatcatcatcaagcgggagatggtgtcccagtacctgtacaccagcaaggccggcatgagccagaaggagagcagcaagagcgccatgatgtacatccaggagctgcggagcggcctgcgggacatgcccctgctgagctgcctggagagcctgcgggtgtccctgaacaacaaccctgtgtcctgggtgcagacctttggagctgagggcctggccagcctgctggacatcctgaagaggctgcatgatgagaaggaggagacagctggcagctatgacagcaggaacaagcatgagatcatccgctgcctgaaggccttcatgaacaacaagtttggcatcaagaccatgctggagacagaggagggcatcctgctgctggtgcgggccatggaccctgctgtgcccaacatgatgattgatgctgccaagctgctgagcgccctgtgcatcctgccccagcctgaggacatgaatgaaagagtgctggaggccatgacagaaagagctgagatggatgaggtggagcgcttccagcccctgctggatggcctgaagagcggcaccaccatcgccctgaaggtgggctgcctgcagctgatcaatgccctgatcaccccagctgaggagctggacttccgggtgcacatccgctctgagctgatgaggctgggcctgcaccaggtgctgcaggacctgcgggagattgaaaatgaagacatgagggtgcagctgaatgtgtttgatgagcagggcgaggaggacagctatgacctgaagggccgcctggatgacatccgcatggagatggatgacttcaatgaggtgttccagatcctgctgaacacagtgaaggacagcaaggccgagccccacttcctgagcatcctgcagcacctgctgctggtgagaaatgactatgaggcccggccccagtactacaagctgattgaggagtgcatcagccagatcgtgctgcacaagaatggagctgaccctgacttcaagtgccgccacctgcagattgaaattgagggcctgattgaccagatgattgacaagaccaaggtggagaagtctgaggccaaggctgctgagctggagaagaagctggacagcgagctgacagcccggcatgagctgcaggtggagatgaagaagatggagagtgactttgagcagaagctgcaggacctgcagggcgagaaggatgccctgcacagcgagaagcagcagatcgccacagagaagcaggacctggaggccgaggtgtcccagctgactggagaggtggccaagctgaccaaggagctggaggatgccaagaaggagatggccagcctgtctgctgctgccatcaccgtgcccccatctgtgcccagccgggcccctgtgcccccagccccacccctgcccggggacagcggcaccatcatccccccacctccagcccctggggacagcaccaccccacctcctcctcctcctcctcctcctcctcctccacccctgcccggcggcgtgtgcatcagcagcccccccagcctgcccggcggcacagccatcagccccccaccacccctgtctggagatgccaccatccccccacctccacccctgcctgagggcgtgggcatccccagccccagcagcctgcccggcggcacagccatccccccacctccacccctgcccggcagcgcccgcatccccccacctcctccacccctgcccggcagcgctggcatccccccacctcctccacccctgcccggggaggccggcatgcctcctcctcctccacccctgcccggcggccctggcatccccccacctccacccttccctgggggccctggcatccccccacctcctcctggcatgggcatgcctcctcctcctccatttggatttggagtgcctgctgcccctgtgctgcccttcggcctgacccccaagaagctgtacaagccagaggtgcagctgcggcggcccaactggagcaagctggtggccgaggacctgagccaggactgcttctggaccaaggtgaaggaggacagatttgaaaataatgagctgtttgccaagctgaccctgaccttcagcgcccagaccaagaccagcaaggccaagaaggaccaggagggcggggaggagaagaagtctgtgcagaagaagaaggtgaaggagctgaaggtgctggacagcaagacagcccagaacctgagcatcttcctgggcagcttcaggatgccctaccaggagatcaagaatgtcatcctggaggtgaatgaggccgtgctgacagagagcatgatccagaacctgatcaagcagatgcctgagcctgagcagctgaagatgctgtctgagctgaaggatgaatatgatgacctggccgagagcgagcagtttggagtggtgatgggcaccgtgccccggctgcggccccggctgaatgccatcctcttcaagctgcagttcagcgagcaggtggagaacatcaagccagaaattgtgtctgtgacagctgcctgtgaggagctgaggaagtctgagagcttcagcaacctgctggagatcaccctgctggtgggcaactacatgaatgccggcagcagaaatgctggggccttcggcttcaacatctccttcctgtgcaagctgcgggacaccaagagcacagaccagaagatgaccctgctgcacttcctggccgagctgtgtgaaaatgactacccagatgtgctgaagttcccagatgagctggcccacgtggagaaggccagccgggtgtctgctgagaacctgcagaagaacctggaccagatgaagaagcagatcagtgatgtggagagagatgtgcagaacttccctgctgccacagatgagaaggacaagtttgtggagaagatgaccagctttgtgaaggatgcccaggagcagtacaacaagctgaggatgatgcacagcaacatggagaccctgtacaaggagctgggggagtacttcctgtttgaccccaagaagctgtctgtggaggagttcttcatggacctgcacaacttcaggaacatgttcctgcaggccgtgaaggagaaccagaagagaagagaaacagaggagaagatgagaagagccaagctggccaaggagaaggccgagaaggagcggctggagaagcagcagaagcgggagcagctgattgacatgaatgcagaaggagatgagaccggggtgatggacagcctgctggaggccctgcagagcggggccgccttccggaggaagaggggcccccggcaggccaacaggaaggccggctgtgctgtgaccagcctgctggccagcgagctgaccaaggatgatgccatggctgctgtgcctgccaaggtgtccaagaacagcgagaccttccccaccatcctggaggaggccaaggagctggtgggccgggccagctag

SEQ ID NO: 154044 - DNA, 855 bp, Artificial Sequence
  derived and/or modified sequence
atggccagcctgtctgctgctgccatcaccgtgccccccagcgtgcccagccgggcccctgtgcccccagccccacccctgcccggggacagcggcaccatcatccccccacctccagcccctggggacagcaccaccccacctcctcctcctcctcctcctcctcctcctccacccctgcctggaggagtgtgcatcagcagcccccccagcctgcccggcggcacagccatcagccccccaccacccctgtctggagatgccaccatccccccacctccacccctgcctgagggcgtgggcatccccagccccagcagcctgcccggcggcacagccatccccccacctccacccctgcccggcagcgcccgcatccccccacctcctccacccctgcccggcagcgctggcatccccccacctcctccacccctgcctggagaggccggcatgcctcctcctcctccacccctgcccggcggccctggcatccccccacctccacccttccctgggggccctggcatccccccacctcctcctggcatgggcatgcctcctcctccacccttcggcttcggcgtgcctgctgcccctgtgctgcccttcggcctgacccccaagaagctgtacaagccagaggtgcagctgcggcggcccaactggagcaagctggtggccgaggacctgagccaggactgcttctggaccaaggtgaaggaggacagatttgagaacaatgagctgtttgccaagctgaccctgaccttcagcgcccagaccaagtctgagaaggccaagaaggaccaggagggcggggaggagaagaagtctgtgcagaagaagaagtag

SEQ ID NO: 154045 - DNA, 3822 bp, Artificial Sequence
  derived and/or modified sequence
atggagccccccggcggcagcctgggccccggccggggcacccgggacaagaaaaagggtagatccccggacgaactgccgtctgctggcggggatggcggaaaaagcaagaaatttactctaaagcgcctgatggctgacgagttggaacgttttacgagcatgcggattaagaaagaaaaagagaagccgaattctgctcatcgcaacagtagtgcgtcttatggagatgaccccacggctcagagcctccaggacgtaagtgatgaacaggtactggtgttgtttgaacaaatgctcctggacatgaacctaaacgaggagaagcaacagcccctccgggagaaggacattatcattaagagagaaatggttagccagtatctgtacacctcaaaggcaggcatgtctcagaaggagtcctcaaagtctgccatgatgtatatccaagaactaagatcaggattgagagatatgccactattgtcctgcttggagtcattaagggtctccttgaacaataatcccgtgtcttgggtgcagacttttggcgcggaaggcctggcatcactcctggacattcttaaacggctccacgatgagaaagaggaaaccgcaggttcgtacgactctcgaaacaaacatgaaatcatccgctgtttgaaggctttcatgaacaataaatttgggatcaagacaatgctggagacagaggaggggatcttactgctcgtccgcgccatggatccggcagtgccaaacatgatgatcgacgccgcaaaattgctgtctgctttatgcatcctgccacagcctgaggacatgaacgagagggtgctggaggccatgacagagcgcgcggaaatggacgaagtcgaaagattccagcctctgctcgacggactcaagagcggaaccacaatagctctcaaagtaggctgcctccagctgattaacgctctcattaccccagcagaagagctcgacttccgggtccatattcggtcggagctgatgcgcttaggcttgcatcaggttctacaggacttgagagagatcgagaacgaggacatgagggtccaactgaacgtctttgacgaacagggcgaggaggactcttacgatctgaaaggtaggttggatgacatcagaatggagatggatgactttaacgaggtcttccagatactgctgaacacagtgaaggattctaaagcggagccacactttctaagcattctgcaacacttgttgctcgtaaggaacgattacgaagccaggcctcagtactacaagctgattgaggagtgtatctctcaaattgttcttcacaagaacggcgctgacccagatttcaagtgccgacacctacaaattgaaattgaagggctaatcgatcagatgatcgataaaaccaaggtggagaaatcagaagctaaagctgccgagctcgaaaaaaaattggactccgagcttacggcgcgccacgagttgcaggtcgaaatgaaaaaaatggaatctgatttcgagcagaaactgcaggacctgcagggcgagaaggatgccttgcacagcgagaagcagcagatcgccacagaaaaacaggacttggaagctgaagtttctcaactgaccggagaggtggccaagctcacgaaggagctggaagatgccaagaaggagatggcctcactttctgctgccgccatcaccgtccccccatccgtaccgtcgcgcgctccagtgccacctgctccacctctacctggggattcgggcaccatcatcccccctcctcctgcacctggcgattccacgacgcctccccctccccctcctccccccccccctcctccacccctgcccggaggcgtgtgtatcagttccccacctagccttcctggaggtactgcgatctcccccccgccacccctgtccggggacgccaccatcccacccccaccccctctccctgagggtgtcggaatcccttccccgagttccctccccggaggcaccgccatcccaccccccccacccctgcctggctccgcacgcataccaccgcccccaccaccgctgcctggatctgccggaatacctccacctcccccccccctgcccggggaagctggaatgcccccacccccaccacccctgcccgggggccccgggatcccccccccccctccctttcccgggggacccggaataccacccccacctccaggtatgggtatgccgccaccacctccctttggcttcggtgtgcccgccgctcccgtactgccttttggccttactcccaagaagctgtataagccggaagttcagctgcgcaggcccaactggtctaaactagtcgcagaagatctaagccaggactgcttctggaccaaggtcaaagaggatcgcttcgagaataacgaactgttcgcaaagttgactctgaccttttcagcccaaactaaaaggaccaaaaaagcaaagaaggatcaggagggcggcgaggaaaaaaaatcggttcagaagaagaaggttaaggaactcaaggtgctggacagcaaaactgcacagaatctttctatattcctcggcagctttcgcatgccatatcaggagattaagaatgttattctggaggtaaatgaggccgtactgacagagagcatgatacagaatcttattaaacaaatgcccgagcctgaacagttaaagatgctgtctgagttgaaagatgagtacgacgaccttgcggagagcgaacagtttggcgtggtgatgggcacagtcccccgtctgcgccctaggctaaatgccattctcttcaagcttcagttcagcgagcaagtggaaaacatcaagcccgagatcgtttctgtgacagccgcttgcgaagaactgcgaaaatcggagagcttcagtaacctgctggaaatcactctgctcgtgggaaattatatgaatgctggcagcagaaacgcaggggcattcgggttcaatataagcttcttgtgcaagttaagggataccaaatcaacggaccagaaaatgaccctcttgcactttctggcggagttgtgcgagaatgactaccctgacgtacttaaatttcccgacgagttggcacacgtggaaaaggctagtcgtgtctctgctgagaatctgcagaaaaatctagaccagatgaagaaacagatctctgatgttgagagagatgtgcaaaactttccggcagccacagatgagaaagacaaatttgtggaaaaaatgacgatattcgtgaaagacgctcaggagcagtacaacaagctccggatgatgcatagcaacatggagaccttgtataaggaactgggagagtattttctgttcgatcctaagaagctgtctgtggaagagttctttatggatttgcacaattttcggaacatgttcctgcaagcagtaaaagagaatcagaagagacgcgagactgaagagaagatgaggagggccaagctcgcgaaagaaaaagccgagaaagagcgcctcgagaaacaacaaaaacgggagcagcttatagatatgaacgccgagggagatgaaactggcgtgatggactccctgctggaggccctgcaaagcggtgcagccttcagacggaaacgcgggccgcgacaagccaacagaaaggccggctgcgccgtcacctctctacttgctagcgaactcacaaaggatgatgctatggctgcagtacccgctaaggtctctaaaaattcggaaacattcccgacaattttggaggaagccaaagagctggtcgggagagcctcctag

SEQ ID NO: 154046 - DNA, 3810 bp, Artificial Sequence
  derived and/or modified sequence
atggagccccccggcggcagcctgggccccggccggggcacccgggacaagaaaaaggggagatcccccgatgagctgccctctgccgggggggacggaggaaagtctaagaaattcacccttaaacgactcatggccgatgagctcgaacgatttacctccatgcggattaagaaggagaaagagaagcctaatagcgcccatcggaacagtagcgcttcatatggcgatgatcccacagcccagtctttacaggacgtgagcgatgagcaagttttggtcctgtttgagcagatgctgctggacatgaacttaaatgaggaaaagcaacaacctctgcgagagaaggatataatcattaagagagagatggtgtctcagtacctttacacatccaaggcaggtatgtctcaaaaagagagcagcaagtccgccatgatgtacatccaggagctccgtagcgggcttcgagatatgcctttgctgagctgcctggaatcactacgtgtctcactgaacaataatccggtgagctgggtgcaaacgtttggcgcagaaggtctggctagcttactggatatcttaaaaagacttcacgacgaaaaggaggagacagcgggcagctatgactctaggaataaacacgagataatccggtgcctgaaggcattcatgaacaataagtttggcattaagactatgctggaaacggaagaggggattctccttctggtgcgggccatggatcctgctgttcccaatatgatgatcgatgccgctaagctgttgtctgctctgtgtattcttcctcagcccgaggatatgaacgagagggtgctggaggcaatgaccgagcgagcagaaatggatgaagtcgagcgcttccagcccttgctggacgggctgaagtctggcaccactatcgccctcaaggttggatgtctgcaactaatcaatgctctgattacccccgccgaagagctcgattttagggttcatataagatccgaactgatgcgtctgggcctgcatcaggtgcttcaggacctgagggaaattgaaaatgaggacatgcgagtgcaacttaacgtatttgacgaacaaggtgaggaggactcctacgacctgaagggacggttggacgacattaggatggagatggatgattttaacgaggtgtttcagatcctccttaataccgttaaagattctaaagccgagccccattttctgtctatcctacaacacctcctgttagttagaaacgactatgaggcccggcctcagtattacaaactgatagaagaatgtatctcccagattgttctacacaagaatggtgcggatccagactttaagtgtcgccacctgcagatagagattgaaggactcattgaccagatgatcgataagacaaaggtggaaaaatcagaagccaaggcagccgaactcgagaagaaactggattctgagctcactgcaaggcacgagctccaggtggagatgaagaaaatggagtcagactttgagcaaaaactgcaagatctgcagggcgaaaaggacgccctacactctgagaagcagcagatcgcaactgagaaacaggatctggaggcagaggtctcgcagttaactggagaagtagctaagcttacaaaagagctggaagatgccaagaaagagatggccagcctatctgctgccgcaattaccgtgcccccctccgtgcccagcagggcccccgtgcccccagccccacctctcccaggcgactctggaactataattcccccgccgcctgccccgggcgactcaacgacgccacccccccctcccccacctccgcctcctccaccccctctgcccggtggtgtgtgtatttcttctccgccttcgctaccgggcgggaccgccatcagtccccccccaccgctgagcggagatgccaccataccacctccacctccgctaccagaaggcgtaggaatcccctccccatcgtcccttccagggggcactgccatacctccccctcctcctcttccaggaagcgcccggataccaccacctccacctcctctcccaggctctgccggcatcccaccgcccccacccccccttccaggagaagccggtatgcccccccctccgccacctcttccgggcggaccaggcataccaccacccccgccttttccaggcggccctggaattccccccccccccccgggcatgggtatgccaccccccccaccattcggctttggtgtgcccgctgctccagtgctgccgttcggactgactcctaaaaagttatacaagcccgaggtacaattaagaagaccgaattggtcaaaacttgtagctgaagacctgagccaggattgcttttggacaaaggtgaaggaagataggttcgaaaacaatgaactgtttgcgaaactgaccttgaccttttcagcccagacaaagaccaagaaagaccaagagggaggtgaggaaaaaaaatccgtgcaaaaaaaaaaagtgaaggaactgaaggtgctggacagcaagaccgcacagaatctgagtattttcctgggttcctttcggatgccatatcaggagataaaaaatgtcatcttggaggttaatgaggctgtgctgaccgaatccatgatccagaacctcattaagcagatgcccgaaccggagcagctgaaaatgctttctgagctgaaggacgaatacgatgatctggctgagagtgagcaattcggtgtcgtcatgggaaccgtgccaaggttgcggccacgcctcaacgccatactgttcaagctacaattcagtgagcaagtggaaaacatcaaaccagaaatagtgtctgtcacggccgcttgtgaagaacttagaaaatccgaatcgttcagcaatctcctcgaaattactctgttggtgggaaactatatgaatgctggatcccgcaacgcaggagccttcggattcaatatcagctttctgtgtaaattgagggatacgaagtccacggatcaaaagatgactctcctgcatttcctggccgaactctgtgagaacgactatcctgacgtacttaaattccccgacgaactggcccacgtggagaaggctagcagagtaagcgctgaaaacctccagaaaaacctggatcaaatgaaaaagcaaatttccgacgtcgaaagagacgtgcagaactttcctgccgctaccgatgagaaggataagtttgtggagaagatgacgtctttcgtaaaggatgcccaggaacagtacaacaaactgcgcatgatgcattccaacatggagactctttataaggaattaggagagtattttctttttgaccccaagaaactcagtgtggaagagttcttcatggatttacacaatttccgaaatatgtttctgcaggctgtgaaggagaaccaaaagcgccgagagactgaagaaaagatgcgacgggcaaagctcgctaaggagaaagccgaaaaggagcgtcttgaaaagcagcaaaaacgcgaacagctgattgacatgaatgcggagggcgacgagacgggggttatggacagtctgctcgaggctctgcagtcaggcgctgcctttagacgcaaacggggcccacgtcaggctaatcggaaggcagggtgtgctgttacatcactcctggcaagcgagctgaccaaggatgacgcaatggccgctgtgcctgccaaggtgtctaaaaactccgagacatttcctaccattctggaggaggccaaggagttagtgggtagagccagttag

SEQ ID NO: 154047 - DNA, 3819 bp, Artificial Sequence
  derived and/or modified sequence
atggagccccccggcggcagcctgggccccggccggggcacccgggacaaaaagaagggacgatccccggatgagctgcccagcgcaggcggcgacggaggtaagtctaagaaattcacattgaagcgcctgatggccgatgaactggaacggttcacatccatgcgtatcaagaaggaaaaggagaagcctaactccgcacaccgcaattcatccgcgtcatacggggacgaccctaccgctcaatcactgcaggacgtgtccgatgagcaggtccttgtgctttttgagcagatgctgctcgatatgaatctaaacgaggaaaagcagcaaccattacgagaaaaggatatcattattaagagggaaatggtgagtcagtatctgtatacctctaaagcgggcatgagccagaaggaatcatctaaaagtgccatgatgtatatccaggagctaaggtcagggttgcgagacatgccacttctctcgtgcctggagagcctgcgcgtaagccttaataacaacccggtcagctgggtccagacattcggcgctgagggtctggcctctctcctggacattctcaagcgcttacatgatgaaaaagaggaaacagctggatcatacgactccagaaataagcacgaaattattcggtgcttgaaggccttcatgaacaacaagttcggtattaagaccatgctggagaccgaggagggcatcctgctgctggttcgagctatggatcctgctgttccgaacatgatgatagacgccgcaaaattgctctctgctctgtgtatcttacctcagccagaagatatgaacgaacgagtgttagaagccatgaccgaaagagccgaaatggatgaagtcgaaagattccagccactgctggatggattgaaatcagggaccaccatagccctcaaggtgggctgtctgcagttaatcaatgccctcatcacaccagccgaagagctggattttagggtccatatcaggagcgagctcatgcggctgggactccaccaggtcttgcaagatctgcgcgaaatagaaaatgaggatatgcgtgtacagctgaacgtgtttgacgagcagggcgaggaggattcatacgacctcaagggcaggttggatgacatacgaatggagatggatgactttaatgaagtcttccagatcctcttaaatacagttaaggactccaaggcggagccccactttttaagcatccttcagcacctgttgctggtcagaaacgactacgaagctcggccccagtactacaaactgattgaagagtgcataagccagattgttctccacaagaatggtgcggacccggacttcaagtgtcggcatctccagattgagatcgaagggctgattgaccagatgattgataaaaccaaagtcgagaagtctgaggccaaggctgcggaacttgagaagaaactcgacagtgagcttaccgccaggcacgaacttcaagtggagatgaagaaaatggagtcagacttcgagcaaaagctgcaggatttacagggagaaaaggatgctttacactctgagaaacaacaaattgcaaccgaaaaacaagacctcgaggcagaagtgtctcagttgaccggagaggtggcgaagctcactaaggaactggaagacgccaaaaaagagatggcttccctttcagccgccgctattaccgtgcccccttcagtgcccagccgtgctccggtcccgccagccccgcccttacccggcgactcagggaccatcatcccccctcctcctgctccaggagactctacaactcccccgccgcctcctccccccccaccaccacctcctccactcccaggcggggtctgcatctcctcacctccctccctgcccggggggactgccatatctcccccaccccctctgagcggcgatgccacaattcccccgcccccaccactgcccgagggcgtggggatccccagcccctcgtccctgccaggcgggacggcaatccctccgcccccgccactaccaggttctgcgaggatccccccccctccaccaccactgcctggatctgcagggatacccccccctccaccgcctcttcccggggaagctgggatgccacccccccctccacccctcccaggtggccccgggatccctccccccccccctttccctggcggtccaggaattccacctccgccgccaggtatgggcatgccccctccacccccgtttggatttggagtgcctgctgctcctgtactgccgttcgggttaacaccgaaaaaactgtacaagccagaggttcaactgcgtcgacctaattggagcaaactcgttgctgaagacctctcacaagactgcttttggacaaaggtgaaagaggatcgattcgaaaataatgaactatttgctaaattaaccttgacgtttagcgcccaaaccaagacatcaaaagcaaagaaagatcaagaaggcggggaggaaaaaaaatcagttcaaaagaagaaggtgaaagaactcaaggtgctagacagcaagactgcacaaaatctctcgatattcttgggatcctttcggatgccctaccaggaaatcaagaacgtgatactcgaggtcaatgaggcagtgctcacggagtcaatgattcaaaatctaatcaaacagatgcctgagccagagcaactgaagatgctgagcgagctgaaggacgagtatgacgatctcgccgagtctgagcagttcggggtggtcatggggactgtgccaaggctgaggccacgtctcaatgcaatcctgtttaaactgcagtttagcgaacaggtagagaatatcaagcctgagattgtaagcgtgaccgcggcctgtgaggaactacgcaaatccgaatcattcagtaaccttctggagataactcttcttgtgggaaattatatgaatgccgggtcgcgtaacgccggcgcctttgggtttaacatctccttcttgtgcaagttacgcgacaccaaatctactgaccaaaaaatgactctgctccactttctagcggagctttgcgaaaatgactatcccgacgtgctgaaattcccagacgaactggcgcacgtcgaaaaggcttccagagtctctgcagaaaatctgcaaaaaaatctggaccaaatgaaaaaacagatctccgacgtcgagcgggacgtacagaatttccctgcggctacagacgagaaagacaagttcgtcgagaaaatgacgtcattcgtgaaggatgcccaggaacagtacaataagctgcgcatgatgcatagcaacatggagaccttgtacaaagagctgggcgagtactttttgtttgatccaaagaaactctccgtggaggagttctttatggacctgcacaattttaggaacatgttcctccaggcagtcaaggagaaccagaagcgaagagagacagaggagaagatgaggcgcgctaagttggctaaggagaaggccgaaaaggagagacttgagaaacagcagaagcgagagcaactgatcgacatgaatgcagaaggagacgaaaccggtgttatggattccctgctggaagccctgcagtcgggggccgcctttcgccgaaaacggggacccaggcaagccaaccgtaaagcaggttgcgcagtcacatcacttttggcctcagagttgacaaaggatgacgcaatggccgccgtgccggccaaggtgtccaaaaattctgagacatttccaaccatactggaggaagctaaggagctagtggggagggccagttag

SEQ ID NO: 154048 - DNA, 855 bp, Artificial Sequence
  derived and/or modified sequence
atggccagcctgagcgccgccgccatcaccgtgccccccagcgtgccatcgagggcgccagttcccccagctccaccattgcccggtgactccggtaccataatacctcctcctccagccccaggggacagcaccaccccaccccccccaccccctccgcctccccctccacccccacttcccggaggtgtttgcatttctagccctccttcgctgccaggggggacggccatctctccccccccaccactatccggagacgcaactatcccacctccaccaccattgccggagggagtcggaattccctctccctcaagcctgcccgggggaaccgccatacctcctcccccgccactcccaggttcggctaggatcccccccccgcccccacccctccctggaagtgccgggatccccccccctcctcctcctctgccaggggaagcaggaatgcctccacccccccctcccctgcccgggggccccggcattccacccccccccccttttccaggcggacccggcatcccccccccccctcccggtatgggcatgccacccccaccacctttcgggtttggggtccccgccgccccagtgctgcccttcggactgacaccgaagaaattatacaagccagaggtgcagcttaggcggcctaattggtccaaactggtggcagaagacttatcgcaggactgtttttggacaaaagtgaaagaggaccgctttgagaacaatgaactctttgctaagcttacactgacgttttcggcccagacgaagagtgaaaaggctaagaaagatcaggaaggcggggaggagaagaagagtgtccaaaaaaaaaagtag

SEQ ID NO: 154049 - DNA, 3822 bp, Artificial Sequence
  derived and/or modified sequence
atggagccacctgggggatcattaggaccagggaggggcactcgagataagaagaaaggcagatctccagatgagctcccatcagcagggggagacggaggcaaaagtaaaaaattcaccttgaagcgactgatggccgacgagctggaaaggttcacctcaatgcggataaagaaagaaaaggagaagcccaactccgctcaccgcaacagttctgcgagctatggggacgatccgactgcccaatcattgcaggatgtttccgatgagcaggtcctggtgctgttcgaacagatgctcctagacatgaacctaaacgaagaaaagcaacagccgctgcgggagaaggatattataatcaaaagagagatggtgtcccaatacttatacacgtcaaaggccggaatgtcacagaaagagagcagcaagagcgcgatgatgtatatccaggaactgcgcagcggactgcgcgacatgcccctgttatcttgcttggagtctttgcgagtgagtctgaataataaccccgtcagctgggttcagacctttggggcagaagggctagcatctctcctagacatcttaaagcgcctgcatgacgagaaagaggaaaccgcaggctcttatgattctcgaaacaagcacgaaatcatccggtgcctgaaagccttcatgaataacaagttcgggattaagactatgctggaaacagaggagggcattctgctgttagtaagggccatggatcctgccgtaccaaacatgatgattgacgccgcaaaactgctttccgccctatgtattctaccgcaacccgaggacatgaatgagcgcgttctggaagctatgacggaacgcgctgaaatggacgaagtggagcgattccagcccctgctggatgggcttaaatcaggaaccaccatagcactgaaggtgggctgcttgcagttgattaacgccctgataacgcccgctgaggagctggatttcagggtccatatccgctctgagttgatgcgcttggggctgcaccaggtcctgcaggacctgagggagattgaaaacgaagacatgagagtacaattgaatgtgttcgatgaacaaggggaggaagacagctacgacctgaagggtagacttgatgacatccgcatggagatggacgacttcaacgaggtgtttcaaatcctgctcaacaccgtcaaggattctaaggctgagccacacttcctatcgattctgcagcacctcctgcttgtacgaaacgattatgaggccaggccacagtactataagctgattgaggaatgtatttctcagattgttttgcacaagaacggggctgatccggattttaaatgccggcacctccaaatcgagatcgaaggactgatcgaccagatgatcgataagaccaaagtcgagaagagcgaggctaaggccgcagaattagaaaaaaaactcgatagtgaactgacagcaaggcatgagttgcaggtagagatgaaaaaaatggagagcgactttgagcagaaactgcaggatctgcagggagagaaagacgctctccattctgaaaaacagcagatcgctacggagaagcaggacctggaagctgaagtgtctcaactgaccggagaggtggccaagcttacaaaggagctggaggacgcaaagaaggagatggccagtcttagtgccgctgctattaccgtccccccttcagtcccatctagagcccctgtccccccagccccaccccttcctggggacagcggcacgatcataccccctcccccagcgcctggcgactctactactcccccacctccgccaccacccccaccacctcctccccctctgccagggggagtgtgcatctcatctccgccatcattaccagggggtacagccatctctccaccccctccactctccggggacgccactatccctcccccaccgcctctccccgaaggtgtcggaatcccatcgccgtctagtcttcccggaggaaccgctattccccctccccctccactccctgggtccgccaggatccctcccccacctcctcccctgcctggttctgccggaattcccccaccaccgccacctcttcctggggaggctggaatgcctccaccccctccacctttaccaggtggccctggaattcctccacctcctccattcccaggtgggcctggcatcccccctcctcccccagggatgggaatgcctcctccacctccatttggtttcggggtgcctgccgcaccagtgctcccatttgggctcacaccgaagaagctgtacaagcccgaagtccagcttaggcgcccaaattggagtaaattggtcgcagaggatttgagccaggactgcttttggacaaaagtgaaagaggacaggttcgaaaataatgaacttttcgcgaagttgacactgactttcagcgctcagaccaaacgcacaaaaaaggccaagaaagatcaggaaggaggtgaggaaaagaaaagcgtacagaagaaaaaggtgaaagaactcaaggtcttggattctaagaccgcacaaaatttaagcatcttcctgggttcctttcgaatgccttatcaggaaatcaaaaacgtcattttagaggttaacgaagcagtcctgacagagtccatgatccagaatctcattaagcagatgccggaaccagagcagctcaagatgctgtctgagctcaaggacgagtacgatgatctggctgagtctgaacagtttggcgtggtgatggggacggtcccaaggctcaggccccgactgaacgcaattctgttcaaactgcaattcagcgagcaggtcgaaaatattaaacctgaaatcgtcagtgtgacggccgcatgcgaggagctgcgcaaatctgagtcttttagcaaccttctggagataacgctcctggtcggcaattacatgaacgctgggtctaggaacgctggcgcatttggattcaacatatctttcctgtgcaagcttcgcgatacaaaatctacagatcagaagatgaccctcttacactttttggccgagctgtgtgagaacgactatcctgacgtgctcaaattccccgacgagcttgcacatgtcgaaaaagcctcgcgtgtgagcgcagagaatctgcagaaaaacctcgaccagatgaagaagcagatttcagacgtggagagagatgttcagaatttccctgccgcaaccgacgagaaagacaaattcgttgagaagatgaccatttttgtaaaagatgcccaggaacagtataataagctgaggatgatgcactccaatatggagaccttgtataaggagctgggcgaatatttcctgtttgatcctaaaaaactttccgtggaggagttcttcatggatctgcataacttcaggaatatgtttcttcaggcagtaaaggaaaatcaaaaaagacgcgaaacagaggagaagatgagacgagctaagctggccaaggagaaggccgaaaaggaacgactggaaaaacagcagaagcgtgaacagctgatcgacatgaacgcggagggagacgagactggcgtgatggatagtctgttggaagctctccagtccggtgctgccttccgaagaaaaagaggcccaaggcaggcaaaccggaaagccggatgcgccgttacgtctttactggcgtccgagctcactaaggacgatgctatggccgctgtgccagctaaggtgtccaagaacagcgagaccttcccaactatcttggaagaggccaaggaactggtgggcagagccagttag

SEQ ID NO: 154050 - DNA, 3810 bp, Artificial Sequence
  derived and/or modified sequence
atggagccccctgggggaagcttaggtcccggtcgcggaacacgcgataagaagaagggaagaagcccagacgagctcccttccgctggcggtgacggaggcaaatcaaaaaaatttaccctgaagcgacttatggctgacgagcttgagaggtttaccagtatgagaattaagaaagaaaaggagaagcccaatagcgcacacaggaacagtagcgctagctatggagatgatcccacagctcaaagcctgcaggacgtctcggatgagcaggtgctagttctgtttgaacaaatgctgctagatatgaatctgaacgaggagaaacagcagcctctgagggagaaagacataattatcaaaagggagatggtgtctcaatacctatatacttctaaggccggtatgtcccagaaagagtcaagcaaaagtgccatgatgtatatccaggagctgcgcagtggattgcgggacatgccccttctctcatgtttggagagccttcgagtgtcactgaacaataaccccgtttcatgggtacaaacctttggtgccgaaggattggcaagcttgcttgatatcctgaaacggttacacgacgaaaaagaggagaccgctgggtcatacgattctcggaataagcacgagataatccgatgcctcaaagcgttcatgaataacaagttcggcatcaaaacaatgctggaaaccgaagaaggtatcctgctgctcgtgagggcaatggacccagccgtgccaaacatgatgattgacgcagcgaagttgctaagcgccttgtgcatcttgccccagccagaggatatgaatgagcgagttctcgaggccatgacggagagggctgagatggacgaggtagagagattccaacccctgctagatggtttaaagtccggcacaacaatcgccctgaaggttggatgcctgcagcttatcaacgccctgataacacctgccgaggaactggattttcgcgtccacatcaggtctgagctaatgagactcggtctgcaccaggtgttgcaagatttgcgagaaatcgagaacgaggatatgcgcgttcagctcaatgtgtttgatgagcagggtgaagaagattcttatgatctcaagggacgactggatgacatccgcatggaaatggacgactttaatgaagtcttccaaatcctgctgaacacagtgaaggacagcaaggctgagcctcacttcctaagtatattgcagcatctgctgctggtgcgcaatgactatgaggcacgcccacagtactataaattgatcgaagagtgtatcagtcaaattgttctccacaagaatggggcagatccagatttcaaatgtcgccacctccagatagagatagagggcttgatcgaccagatgatcgacaagaccaaggtggagaaatctgaggctaaagctgccgagctagaaaaaaagttggatagtgaactgacagcccgacacgagttgcaggtggagatgaaaaagatggagagcgactttgagcaaaagctgcaggatctgcagggagaaaaggacgccttacacagcgaaaaacagcagatcgcaaccgagaaacaagatttggaggcagaggtcagtcaactgaccggtgaagtggctaagctcaccaaagagctggaagacgcaaagaaggagatggccagcctcagcgccgctgccatcactgtcccaccctccgtgccctctagggcgccagttccccctgccccacctcttccaggcgattcaggcacaatcatcccaccgcctccagctccaggagactccacgacccccccaccaccaccacctccacctcctcccccacctcctcttcccggaggcgtgtgcatcagttcacccccaagcctgcccggaggaactgcgatctccccacctcctcccctttccggcgatgcaaccattcctccccctccacctctccctgaaggcgtgggcatcccttccccttcatcactcccaggcggtactgcaataccccctccgccaccactgcccggttctgccaggattccccctccacccccaccgcttcccggatcagccggtatcccccctcctcccccacctctgcccggagaggctggcatgcctcctcctccccctccattgccaggtggaccaggcattcctccacccccaccctttcccggaggaccaggcataccccctccgccaccaggaatgggaatgccaccaccaccgccttttggatttggcgtaccagcagccccagtcctgccctttgggctgaccccaaagaagttatacaagccagaagtccagctccgtcggccaaactggtccaagttagttgccgaggacctgtcccaggactgtttttggacaaaggtcaaggaggatcggttcgagaataacgagctgttcgccaagctcaccctgacgttctcggcacagaccaagacaaagaaagaccaggagggtggggaagagaagaagtctgtacagaagaaaaaggtgaaggaattaaaagttttggactcaaaaactgcgcaaaatctctcaatctttcttgggagttttcgtatgccttaccaagaaattaaaaatgtgatcctggaggtgaatgaagccgtgttaaccgagagcatgattcaaaatctgataaagcagatgcccgagccagaacaacttaaaatgctgtcggagctaaaggacgagtatgacgacttggctgaatcagagcagttcggcgtggtgatgggaacagtaccccgtctcaggccaagattgaacgcaatcctcttcaagctgcagttctcggaacaggtcgaaaacattaagcctgagattgtctcagttacagcggcatgtgaggaactgcggaaatcggagagtttttccaacctactggagattacgcttctggttggtaactacatgaacgctggaagtcgtaacgcaggtgctttcggctttaacatcagcttcctctgcaagctacgggatacgaagagtacagatcagaagatgaccctgctgcattttctggctgaattgtgtgagaatgattaccctgatgtgttaaagtttcccgatgagcttgcccatgtggaaaaagctagtagggtcagcgccgaaaaccttcagaagaatctggatcagatgaaaaaacaaatcagcgacgtcgagagagatgtgcagaattttcccgcagccaccgatgagaaagataagttcgtggagaagatgacttcgtttgtcaaggatgcacaggaacagtacaataaacttcggatgatgcactcgaacatggaaacactgtataaagaacttggcgagtactttcttttcgatccaaagaagctctcagtggaggagttctttatggatctacacaacttcaggaacatgttcctccaagcggtaaaagagaatcagaagcgtcgtgagactgaggagaagatgcgacgcgcaaaactggcgaaagagaaagccgaaaaagaaagactggaaaaacagcagaagcgagagcagcttatagatatgaatgccgaaggagacgaaactggcgttatggatagtctcctggaagccttacagtcgggagcagctttcagacggaaaaggggcccaagacaggccaacagaaaggcaggctgcgctgtcacctcactattggcctctgaactgactaaagacgacgcaatggcagctgtgcctgctaaggtgtccaagaatagtgagacattccctacaatattggaggaggctaaagaacttgtcggacgcgcttcctag

SEQ ID NO: 154051 - DNA, 3819 bp, Artificial Sequence
  derived and/or modified sequence
atggaaccgccaggcggtagccttggacccggtagggggactagagacaagaagaaggggaggagtcctgacgaactcccaagcgctggcggagatggcggaaagagcaaaaagtttacccttaaacggctaatggccgacgaactcgagcgcttcactagcatgcggattaagaaggagaaagagaaacctaactccgctcaccgtaattcctcagcttcctacggtgatgatcccacagcccaatctcttcaagacgtgtcagacgaacaggttttggtgttgttcgaacaaatgctgcttgatatgaatctgaacgaggaaaagcagcagcccctccgcgagaaagacatcataattaaacgtgaaatggtcagccagtacttatatacatcgaaggctggaatgtctcaaaaggagagctcaaaatctgccatgatgtacatccaggagttacggagcggtctaagagacatgcctctcctttcctgtctggaatccctgcgtgtgagcctaaataataacccggtctcgtgggttcagacattcggcgcagaggggctggcctcactgttggatatcttgaagcgactgcatgacgagaaggaggagacagccggttcctatgatagcaggaacaaacacgaaattattaggtgccttaaggcgttcatgaacaacaagtttggaatcaagacaatgctggaaacagaggagggtatcctcctcctcgtcagagccatggatcctgctgtgccaaacatgatgatagacgccgctaagctactctcagcgctctgtatcctcccacagccagaggacatgaacgaacgcgtcctcgaggctatgaccgaacgtgccgagatggatgaggtggagaggttccagcctctactggatgggctgaaaagcggtaccaccatcgctctgaaagtggggtgcctacagctaatcaatgccctcataacgcccgcagaagagctggactttcgcgtccacatcagaagtgagcttatgcgtctcgggctgcatcaagtccttcaggacctgagagagatcgagaacgaggatatgagagtccagttgaacgtctttgatgagcagggcgaggaagacagctacgacttgaagggcagactagatgatatccggatggagatggacgattttaacgaggtctttcagatactgttgaataccgtgaaggactcgaaagccgaaccacactttctgagtatcctgcagcatttgttgctggtccgaaatgactatgaagccaggcctcagtactacaagcttatagaagagtgcatatctcaaatcgtgttgcacaagaacggagcagacccagattttaaatgtcgccacctccaaattgaaatcgaaggcctcatcgatcagatgatcgataaaacaaaggtggagaaatccgaagccaaagccgctgaactggagaagaagctcgattccgagctgaccgccaggcacgagttgcaggtggagatgaagaaaatggagagcgatttcgaacagaagctacaggacctgcagggtgagaaagatgcactgcactcagaaaagcagcagatcgctactgagaagcaagacttagaagccgaagttagccagctgacgggggaagtcgccaagttgacaaaggagctcgaggacgcaaagaaggagatggccagcctatcagctgcagctattaccgtgcccccttctgttccctcacgagctcctgtgccaccggcaccacctctccccggtgatagcgggaccataatacccccaccccctgccccaggcgattcaactacaccacccccacctcccccacccccacccccaccccctcctctgcccggaggcgtatgtatttcttctcccccatctttgcctggagggactgcaatttcccctccaccacctttgtctggagatgccactattccaccccctcctcccctcccagagggagttgggattccctcacctagctccttgccagggggtacagctattcctccgcctccaccactccctgggtcagctcggattcccccaccaccccctccactgccagggtcggccggtatccctccccctcctccccctctgcccggagaagcaggaatgcccccacctccccctccactgccaggtgggcctgggatcccgccaccacctcctttccccggtggacctggaattccacccccacctccaggcatgggcatgcctccccctccacctttcggatttggcgtgccagcagctccagtgcttccttttggacttactcccaagaaactgtataagcccgaagtgcaattgcgtcgcccaaactggagcaaactggtggccgaggacctgtcccaggactgcttttggaccaaagtgaaagaagatcggttcgaaaacaacgagctcttcgcgaagctaaccctgacattctcagcccagaccaagacttctaaagcaaagaaagatcaggagggaggcgaagagaagaaaagcgttcagaaaaagaaggttaaggagcttaaggtgcttgactcaaaaacagcgcagaacctgtccattttccttggcagttttcgtatgccatatcaagaaattaagaacgtgatacttgaggtaaatgaggctgtgctgactgagtcaatgatccaaaatctgatcaaacagatgccagagcctgagcagctcaaaatgctatctgagctgaaggacgaatatgacgacctggcagagagtgaacaattcggcgttgtaatgggaaccgtacctaggctgaggccccgactcaacgcaatactcttcaagctccagttttctgagcaggtggagaacatcaaacccgaaattgtgagcgttacagcagcctgcgaggagctccgaaaaagcgagtccttcagtaaccttttagagatcacactgctggtcgggaactatatgaacgctgggtcaagaaatgcgggtgctttcggctttaatatcagttttctctgcaagctgcgtgataccaagtccactgatcagaagatgactctcctgcactttctcgccgagctgtgcgagaacgattaccccgatgtgctgaaatttcccgatgaattggcccatgtagagaaagcctcacgggtgagcgctgagaaccttcagaaaaacctggatcagatgaagaagcagattagtgacgttgaacgagacgtccaaaatttcccggctgcaaccgatgagaaggacaagtttgtcgagaaaatgacaagctttgtcaaggacgcacaggaacagtacaataaactgcgtatgatgcacagtaatatggagactttatacaaggagctgggtgagtacttcctatttgaccctaaaaagctgtctgtcgaggaattcttcatggacctgcacaattttcggaacatgttcctgcaggcggtcaaagaaaaccaaaaacggagggaaactgaggagaagatgaggcgcgcaaaattggccaaggaaaaagcggagaaggaaaggctagaaaagcagcaaaagagagagcaactgattgacatgaatgcagagggcgatgaaaccggagttatggatagcctgctcgaggccctccagtcaggggctgcattccggagaaagcggggacctaggcaagcaaatagaaaagctggttgtgcggtgacgtctctgctggcctcagagctcaccaaggatgacgctatggcggctgtgccagctaaggtgtcaaagaattctgagacatttccgaccatactggaggaggcgaaggaactggtagggcgagctagctag

SEQ ID NO: 154052 - DNA, 22 bp, Artificial Sequence
  derived and/or modified sequence
gcgggggtggcggcggcatccc

SEQ ID NO: 154053 - DNA, 22 bp, Artificial Sequence
  derived and/or modified sequence
gggatgccgccgccacccccgc

SEQ ID NO: 154054 - RNA, 22 nt, Artificial Sequence
  derived and/or modified sequence
gcggggguggcggcggcauccc

SEQ ID NO: 154055 - RNA, 22 nt, Artificial Sequence
  derived and/or modified sequence
gggaugccgccgccacccccgc

SEQ ID NO: 154056 - protein, 287 aa, Artificial Sequence
  derived and/or modified sequence
MSGSFDRKLSSILTDISSSLSCHAGSKDSPTLPESSVTDLGYYSAPQHDYYSGQPYGQTVNPYTYHHQFNLNGLAGTGAYSPKSEYTYGASYRQYGAYREQPLPAQDPVSVKEEPEAEVRMVNGKPKKVRKPRTIYSSYQLAALQRRFQKAQYLALPERAELAAQLGLTQTQVKIWFQNRRSKFKKLYKNGEVPLEHSPNNSDSMACNSPPSPALWDTSSHSTPAPARSQLPPPLPYSASPSYLDDPTNSWYHAQNLSGPHLQQQPPQPATLHHASPGPPPNPGAVY

SEQ ID NO: 154057 - DNA, 2613 bp, Artificial Sequence
  derived and/or modified sequence
agcatttgattgtggcttgggacgcgaggagaggcgcgcagcgaccgcctgacggcaggcaatggtgtaagcgcctctcggcctccccctccccccagacgcggccgggtcctcccttcgccttctggacacacacccctgcctcgtctcttccgcctctctcgcactccggtccgttcctgtcctctgcggaggccagccctggggaggtgcagcgcccgccaggatgagtggctccttcgatcgcaagctcagcagcatcctcaccgacatctccagctcccttagctgccatgcgggctccaaggactcgcctaccctgcccgagtcttctgtcactgacctgggctactacagcgctccccagcacgattactactcgggccagccctatggccagacggtgaacccctacacctaccaccaccaattcaatctcaatgggcttgcaggcacgggcgcttactcgcccaagtcggaatatacctacggagcctcctaccggcaatacggggcgtatcgggagcagccgctgccagcccaggacccagtgtcggtgaaggaggagccggaagcagaggtgcgcatggtgaatgggaagcccaagaaggtccgaaagccgcgtacgatctactccagctaccagctggccgccctgcagcgccgcttccagaaggcccagtacctggcgctgcccgagcgcgccgagctggccgcgcagctgggcctcacgcagacacaggtgaaaatctggttccagaaccgccgttccaagttcaagaaactctacaagaacggggaggtgccgctggagcacagtcccaataacagtgattccatggcctgcaactcaccaccatcacccgccctctgggacacctcttcccactccactccggcccctgcccgcagtcagctgcccccgccgctcccatacagtgcctcccccagctacctggacgaccccaccaactcctggtatcacgcacagaacctgagtggaccccacttacagcagcagccgcctcagccagccaccctgcaccatgcctctcccgggcccccgcccaaccctggggctgtgtactgagcacccatctggcctgcacccttgacaaaggaccccaggaccaggcagaaggcgcctccgtcctagccactcaggaatcatcgaggagcacagggaaaaggaactccctttccccctcccttgccccttcctccagggacccaagcgcttccagatgacatttgcatggaccaaggatgccccctgaacctccctccctctgcctagacactggggtacccctccagatgtggggacattccaccccagtggggacagccattcccctacctgctccaggagcctggattggctttaaatggctcatcatcttccagcttcttaaacttagtgcctgttcccagactggagaccttgggatgggggagagtgtggagggtttgcgggtcctgcctgtgctggggcacctggcaccgtggatcttaaaacttgccaggcctagttcctcctgagcctctggtggtctccccctgctcgagcggcccctcggccaataagacagtggacatcatgacgaggactccgggtggggacctgaactggtcaccgccctgcacttctagccctcatttaagatttgagggtgaaaccaaagaaaaccccctaagtgagggaatcttttaatatttgtggctttagaggaaagaactaaaggagccatctctctcccctctcctccgttccgagaggaggggtgggtctcagacgtttttcctatggacttatttcttccatgtccaggactttgcacaactttggttttaaaagctgttgaaaaataggaaaacaaagggcattgttcacagatagggccaagtctccccttgcaagggtgcctctgttctgtccctgcccccacctcaccttctctactcctccagtaagttggcagttttggtgccaaaccccaaatctccaaagagacataccaggcaagacaaacccccaaacacctcctttccggtggccttggaaacagattgctccgagctggagaatgtcgggtgaggtgtatgggagaggaggggagagttagaacttgtgcctttgggagtaaggggtaactgcctggagggctggtggcactgcccctccctgacccagacatcccaccaaagctaactttcccccacccctgatgcagtaaaacattgaaaaaaaaaaaaaaggagaggtagaagactgtagctatatatataaatatatagtaagttttttttttttaagagcaacagagagaagcagcctcctccctgctgcggtttcctatttatgtggccatgttcctcctggacggatctccctgtgtgtttcaagctgagagatgtgggctccggctggatttgggttttgtgggaggtgcaggggccaagagagacgtggtaggtctccaagagtcccacccgggggggaagaagcaaagccatctcccaccccctcctagccttctcatttctgctttcttactggactcatctttatatataatgttaataaaaaagacgaaaataaaaaaaaaaaaa

SEQ ID NO: 154058 - DNA, 864 bp, Artificial Sequence
  derived and/or modified sequence
atgtccgggtctttcgatcgtaagctgagcagcattcttacggacatctctagctctctaagttgtcacgcaggatcgaaagactccccaacacttcccgagtcctccgtcacggacttgggttattacagcgcacctcagcacgattattattcaggtcaaccctacggacagaccgtgaacccctatacgtaccatcaccagtttaacctgaatggactggctgggaccggagcctacagtcctaaaagtgaatatacttacggggcttcttatcgccagtacggggcctacagggaacaaccccttcccgctcaagaccctgtgtccgtaaaggaagaacctgaggctgaagtgcgcatggtcaacgggaaacccaaaaaagttcggaaacctcgaactatctattcctcataccagcttgccgccctgcagcgccggttccagaaggctcagtatcttgccctaccagaaagggccgaattagctgcgcagcttggcctcactcaaacacaggtgaaaatatggtttcagaacagaagaagcaagttcaaaaagctgtacaaaaacggagaagtgccactggaacactcaccgaataatagcgactctatggcatgcaactctccccctagcccggctctttgggacacttcctcacattccacccccgccccggcccgttcccagctgcctcctcctctgccttatagcgcatcacctagttacctggacgacccaacaaactcctggtaccatgcgcagaatctgtccgggccccatctacagcagcaacctcctcaaccagccacactgcatcacgcgtcacctgggccaccacccaaccctggcgctgtctactag

SEQ ID NO: 154059 - DNA, 864 bp, Artificial Sequence
  derived and/or modified sequence
atgagcggcagctttgacaggaagctgagcagcatcctgacagacatcagcagcagcctgagctgccacgccggcagcaaggacagccccaccctgcctgagagctctgtgacagacctgggctactacagcgccccccagcacgactactacagcggccagccctacggccagacagtgaacccctacacctaccaccaccagttcaacctgaatggcctggccggcactggagcctacagccccaagtctgagtacacctacggggccagctaccggcagtatggagcctaccgggagcagcccctgcctgcccaggaccctgtgtctgtgaaggaggagcctgaggccgaggtgaggatggtgaatggcaagcccaagaaggtgaggaagcccaggaccatctacagcagctaccagctggccgccctgcagaggcgcttccagaaggcccagtacctggccctgcctgagcgggcagagctggccgcccagctgggcctgacccagacccaggtgaagatctggttccagaacagaagaagcaagttcaagaagctgtacaagaatggagaggtgcccctggagcacagccccaacaacagcgacagcatggcctgcaacagcccccccagccctgccctgtgggacaccagcagccacagcaccccagccccagcccggagccagctgcccccacccctgccctacagcgccagccccagctacctggatgaccccaccaacagctggtaccacgcccagaacctgagcggcccccacctgcagcagcagcccccccagcctgccaccctgcaccacgccagccctggccccccacccaaccctggagctgtgtactag

SEQ ID NO: 154060 - DNA, 864 bp, Artificial Sequence
  derived and/or modified sequence
atgagcggcagcttcgaccggaagctgagcagcatcctgaccgacatcagcagcagtctcagttgtcatgctgggagcaaagacagccccaccctcccggagagctccgtgactgacttggggtattactccgcccctcagcacgactactacagtgggcagccatatggtcagactgtgaacccatacacttaccaccatcagtttaacctaaatgggctcgcaggcacaggcgcctatagccccaagtcagaatatacctatggggccagctatcgccaatacggtgcttatcgagaacaaccgcttcctgctcaggaccccgtgtccgtgaaggaagagcccgaggctgaggtgagaatggtgaacggcaagcccaaaaaggttcggaagccccgtaccatctacagttcatatcagctggccgcacttcaaaggcggttccaaaaagcccagtacttggccctgcctgaacgagcagaactagccgcgcagctgggactgacccagacacaagtgaagatttggttccagaataggcgttcaaagtttaaaaagctctataagaatggagaggtacctttagagcactctcccaacaattccgactctatggcctgtaattcacccccttctcccgccctatgggataccagcagccactctactccagcgccggctcgtagccagctcccaccaccgttaccctactccgcctcaccttcctatttggatgacccgactaatagctggtatcatgctcaaaacctttcgggacctcatctgcagcagcagcctccccaacctgcaactctgcatcacgcttcaccaggccccccgccaaacccaggtgctgtctactag

SEQ ID NO: 154061 - DNA, 864 bp, Artificial Sequence
  derived and/or modified sequence
atgtctggaagcttcgacagaaagttgtcatctatactcacagatatcagcagctcactgagctgccatgcaggctccaaagactcaccaacactgccagagagctctgttaccgaccttggctactacagcgctcctcagcacgactactatagcgggcagccttacgggcagacggtaaacccatacacataccaccatcagttcaatctgaatgggcttgctggcaccggtgcctacagccccaaaagcgaatatacttacggagcctcctaccggcagtatggcgcttatcgggagcagcctctccctgctcaggaccctgtcagcgttaaagaggagcctgaagcggaggttaggatggtgaatggaaagcccaaaaaagtccggaaacctagaacaatttacagttcttaccaactggccgctctgcagagacgattccagaaggctcagtacctggctctgccagaacgggcagaactggccgctcagttggggctcacccagacccaggtcaagatctggttccagaataggcggtccaaatttaaaaagttgtacaagaatggtgaggtgcctctggaacatagcccaaacaattccgatagtatggcttgtaactctccgccatcccccgcactctgggatacaagcagccactccactcctgcgcctgccaggtcgcagctgccccctccccttccctattcagcgtccccttcttatctggacgaccctacgaatagctggtatcatgcgcagaatctcagcggtccacaccttcagcaacaacccccacaaccagcaacactgcaccacgcaagcccaggccctccaccaaatcccggagcagtgtactag

SEQ ID NO: 154062 - DNA, 864 bp, Artificial Sequence
  derived and/or modified sequence
atgagcggcagcttcgacagaaagctgagcagcatcctgaccgacatcagcagcagcctgagctgccacgccggcagcaaggacagccccaccctgcccgagagcagcgtgaccgacctgggctactacagcgccccccagcacgactactacagcggccagccctacggccagaccgtgaacccctacacctaccaccaccagttcaacctgaacggcctggccggcaccggcgcctacagccccaagagcgagtacacctacggcgccagctacagacagtacggcgcctacagagagcagcccctgcccgcccaggaccccgtgagcgtgaaggaggagcccgaggccgaggtgagaatggtgaacggcaagcccaagaaggtgagaaagcccagaaccatctacagcagctaccagctggccgccctgcagagaagattccagaaggcccagtacctggccctgcccgagagagccgagctggccgcccagctgggcctgacccagacccaggtgaagatctggttccagaacagaagaagcaagttcaagaagctgtacaagaacggcgaggtgcccctggagcacagccccaacaacagcgacagcatggcctgcaacagcccccccagccccgccctgtgggacaccagcagccacagcacccccgcccccgccagaagccagctgcccccccccctgccctacagcgccagccccagctacctggacgaccccaccaacagctggtaccacgcccagaacctgagcggcccccacctgcagcagcagcccccccagcccgccaccctgcaccacgccagccccggccccccccccaaccccggcgccgtgtactag

SEQ ID NO: 154063 - DNA, 2602 bp, Artificial Sequence
  derived and/or modified sequence
agcatttgattgtggcttgggacgcgaggagaggcgcgcagcgaccgcctgacggcaggcaatggtgtaagcgcctctcggcctccccctccccccagacgcggccgggtcctcccttcgccttctggacacacacccctgcctcgtctcttccgcctctctcgcactccggtccgttcctgtcctctgcggaggccagccctggggaggtgcagcgcccgccaggatgagtggctccttcgatcgcaagctcagcagcatcctcaccgacatctccagctcccttagctgccatgcgggctccaaggactcgcctaccctgcccgagtcttctgtcactgacctgggctactacagcgctccccagcacgattactactcgggccagccctatggccagacggtgaacccctacacctaccaccaccaattcaatctcaatgggcttgcaggcacgggcgcttactcgcccaagtcggaatatacctacggagcctcctaccggcaatacggggcgtatcgggagcagccgctgccagcccaggacccagtgtcggtgaaggaggagccggaagcagaggtgcgcatggtgaatgggaagcccaagaaggtccgaaagccgcgtacgatctactccagctaccagctggccgccctgcagcgccgcttccagaaggcccagtacctggcgctgcccgagcgcgccgagctggccgcgcagctgggcctcacgcagacacaggtgaaaatctggttccagaaccgccgttccaagttcaagaaactctacaagaacggggaggtgccgctggagcacagtcccaataacagtgattccatggcctgcaactcaccaccatcacccgccctctgggacacctcttcccactccactccggcccctgcccgcagtcagctgcccccgccgctcccatacagtgcctcccccagctacctggacgaccccaccaactcctggtatcacgcacagaacctgagtggaccccacttacagcagcagccgcctcagccagccaccctgcaccatgcctctcccgggcccccgcccaaccctggggctgtgtactgagcacccatctggcctgcacccttgacaaaggaccccaggaccaggcagaaggcgcctccgtcctagccactcaggaatcatcgaggagcacagggaaaaggaactccctttccccctcccttgccccttcctccagggacccaagcgcttccagatgacaattgcatggaccaaggatgccccctgaacctccctccctctgcctagacactggggtacccctccagatgtggggacattccaccccagtggggacagccattcccctacctgctccaggagcctggattggctttaaatggctcatcatcttccagcttcttaaacttagtgcctgttcccagactggagaccttgggatgggggagagtgtggagggtttgcgggtcctgcctgtgctggggcacctggcaccgtggatcttaaaacttgccaggcctagttcctcctgagcctctggtggtctccccctgctcgagcggcccctcggccaataagacagtggacatcatgacgaggactccgggtggggacctgaactggtcaccgccctgcacttctagccctcatttaagatttgagggtgaaaccaaagaaaaccccctaagtgagggaatcttttaatatttgtggctttagaggaaagaactaaaggagccatctctctcccctctcctccgttccgagaggaggggtgggtctcagacgtttttcctatggacttatttcttccatgtccaggactttgcacaactttggttttaaaagctgttgaaaaataggaaaacaaagggcattgttcacagatagggccaagtctccccttgcaagggtgcctctgttctgtccctgcccccacctcaccttctctactcctccagtaagttggcagttttggtgccaaaccccaaatctccaaagagacataccaggcaagacaaacccccaaacacctcctttccggtggccttggaaacagattgctccgagctggagaatgtcgggtgaggtgtatgggagaggaggggagagttagaacttgtgcctttgggagtaaggggtaactgcctggagggctggtggcactgcccctccctgacccagacatcccaccaaagctaactttcccccacccctgatgcagtaaaacattgaaaaaaaaaaaaaaggagaggtagaagactgtagctatatatataaatatatagtaagttttttttttttaagagcaacagagagaagcagcctcctccctgctgcggtttcctatttatgtggccatgttcctcctggacggatctccctgtgtgtttcaagctgagagatgtgggctccggctggatttgggttttgtgggaggtgcaggggccaagagagacgtggtaggtctccaagagtcccacccgggggggaagaagcaaagccatctcccaccccctcccagccttctcatttctgctttcttactggactcatctttatatataatgttaataaaaaagacgaaaataa

SEQ ID NO: 154064 - protein, 289 aa, Artificial Sequence
  derived and/or modified sequence
MTGVFDRRVPSIRSGDFQAPFQTSAAMHHPSQESPTLPESSATDSDYYSPTGGAPHGYCSPTSASYGKALNPYQYQYHGVNGSAGSYPAKAYADYSYASSYHQYGGAYNRVPSATNQPEKEVTEPEVRMVNGKPKKVRKPRTIYSSFQLAALQRRFQKTQYLALPERAELAASLGLTQTQVKIWFQNKRSKIKKIMKNGEMPPEHSPSSSDPMACNSPQSPAVWEPQGSSRSLSHHPHAHPPTSNQSPASSYLENSASWYTSAASSINSHLPPPGSLQHPLALASGTLY

SEQ ID NO: 154065 - DNA, 1424 bp, Artificial Sequence
  derived and/or modified sequence
agcagtcagccggccggagacagagacttcacgactcccagtctcctcctcgccgcggccgccgcctcctccttctctcctcctcctcttcctcctcctccctcgctcccacagccatgtctgcttagaccagagcagccccacagccaactagggcagctgccgccgccacaacagcaaggacagccgctgccgccgcccgtgagcgatgacaggagtgtttgacagaagggtccccagcatccgatccggcgacttccaagctccgttccagacgtccgcagctatgcaccatccgtctcaggaatcgccaactttgcccgagtcttcagctaccgattctgactactacagccctacggggggagccccgcacggctactgctctcctacctcggcttcctatggcaaagctctcaacccctaccagtatcagtatcacggcgtgaacggctccgccgggagctacccagccaaagcttatgccgactatagctacgctagctcctaccaccagtacggcggcgcctacaaccgcgtcccaagcgccaccaaccagccagagaaagaagtgaccgagcccgaggtgagaatggtgaatggcaaaccaaagaaagttcgtaaacccaggactatttattccagctttcagctggccgcattacagagaaggtttcagaagactcagtacctcgccttgccggaacgcgccgagctggccgcctcgctgggattgacacaaacacaggtgaaaatctggtttcagaacaaaagatccaagatcaagaagatcatgaaaaacggggagatgcccccggagcacagtcccagctccagcgacccaatggcgtgtaactcgccgcagtctccagcggtgtgggagccccagggctcgtcccgctcgctcagccaccaccctcatgcccaccctccgacctccaaccagtccccagcgtccagctacctggagaactctgcatcctggtacacaagtgcagccagctcaatcaattcccacctgccgccgccgggctccttacagcacccgctggcgctggcctccgggacactctattagatgggctgctctctcttactctcttttttgggactactgtgttttgctgttctagaaaatcataaagaaaggaattcatatggggaagttcggaaaactgaaaaagattcatgtgtaaagcttttttttgcatgtaagttattgcatttcaaaagaccccccctttttttacagaggactttttttgcgcaactgtggacactttcaatggtgccttgaaatctatgacctcaacttttcaaaagacttttttcaatgttattttagccatgtaaataagtgtagatagaggaattaaactgtatattctggataaataaaattatttcgaccatgaaaagcggaa

SEQ ID NO: 154066 - DNA, 870 bp, Artificial Sequence
  derived and/or modified sequence
atgacaggcgttttcgatagacgggtgccttctataagatccggcgatttccaggcccctttccagacttctgcagccatgcaccacccaagccaggagtcacctaccctgccagagagctctgctactgacagtgactattactcccccactggcggggctcctcatggatactgcagcccgacctcggccagctacggcaaggcacttaacccttaccagtatcagtaccacggcgtgaatggctctgccggttcctatcccgccaaggcgtacgcggactattcatatgcgagttcataccatcagtatggtggagcctataatcgtgttccgagcgctaccaatcagcctgaaaaggaagttacagagccagaggtgagaatggttaacgggaagcccaagaaggtgaggaagcctcgaacaatttattctagctttcagttagccgctttgcaacgcagattccagaagacacagtatctggcactgccggagagggcagagctggcagcaagtttgggtctgacacagacccaggtgaagatctggtttcagaataagaggtcaaagataaaaaagattatgaagaacggcgagatgccccctgaacactcccccagttcttctgatcccatggcctgtaatagcccgcaatctcccgctgtgtgggaaccacagggctccagtcgctccctcagtcaccaccctcacgcccatccgcctacaagtaatcagtctcccgcttctagttatctggaaaactcagcttcttggtacacttctgctgcctcttcaataaactcccatctccccccaccggggtctttgcagcatccattagccctggcctcaggaactctctactag

SEQ ID NO: 154067 - DNA, 870 bp, Artificial Sequence
  derived and/or modified sequence
atgactggagtgtttgacagaagagtgcccagcatccgcagcggggacttccaggcccccttccagaccagcgctgccatgcaccaccccagccaggagagccccaccctgcctgagagcagcgccacagacagcgactactacagccccactggaggagccccccacggctactgcagccccaccagcgccagctatggcaaggccctgaacccctaccagtaccagtaccacggcgtgaatggatctgctggcagctacccagccaaggcctatgctgactacagctatgccagcagctaccaccagtatggaggagcctacaacagagtgcccagcgccaccaaccagcctgagaaggaggtgacagagcctgaggtgaggatggtgaatggcaagcccaagaaggtgaggaagcccaggaccatctacagcagcttccagctggccgccctgcagaggcgcttccagaagacccagtacctggccctgcctgagcgggcagagctggccgccagcctgggcctgacccagacccaggtgaagatctggttccagaacaagaggagcaagatcaagaagatcatgaagaatggagagatgcctcctgagcacagccccagcagcagtgaccccatggcctgcaacagcccccagagccctgctgtgtgggagccccagggcagcagccgcagcctgagccaccacccccacgcccacccccccaccagcaaccagagccctgccagcagctacctggagaacagcgcctcctggtacaccagcgctgccagcagcatcaacagccacctgcccccacctggcagcctgcagcaccccctggccctggccagcggcaccctgtactag

SEQ ID NO: 154068 - DNA, 870 bp, Artificial Sequence
  derived and/or modified sequence
atgaccggcgtgttcgaccggcgggtgcccagcatccggagcggcgacttccaggcaccatttcagacgagcgccgccatgcaccaccctagtcaagagagccctaccttacccgaaagcagcgccacagatagcgactactattcacctaccgggggcgccccgcacggatattgcagtccaactagcgcctcgtacggaaaagccctgaatccttatcagtaccaataccacggcgttaacggaagcgcaggctcctacccagccaaggcctacgccgactactcctatgcctcctcttaccaccagtatgggggcgcgtataatagggttcccagtgccaccaatcagccagagaaggaagtgactgagcccgaggtacggatggttaacggtaagccaaaaaaggtccggaagcccagaacaatctatagcagtttccagcttgcggcacttcagagacggtttcaaaagactcagtatttagctctccccgagcgcgcggagctcgcagcatcactgggactgactcagacccaagtcaagatctggtttcagaataagcgatctaagataaagaagatcatgaaaaacggcgagatgcccccggagcattctccttccagctctgatcctatggcttgcaactcaccacagtccccagccgtgtgggagccccaagggtcttctaggtcacttagccatcatccccacgctcatccaccaacctcaaatcagtctccagcatccagttatttggagaactctgcatcgtggtacacttctgcagcttctagcatcaactcccacctgccacccccagggagcctacaacatcctctagcgctcgcctctgggacgttatactag

SEQ ID NO: 154069 - DNA, 870 bp, Artificial Sequence
  derived and/or modified sequence
atgactggagtgtttgaccgcagggtcccaagtatccggtcgggagacttccaggctccattccagacctccgcggcaatgcaccacccttcacaggagtctcccacactgcccgaatcgtcggcgacagattcagactactactcacccaccggaggggcaccccacggctattgctccccaaccagtgctagttacgggaaagccctaaatccttatcaataccagtaccacggcgtcaacggctcagcagggagttaccccgctaaagcatacgctgactatagttacgcctctagctatcaccaatatggcggagcttacaatagagtccctagcgccacaaatcaaccagaaaaagaggttactgaaccagaagtgaggatggtgaacggtaagcccaaaaaggttcgcaaacccagaaccatttattcctccttccagttggccgcacttcagagacgattccagaagactcaatatttagcacttccggaacgggctgaactggcagctagtctaggacttacacagacccaagttaagatttggttccaaaacaaacgtagcaagataaaaaagattatgaagaacggagaaatgcccccagagcacagtccgagctcctccgatccaatggcatgcaactcccctcagtcacctgccgtatgggaacctcagggatccagccggagcctttctcaccacccacacgcgcatccacccaccagtaatcagagcccagcgagctcttatctggaaaatagtgcctcttggtacacctctgccgcatctagcatcaactcccatttgccaccaccaggctccctgcaacaccctctggccctggcatccgggactttatattag

SEQ ID NO: 154070 - DNA, 1688 bp, Artificial Sequence
  derived and/or modified sequence
actaaaaacagatagactaagacccctccccactccacaacaagcaaaaacacacacaagcgcgcgggcgcgcacacacacaaacacacacaccccctcagtaccccccaccccctttttaagcaatgctttgttgtgctaaaactagttggacgagttagggtgttactgttgctcccgaggccctggccaatagaaccagatccaccccgctgtgcgtaagcgcgcaattaaggatttaaccaaggctgtgctgcgcctcagccagcagtcagccggccggagacagagacttcacgactcccagtctcctcctcgccgcggccgccgcctcctccttctctcctcctcctcttcctcctcctccctcgctcccacagccatgtctgcttagaccagagcagccccacagccaactagggcagctgccgccgccacaacagcaaggacagccgctgccgccgcccgtgagcgatgacaggagtgtttgacagaagggtccccagcatccgatccggcgacttccaagctccgttccagacgtccgcagctatgcaccatccgtctcaggaatcgccaactttgcccgagtcttcagctaccgattctgactactacagccctacggggggagccccgcacggctactgctctcctacctcggcttcctatggcaaagctctcaacccctaccagtatcagtatcacggcgtgaacggctccgccgggagctacccagccaaagcttatgccgactatagctacgctagctcctaccaccagtacggcggcgcctacaaccgcgtcccaagcgccaccaaccagccagagaaagaagtgaccgagcccgaggtgagaatggtgaatggcaaaccaaagaaagttcgtaaacccaggactatttattccagctttcagctggccgcattacagagaaggtttcagaagactcagtacctcgccttgccggaacgcgccgagctggccgcctcgctgggattgacacaaacacaggtgaaaatctggtttcagaacaaaagatccaagatcaagaagatcatgaaaaacggggagatgcccccggagcacagtcccagctccagcgacccaatggcgtgtaactcgccgcagtctccagcggtgtgggagccccagggctcgtcccgctcgctcagccaccaccctcatgcccaccctccgacctccaaccagtccccagcgtccagctacctggagaactctgcatcctggtacacaagtgcagccagctcaatcaattcccacctgccgccgccgggctccttacagcacccgctggcgctggcctccgggacactctattagatgggctgctctctcttactctcttttttgggactactgtgttttgctgttctagaaaatcataaagaaaggaattcatatggggaagttcggaaaactgaaaaagattcatgtgtaaagcttttttttgcatgtaagttattgcatttcaaaagaccccccctttttttacagaggactttttttgcgcaactgtggacactttcaatggtgccttgaaatctatgacctcaacttttcaaaagacttttttcaatgttattttagccatgtaaataagtgtagatagaggaattaaactgtatattctggataaataaaattatttcgaccatgaaaagcgg

SEQ ID NO: 154071 - DNA, 870 bp, Artificial Sequence
  derived and/or modified sequence
atgaccggcgtgttcgacagaagagtgcccagcatcagaagcggcgacttccaggcccccttccagaccagcgccgccatgcaccaccccagccaggagagccccaccctgcccgagagcagcgccaccgacagcgactactacagccccaccggcggcgccccccacggctactgcagccccaccagcgccagctacggcaaggccctgaacccctaccagtaccagtaccacggcgtgaacggcagcgccggcagctaccccgccaaggcctacgccgactacagctacgccagcagctaccaccagtacggcggcgcctacaacagagtgcccagcgccaccaaccagcccgagaaggaggtgaccgagcccgaggtgagaatggtgaacggcaagcccaagaaggtgagaaagcccagaaccatctacagcagcttccagctggccgccctgcagagaagattccagaagacccagtacctggccctgcccgagagagccgagctggccgccagcctgggcctgacccagacccaggtgaagatctggttccagaacaagagaagcaagatcaagaagatcatgaagaacggcgagatgccccccgagcacagccccagcagcagcgaccccatggcctgcaacagcccccagagccccgccgtgtgggagccccagggcagcagcagaagcctgagccaccacccccacgcccacccccccaccagcaaccagagccccgccagcagctacctggagaacagcgccagctggtacaccagcgccgccagcagcatcaacagccacctgcccccccccggcagcctgcagcaccccctggccctggccagcggcaccctgtactag

SEQ ID NO: 154072 - protein, 265 aa, Artificial Sequence
  derived and/or modified sequence
MMTMTTMADGLEGQDSSKSAFMEFGQQQQQQHSPAMAGAHYPLHCLHSAAAAAAAGSHHHHHHQHHHHGSPYASGGGNSYNHRSLAAYPYMSHSQHSPYLQSYHNSSAAAQTRGDDTDQQKTTVIENGEIRFNGKGKKIRKPRTIYSSLQLQALNHRFQQTQYLALPERAELAASLGLTQTQVKIWFQNKRSKFKKLLKQGSNPHESDPLQGSAALSPRSPALPPVWDVSASAKGVSMPPNSYMPGYSHWYSSPHQDTMQRPQMM

SEQ ID NO: 154073 - protein, 293 aa, Artificial Sequence
  derived and/or modified sequence
MMTMTTMADGLEGQDSSKSAFMEFGQQQQQQQQQQQQQQQQQQQPPPPPPPPPQPHSQQSSPAMAGAHYPLHCLHSAAAAAAAGSHHHHHHQHHHHGSPYASGGGNSYNHRSLAAYPYMSHSQHSPYLQSYHNSSAAAQTRGDDTDQQKTTVIENGEIRFNGKGKKIRKPRTIYSSLQLQALNHRFQQTQYLALPERAELAASLGLTQTQVKIWFQNKRSKFKKLLKQGSNPHESDPLQGSAALSPRSPALPPVWDVSASAKGVSMPPNSYMPGYSHWYSSPHQDTMQRPQMM

SEQ ID NO: 154074 - DNA, 1892 bp, Artificial Sequence
  derived and/or modified sequence
atgatgaccatgactacgatggctgacggcttggaaggccaggactcgtccaaatccgccttcatggagttcgggcagcagcagcagcagcagcagcaacagcagcagcagcagcagcagcaacagcaacagccgccgccgccgccgccgccgccgccgcagccgcactcgcagcagagctccccggccatggcaggcgcgcactaccctctgcactgcctgcactcggcggcggcggcggcagcggccggctcgcaccaccaccaccaccaccagcaccaccaccacggctcgccctacgcgtcgggcggagggaactcctacaaccaccgctcgctcgccgcctacccctacatgagccactcgcagcacagcccttacctccagtcctaccacaacagcagcgcagccgcccagacgcgaggggacgacacagatcaacaaaaaactacagtgattgaaaacggggaaatcaggttcaatggaaaagggaaaaagattcggaagcctcggaccatttattccagcctgcagctccaggctttaaaccatcgctttcagcagacacagtatctggcccttccagagagagccgaactggcagcttccttaggactgacacaaacacaggtgaagatatggtttcagaacaaacgctctaagtttaagaaactgctgaagcagggcagtaatcctcatgagagcgaccccctccagggctcggcggccctgtcgccacgctcgccagcgctgcctccagtctgggacgtttctgcctcggccaagggtgtcagtatgccccccaacagctacatgcctggctattctcactggtactcctctccacaccaggacacgatgcagagaccacagatgatgtgagttgcccaagggaacaccctagggaaacgtctgaacaaggaaaagaggatccgggacctgcttgtatctgcgaaaaggagccaaaggagcaggcttaggagagctcataagtgtggcaagaagccgactaggctcattctctctccctctctctctctctccctctcctttctttttacttcttcctttcctccattccttctttctttccttttcctttctacctttcttttctttttgcctttcaccttttttctcatttaccttctctcttgagcaacgtcagtaattgatcttgcatctcagagagagagaaagagcatgtgtgagagagaaactggtttctatgccagcactcctgaaaccccttactgtaaggatattttctcttaccccttgggatccaggctctgagtctcttctctttgggagtatccatcaaaatgactttttttaaaaacagattttcccccaaccagaagaatctgcacaaacttggcagcgtttttacttgtttaatgagtttaagacattacatggtgaaagagaagcattttggactcctgcatttttatttaccattcccagactgacgagaaaaagaaaattcctcacataacagcccttctctaaagaaaaaggaaaaagtggctgtaagattagaacattgctacaaagggaatgctgcatgttttatcaaaatgcaatgaccaggaatgatggttgattaaaaaaaaacaaaacaaaaaccactctttccccaccccacccccccaaaccctgaactggaatcaggaaagacggaggaaacaatcaaaatcaccattctattgctttgacacctttactaggtgaattggtggcattcacaaagctaatagggacgtttatatcaagaaacatttctgtatatattgttgaattttagttgtacatatactttgtatgtttttgtcttctttcatatatggagtaaaagccacaaaacgctgaaaaaaaaaaaaaaaaaa

SEQ ID NO: 154075 - DNA, 798 bp, Artificial Sequence
  derived and/or modified sequence
atgatgaccatgactacaatggccgatggcctcgaaggccaagatagttcaaaatccgcctttatggagtttggccaacagcagcagcagcagcactcccctgccatggccggggcacattatcctttacactgcttacatagtgcagccgccgctgcagcggccgggtcgcaccaccaccatcatcaccagcaccaccaccatggtagtccatacgcatcagggggaggtaatagctataaccaccggtcgttagccgcttatccgtacatgagccattctcagcactccccatacctacagtcataccacaactccagtgccgccgcgcaaaccagaggggacgatacagatcagcagaaaacaactgtgatcgaaaatggcgaaatccgttttaatgggaagggaaagaaaatccgtaaaccgagaacaatctacagtagcctccagctccaggctctcaaccaccgattccaacagacacagtatctggcgttgccagaaagagccgaacttgccgctagtcttgggttgacccagacccaagtcaagatttggtttcaaaataaacggtctaagtttaaaaaacttcttaagcagggcagcaacccccatgaatcggatcctctccaaggctccgcggccctttcgccgagaagccccgctctgccacccgtgtgggatgtctccgcatctgcgaaaggcgtgtcaatgccccccaattcatacatgccaggttactctcactggtactctagcccacaccaggatacgatgcagaggccacaaatgatgtag

SEQ ID NO: 154076 - DNA, 882 bp, Artificial Sequence
  derived and/or modified sequence
atgatgaccatgacaaccatggcagacggtctagagggccaggactctagcaaatctgccttcatggaattcgggcaacagcagcagcagcagcagcagcagcaacagcagcagcagcagcagcagcagcagccaccacctcctcctccacctcctccacagcctcacagtcagcaatcaagccccgccatggccggggcccactatcccctgcattgtttacactccgccgcagcggcagctgcggctggatcccatcatcaccaccaccaccaacatcaccaccatggcagcccttacgcatctggcggaggcaattcatataatcatcggagcctggctgcttatccctacatgagtcattcgcagcatagcccctacctgcagtcttaccataactcaagtgcggctgcacagacaaggggagatgacacagaccagcagaagactactgtgatcgagaatggagagatccggttcaacggaaaagggaagaaaattcggaagccacgtacaatatatagttcccttcagcttcaggctctcaatcataggtttcagcaaacacagtacttggctctcccagagagagctgaactggccgccagtctcgggttaactcagacacaggttaagatctggtttcaaaataaacgctccaaattcaagaagctcctaaaacagggttctaaccctcatgagtcggacccattacagggtagcgccgcattgagcccccgctctcctgccctccccccagtctgggacgtgagtgcctcagctaagggcgtgagcatgcctcccaactcttatatgccaggctattcacactggtattccagtcctcaccaggataccatgcagcggccccaaatgatgtag

SEQ ID NO: 154077 - DNA, 798 bp, Artificial Sequence
  derived and/or modified sequence
atgatgaccatgaccaccatggctgatggcctggagggccaggacagcagcaagagcgccttcatggagtttggccagcagcagcagcagcagcacagccctgccatggccggggcccactaccccctgcactgcctgcacagcgctgctgctgctgctgctgctggcagccaccaccaccaccaccaccagcaccaccaccacggcagcccctatgccagcggcggcggcaacagctacaaccacaggagcctggccgcctacccctacatgagccacagccagcacagcccctacctgcagagctaccacaacagcagcgctgctgcccagaccagaggagatgacacagaccagcagaagaccaccgtgattgaaaatggagagatccgcttcaacgggaagggcaagaagatcaggaagcccaggaccatctacagcagcctgcagctgcaggccctgaaccaccgcttccagcagacccagtacctggccctgcctgagcgggcagagctggccgccagcctgggcctgacccagacccaggtgaagatctggttccagaacaagaggagcaagttcaagaagctgctgaagcagggcagcaacccccatgaaagtgaccccctgcagggcagcgctgccctgagccccaggagccctgccctgccccctgtgtgggatgtgtctgccagcgccaagggcgtgtccatgccacccaacagctacatgcctggctacagccactggtacagcagcccccaccaggacaccatgcagaggccccagatgatgtag

SEQ ID NO: 154078 - DNA, 882 bp, Artificial Sequence
  derived and/or modified sequence
atgatgaccatgaccaccatggctgatggcctggagggccaggacagcagcaagagcgccttcatggagtttggccagcagcagcagcagcagcagcagcagcagcagcagcagcagcagcagcagcagcagcccccacctcctcctcctcctccaccccagccccacagccagcagagcagccctgccatggccggggcccactaccccctgcactgcctgcacagcgctgctgctgctgctgctgctggcagccaccaccaccaccaccaccagcaccaccaccacggcagcccctatgccagcggcggcggcaacagctacaaccacaggagcctggccgcctacccctacatgagccacagccagcacagcccctacctgcagagctaccacaacagcagcgctgctgcccagaccagaggagatgacacagaccagcagaagaccaccgtgattgaaaatggagagatccgcttcaacgggaagggcaagaagatcaggaagcccaggaccatctacagcagcctgcagctgcaggccctgaaccaccgcttccagcagacccagtacctggccctgcctgagcgggcagagctggccgccagcctgggcctgacccagacccaggtgaagatctggttccagaacaagaggagcaagttcaagaagctgctgaagcagggcagcaacccccatgaaagtgaccccctgcagggcagcgctgccctgagccccaggagccctgccctgccccctgtgtgggatgtgtctgccagcgccaagggcgtgtccatgccacccaacagctacatgcctggctacagccactggtacagcagcccccaccaggacaccatgcagaggccccagatgatgtag

SEQ ID NO: 154079 - DNA, 798 bp, Artificial Sequence
  derived and/or modified sequence
atgatgaccatgaccaccatggccgacggcctggagggccaggactccagtaagtctgcttttatggaattcggccaacaacagcagcagcaacacagtccagccatggccggcgcccattaccccctgcactgtctgcactccgcggccgccgctgccgcagccggcagccaccaccaccaccaccaccaacatcatcaccacggtagcccatacgcctccgggggcggcaacagctataatcataggtcactcgccgcatacccatacatgtcccactcccaacattctccctacctgcaaagctaccataatagttccgccgctgcccagacacgtggggatgacactgaccagcagaagactacggtcatcgagaacggggaaatcagattcaacggcaaaggcaaaaagattcgtaaaccgcggactatctactcgagtttgcagctgcaggctctgaaccatcggtttcaacagacccagtatctggcactgcccgagagagccgagctcgcagcctcacttgggttgacacagacccaggtgaagatttggttccaaaacaaacggtctaagttcaagaaattattgaagcagggatccaaccctcatgagtccgaccctttacaaggcagcgccgccttgagccctagaagtcccgccttacctcctgtgtgggacgtgagtgcctccgccaaaggcgtttccatgccacctaatagttatatgcccggctactcccattggtacagcagcccccatcaggacaccatgcagaggcctcagatgatgtag

SEQ ID NO: 154080 - DNA, 882 bp, Artificial Sequence
  derived and/or modified sequence
atgatgaccatgaccaccatggccgacggcctggagggccaggactccagcaagtctgcttttatggagtttgggcagcaacagcagcagcagcaacaacagcagcagcagcagcagcaacagcagcagcagccgccccccccccctcctcccccgccacaacctcattctcaacagagttctccggccatggccggcgcgcattacccattgcactgcctccacagtgccgcagctgccgcagctgctggctcccaccaccatcaccaccatcaacaccaccaccatggcagtccttatgcttcaggtggcgggaacagttataatcacaggtccctggcggcctatccctacatgtcccacagtcagcatagcccatatcttcagagctaccataattctagtgcggcagcccagacaagaggagacgacaccgatcagcagaaaacgacagtgatcgagaatggagagatccgcttcaatggaaaggggaagaagatccggaaacccagaacaatttactctagcctgcagctgcaggctctgaatcaccgcttccaacagacacagtatctggccctgccggagcgggctgagttggcagcctctctggggctgacacaaacccaggttaaaatttggttccaaaacaagcggtctaaatttaaaaaacttctcaagcagggtagcaacccccacgagtctgaccctctccagggtagtgcggcattaagcccccgctctccagcgctgccaccggtgtgggatgtgagcgccagcgccaaaggagtctctatgcctcccaattcctacatgccagggtattcccactggtactcgtcgccccaccaggataccatgcagagaccgcagatgatgtag

SEQ ID NO: 154081 - DNA, 798 bp, Artificial Sequence
  derived and/or modified sequence
atgatgacaatgaccaccatggcggacggcctggagggacaggattcctctaagtccgcttttatggagtttggacagcagcagcagcaacaacactccccagccatggctggggctcactatcctttgcactgtctgcactctgctgccgcagcagctgcagctggttcacaccaccaccaccaccaccagcatcatcaccacggctctccttatgccagcggcggaggcaactcttataatcataggtctcttgcagcttatccctatatgtcgcactcccagcacagcccatatctgcagtcataccataattcttccgcagctgcacagacgaggggggacgacactgatcagcagaagacaacggtgatcgaaaacggcgagatccgctttaatggcaaaggtaaaaagattcggaaaccgagaactatttattcctctctgcaactccaggcgttgaaccacagattccagcagacacaatacctcgctctgccagagcgggctgagttagctgcatcactcggcttaactcaaactcaggtaaagatctggttccagaacaaaaggtctaaatttaagaaactgttgaagcaggggagcaatccacatgagtccgacccactgcagggaagcgctgcactgtctcccaggtctcccgctttgcctccagtgtgggatgtttcagcatctgccaagggggtgagcatgccccctaacagctatatgccgggatactcacattggtattcctcaccccatcaggatacaatgcagcggcctcagatgatgtag

SEQ ID NO: 154082 - DNA, 882 bp, Artificial Sequence
  derived and/or modified sequence
atgatgaccatgactaccatggctgacgggttggaaggccaggacagcagtaaatcagcgttcatggagtttggacagcagcagcaacagcagcaacagcagcagcagcagcaacagcagcagcaacaacagccaccacctcctccgcctcccccaccccagccgcattctcagcagagctccccggctatggcgggagctcactaccccctgcactgtctgcattctgccgcagccgcagccgctgcagggagccaccaccatcatcaccaccaacaccatcatcatggctccccatatgcctcaggtggagggaatagttacaaccatcgttcgctggcggcttatccgtatatgagccacagccaacattctccatatttgcagtcatatcacaatagtagcgctgcagcccaaaccagaggcgacgacaccgaccagcagaagaccacagttatcgagaatggcgaaataagattcaatggcaaaggaaaaaaaattaggaaaccaaggactatctattcctccctgcagttacaggcgctaaaccaccggtttcagcagacccagtacctcgcccttcctgagagagcggaactggcagcaagcctgggcctgactcagacgcaggtgaaaatatggtttcagaacaaaagaagcaagttcaagaagctattaaagcaggggtccaacccgcacgagagtgatcctctgcagggctccgcagcgttaagcccaaggagccccgcactgccgccagtgtgggatgtctcggcttctgctaaaggggtgtcaatgccaccgaattcttacatgcctggctatagtcactggtatagttccccccatcaggacaccatgcagagaccacagatgatgtag

SEQ ID NO: 154083 - DNA, 798 bp, Artificial Sequence
  derived and/or modified sequence
atgatgaccatgaccacgatggcagacggcctggaaggtcaggattcttctaagtctgccttcatggaatttggccagcagcaacagcagcagcatagtcccgcgatggcaggggcgcattacccactgcactgcctacactctgccgcagccgccgcagcagcaggctcccaccaccaccatcaccaccagcatcaccatcacggtagtccatatgcctccggcggtggcaatagctataatcacaggtcgctggccgcctatccatatatgagccacagccagcactcaccatatctccaatcataccataattcttccgctgccgctcagactcgaggcgacgacacagaccagcagaagacaacagtcatcgagaatggagaaatcagatttaacggcaagggaaagaagatacgaaagccacgtacaatatacagttctttacaactgcaggctctcaaccatagattccaacaaacacaatacttagctcttcctgaacgagccgagttggccgccagccttggattgactcagacccaagttaagatctggttccagaacaaaagaagtaaattcaagaagcttctgaaacagggatcaaacccccacgagtctgaccccctgcaggggagcgccgcactgtccccaagaagtcccgccttacctccagtctgggacgtatcagcctctgctaagggggtttccatgcctccaaatagctatatgccaggatattcacattggtattctagcccacatcaagacaccatgcagcggcctcagatgatgtag

SEQ ID NO: 154084 - DNA, 798 bp, Artificial Sequence
  derived and/or modified sequence
atgatgaccatgactacaatggcagatggacttgaaggtcaagatagctctaaatctgcttttatggagtttggacagcaacagcagcaacagcactctcctgcgatggcaggtgcacattaccctctgcactgtctgcattctgcagctgccgcagccgccgcagggtctcaccaccatcatcaccaccaacatcatcatcatggctcaccttatgcttccggaggtggtaattcctataaccaccggtccctggcagcctatccatacatgtcacactcacagcacagtccttacctgcaatcataccataattcttccgctgccgctcagactcgaggcgacgacacagaccagcagaagacaacagtcatcgagaatggagaaatcagatttaacggcaagggaaagaagatacgaaagccacgtacaatatacagttctttacaactgcaggctctcaaccatagattccaacaaacacaatacttagctcttcctgaacgagccgagttggccgccagccttggattgactcagacccaagttaagatctggttccagaacaaaagaagtaaattcaagaagcttctgaaacagggttctaatcctcacgagtcagaccctctacagggaagcgcagccctctctccaaggtccccagcacttccacccgtatgggatgtttccgccagtgccaaaggagtgtcgatgccccccaactcatatatgcccggctacagccactggtacagttcaccccatcaggacactatgcagcggcctcagatgatgtag

SEQ ID NO: 154085 - DNA, 798 bp, Artificial Sequence
  derived and/or modified sequence
atgatgaccatgaccaccatggccgacggcctggagggccaggacagcagcaagagcgccttcatggagttcggccagcagcagcagcagcagcacagccccgccatggccggcgcccactaccccctgcactgcctgcacagcgccgccgccgccgccgccgccggcagccaccaccaccaccaccaccagcaccaccaccacggcagcccctacgccagcggcggcggcaacagctacaaccacagaagcctggccgcctacccctacatgagccacagccagcacagcccctacctgcagagctaccacaacagcagcgccgccgcccagaccagaggcgacgacaccgaccagcagaagaccaccgtgatcgagaacggcgagatcagattcaacggcaagggcaagaagatcagaaagcccagaaccatctacagcagcctgcagctgcaggccctgaaccacagattccagcagacccagtacctggccctgcccgagagagccgagctggccgccagcctgggcctgacccagacccaggtgaagatctggttccagaacaagagaagcaagttcaagaagctgctgaagcagggcagcaacccccacgagagcgaccccctgcagggcagcgccgccctgagccccagaagccccgccctgccccccgtgtgggacgtgagcgccagcgccaagggcgtgagcatgccccccaacagctacatgcccggctacagccactggtacagcagcccccaccaggacaccatgcagagaccccagatgatgtag

SEQ ID NO: 154086 - DNA, 882 bp, Artificial Sequence
  derived and/or modified sequence
atgatgaccatgaccaccatggccgacggcctggagggccaggacagcagcaagagcgccttcatggagttcggccagcagcagcagcagcagcagcagcagcagcagcagcagcagcagcagcagcagcagccccccccccccccccccccccccccccagccccacagccagcagagcagccccgccatggccggcgcccactaccccctgcactgcctgcacagcgccgccgccgccgccgccgccggcagccaccaccaccaccaccaccagcaccaccaccacggcagcccctacgccagcggcggcggcaacagctacaaccacagaagcctggccgcctacccctacatgagccacagccagcacagcccctacctgcagagctaccacaacagcagcgccgccgcccagaccagaggcgacgacaccgaccagcagaagaccaccgtgatcgagaacggcgagatcagattcaacggcaagggcaagaagatcagaaagcccagaaccatctacagcagcctgcagctgcaggccctgaaccacagattccagcagacccagtacctggccctgcccgagagagccgagctggccgccagcctgggcctgacccagacccaggtgaagatctggttccagaacaagagaagcaagttcaagaagctgctgaagcagggcagcaacccccacgagagcgaccccctgcagggcagcgccgccctgagccccagaagccccgccctgccccccgtgtgggacgtgagcgccagcgccaagggcgtgagcatgccccccaacagctacatgcccggctacagccactggtacagcagcccccaccaggacaccatgcagagaccccagatgatgtag

SEQ ID NO: 154087 - DNA, 1790 bp, Artificial Sequence
  derived and/or modified sequence
atgatgaccatgactacgatggctgacggcttggaaggccaggactcgtccaaatccgccttcatggagttcgggcagcagcagcagcagcagcactccccggccatggcaggcgcgcactaccctctgcactgcctgcactcggcggcggcggcggcagcggccggctcgcaccaccaccaccaccaccagcaccaccaccacggctcgccctacgcgtcgggcggagggaactcctacaaccaccgctcgctcgccgcctacccctacatgagccactcgcagcacagcccttacctccagtcctaccacaacagcagcgcagccgcccagacgcgaggggacgacacagatcaacaaaaaactacagtgattgaaaacggggaaatcaggttcaatggaaaagggaaaaagattcggaagcctcggaccatttattccagcctgcagctccaggctttaaaccatcgctttcagcagacacagtatctggcccttccagagagagccgaactggcagcttccttaggactgacacaaacacaggtgaagatatggtttcagaacaaacgctctaagtttaagaaactgctgaagcagggcagtaatcctcatgagagcgaccccctccagggctcggcggccctgtcgccacgctcgccagcgctgcctccagtctgggacgtttctgcctcggccaagggtgtcagtatgccccccaacagctacatgcctggctattctcactggtactcctctccacaccaggacacgatgcagagaccacagatgatgtgagttgcccaagggaacaccctagggaaacgtctgaacaaggaaaagaggatccgggacctgcttgtatctgcgaaaaggagccaaaggagcaggcttaggagagctcataagtgtggcaagaagccgactaggctcattctctctccctctctctctctctccctctcctttctttttacttcttcctttcctccattccttctttctttccttttcctttctacctttcttttctttttgcctttcaccttttttctcatttaccttctctcttgagcaacgtcagtaattgatcttgcatctcagagagagagaaagagcatgtgtgagagagaaactggtttctatgccagcactcctgaaaccccttactgtaaggatattttctcttaccccttgggatccaggctctgagtctcttctctttgggagtatccatcaaaatgactttttttaaaaacagattttcccccaaccagaagaatctgcacaaacttggcagcgtttttacttgtttaatgagtttaagacattacatggtgaaagagaagcattttggactcctgcatttttatttaccattcccagactgacgagaaaaagaaaattcctcacataacagcccttctctaaagaaaaaggaaaaagtggctgtaagattagaacattgctacaaagggaatgctgcatgttttatcaaaatgcaatgaccaggaatgatggttgattaaaaaaaaacaaaacaaaaaccactctttccccaccccacccccccaaaccctgaactggaatcaggaaagacggaggaaacaatcaaaatcaccattctattgctttgacacctttactaggtgaattggtggcattcacaaagctaatagggacgtttatatcaagaaacatttctgtatatattgttgaattttagttgtacatatactttgtatgtttttgtcttctttcatatatggagtaaaagccacaaaacgctg

SEQ ID NO: 154088 - DNA, 2304 bp, Artificial Sequence
  derived and/or modified sequence
aaaccattcgactcgtggcgtctgcatcaagtctgaaagcagacgcgcaactttcgcagaatccaccttaaaatctctgccttaaactgcaccagcccccaaaaaatccaaggggggaaagcaggcggggggagagcagattcccccctccccctctcctctcccatccctcctccttcctcctccctttgagttaacaaggccccgctcactatatctctttatattaaatatatatatatattagagaagagcgagggagagggagaaccacctccacccccctctttaaattcttttttttttttttttttttttttgcaaggatccaaagagctaaggtggctgcagaggggagagcggcgcgagccaagtgggggagggtggaggaaacccgggagaaggctttctccagcccccaaagtttttgatgatgaccatgactacgatggctgacggcttggaaggccaggactcgtccaaatccgccttcatggagttcgggcagcagcagcagcagcagcagcaacagcagcagcagcagcagcagcaacagcaacagccgccgccgccgccgccgccgccgccgcagccgcactcgcagcagagctccccggccatggcaggcgcgcactaccctctgcactgcctgcactcggcggcggcggcggcagcggccggctcgcaccaccaccaccaccaccagcaccaccaccacggctcgccctacgcgtcgggcggagggaactcctacaaccaccgctcgctcgccgcctacccctacatgagccactcgcagcacagcccttacctccagtcctaccacaacagcagcgcagccgcccagacgcgaggggacgacacagatcaacaaaaaactacagtgattgaaaacggggaaatcaggttcaatggaaaagggaaaaagattcggaagcctcggaccatttattccagcctgcagctccaggctttaaaccatcgctttcagcagacacagtatctggcccttccagagagagccgaactggcagcttccttaggactgacacaaacacaggtgaagatatggtttcagaacaaacgctctaagtttaagaaactgctgaagcagggcagtaatcctcatgagagcgaccccctccagggctcggcggccctgtcgccacgctcgccagcgctgcctccagtctgggacgtttctgcctcggccaagggtgtcagtatgccccccaacagctacatgcctggctattctcactggtactcctctccacaccaggacacgatgcagagaccacagatgatgtgagttgcccaagggaacaccctagggaaacgtctgaacaaggaaaagaggatccgggacctgcttgtatctgcgaaaaggagccaaaggagcaggcttaggagagctcataagtgtggcaagaagccgactaggctcattctctctccctctctctctctctccctctcctttctttttacttcttcctttcctccattccttctttctttccttttcctttctacctttcttttctttttgcctttcaccttttttctcatttaccttctctcttgagcaacgtcagtaattgatcttgcatctcagagagagagaaagagcatgtgtgagagagaaactggtttctatgccagcactcctgaaaccccttactgtaaggatattttctcttaccccttgggatccaggctctgagtctcttctctttgggagtatccatcaaaatgactttttttaaaaacagattttcccccaaccagaagaatctgcacaaacttggcagcgtttttacttgtttaatgagtttaagacattacatggtgaaagagaagcattttggactcctgcatttttatttaccattcccagactgacgagaaaaagaaaattcctcacataacagcccttctctaaagaaaaaggaaaaagtggctgtaagattagaacattgctacaaagggaatgctgcatgttttatcaaaatgcaatgaccaggaatgatggttgattaaaaaaaaacaaaacaaaaaccactctttccccaccccacccccccaaaccctgaactggaatcaggaaagacggaggaaacaatcaaaatcaccattctattgctttgacacctttactaggtgaattggtggcattcacaaagctaatagggacgtttatatcaagaaacatttctgtatatattgttgaattttagttgtacatatactttgtatgtttttgtcttctttcatatatggagtaaaagccacaaaacgctg

SEQ ID NO: 154089 - protein, 593 aa, Artificial Sequence
  derived and/or modified sequence
MKLQAVMETLLQRQQRARQELEARQQLPPDPPAAPPGRARAAPDEDREPESARMQRAQMAALAAMRAAAAGLGHPASPGGSEDGPPGSEEEDAAREGTPGSPGRGREGPGEEHFEDMASDEDMKPKWEEEEMEEDLGEDEEEEEEDYEDEEEEEDEEGLGPPGPASLGTTALFPRKAQPPQAFRGDGVPRVLGGQERPGPGPAHPGGAAHVAPQLQPPDHGDWTYEEQFKQLYELDGDPKRKEFLDDLFSFMQKRGTPVNRIPIMAKQVLDLFMLYVLVTEKGGLVEVINKKLWREITKGLNLPTSITSAAFTLRTQYMKYLYPYECEKRGLSNPNELQAAIDSNRREGRRQSFGGSLFAYSPGGAHGMLSSPKLPVSSLGLAASTNGSSITPAPKIKKEEDSAIPITVPGRLPVSLAGHPVVAAQAAAVQAAAAQAAVAAQAAALEQLREKLESAEPPEKKMALVADEQQRLMQRALQQNFLAMAAQLPMSIRINSQASESRQDSAVNLTGTNGSNSISMSVEINGIMYTGVLFAQPPAPTPTSAPNKGGGGGGGSSSNAGGRGGNTGTSGGQAGPAGLSTPSTSTSNNSLP

SEQ ID NO: 154090 - DNA, 2823 bp, Artificial Sequence
  derived and/or modified sequence
acgcggacgcggctggcggctcggtttctgcaaatgcgtgaatgagccggatgccagcctctgtcccctggagcccagcgtgaggaagaggcatgccccatcagccttcagcttgagcccggcggcccccgcccccgccccctgccaccctgcactgccccggctcccccgcggcccccacgctgcagtgcggccgggccccctccccgcaggggccgcccccgccgcccacccctagcgcccgtggtggtggtggtggtggtggtggtggtggcccgggccgcagggccatgaaactacaggccgtgatggagacgctgttgcagcggcagcagcgggcgcgccaggagctggaggcccggcagcagctgccccccgatccccctgctgcaccccccggccgggcccgggctgcccccgacgaggacagagagcccgagagtgcccggatgcagcgggctcagatggccgcactggcagccatgcgggctgcagctgcgggcctgggacacccagccagccccggcggctctgaggatgggcccccaggctcggaggaggaggacgcggcccgggaggggacaccgggctcacccgggcgaggcagagaagggccaggagaggagcactttgaggacatggcctccgacgaggacatgaagcccaaatgggaggaggaggagatggaggaagacctcggggaggatgaggaggaggaggaggaggattacgaggatgaggaggaggaggaggacgaggaggggctgggccccccaggccctgccagcttgggcaccacggcactgttcccccgaaaggcccagccaccccaggccttccgcggcgatggcgttcccagggtgctggggggccaggagcggccggggcctggccctgcccaccccggaggggccgcccacgtagccccgcagctgcagccgcctgaccacggcgactggacttacgaggagcagtttaagcagctctacgaactcgacggggaccccaagaggaaggaattcctggatgacttgttcagcttcatgcagaagcgagggacacctgtgaaccgcatccccatcatggccaaacaggtccttgacctgttcatgctgtacgtgctggtgacggagaagggcggcctcgtggaggtcatcaacaagaagctgtggcgtgagatcaccaagggcctcaacctgcccacgtccatcaccagtgcagccttcaccctgcggacccaatacatgaagtacctgtacccctacgagtgtgagaagcggggcctcagtaaccccaatgagctccaggcagccatagacagcaaccgacgggagggccggcgccagagctttggtggctccctctttgcctactcgccaggcggggcacacggcatgctctcctcacccaagctacccgtgtcctccctgggcctggccgcaagcaccaatggcagctccatcacccccgcccctaagatcaagaaagaggaggactcagccatccccatcacagtccctggccgcctgcctgtgtccctggcgggccaccctgtggtggcagcccaggcagcagctgtgcaagcagcagccgcccaagcagctgtggccgcacaggcagctgccctggaacagctgcgggagaagctggagtctgcagagcctccggagaagaagatggccctggtggccgatgagcagcaacggctgatgcaacgtgcactccagcagaacttcctggccatggcggcccagctgcccatgagcattcggatcaacagccaagcctccgaaagccgccaggactctgctgtgaacctgacgggcaccaacggcagcaacagcatcagcatgtcggtggagatcaacggcatcatgtacacaggagttctgtttgctcagccgccggcccccacgccaacctctgctcccaacaaaggaggcggcggcggcggcggcagcagcagcaacgcaggcggccggggaggaaacaccggaaccagcggcggccaggctgggccagcggggctgtccacaccctccacatctacctcaaataactcgttgccttaaccgcatcactccccacccgccacccaccctggagcccgccggcctgggcagggggtccaggtgggccacacaggggccaggatggcggaagatacgggtggggagggaagatatccagaaaggagccacagctgacgccaaaaagaaaagaaaaaagatatatatatatatatatatatatacacgtatatatataaagagaatttaataaaacaggggaaaaccaaggaacacttgaatttctcaggttttggacattcagagagatgaattgtgagaacagcaaagaaatccatcagaaaaacagaaagaggcagacgtttcccagggcgttcaggcagccctgatggaccgaaggctctggtgtctggtttggccccacagcagtgtgggccgatcctgtttacctcatacatccctgcactgtgtgttttcatttttgtctgctttagttctcttttattttctattcaccacacactcaccactcccagcttctcgtgtccagtgaaacccctgaaccaagatcactgaatttttgtttttttcttgttgctttgggaaatttttttttctctgtagggtttttaagaggtttcgggggttttgttgtgtaaatattctattttattcttggggggatcaaaccttaggaaaaggatatctatatatctatatagctatatatttgtgttccttcagggaaactggtcttgaaaaagcaagaaaaaaaagcaaaaaaaaaaaaaaa

SEQ ID NO: 154091 - DNA, 1782 bp, Artificial Sequence
  derived and/or modified sequence
atgaagctgcaggcagtgatggaaaccctgctgcaaaggcaacagagggccagacaggagctggaagctcgacagcaactgcctccagaccctccagctgcccccccaggacgcgctcgggcagcacccgatgaagaccgagagcctgagtccgccaggatgcagagggctcagatggcagctctcgcagccatgcgcgccgctgcagctggcctcggacaccctgccagtcctgggggttccgaggatggcccccctggtagcgaggaggaggacgctgccagggagggcacgccgggcagtcctggccgcggcagagaaggaccaggcgaggagcatttcgaggatatggccagcgacgaggatatgaagcctaagtgggaggaggaggagatggaggaagaccttggcgaagacgaagaagaggaagaggaagactacgaggacgaagaagaagaggaggatgaggaaggactgggaccaccgggacctgcaagcctgggcaccaccgccctgtttcctaggaaggcccagccgcctcaggccttccgcggagacggggtaccgcgtgtccttggaggtcaggaacgtccaggccccgggccagcgcaccctgggggggcagcccatgtcgctcctcaactgcagccccctgatcatggtgactggacatatgaagagcaattcaagcaattatacgagctggatggtgaccctaagcgcaaagaattcctggacgacctgttctccttcatgcagaaaagaggaacacccgtaaatcgaattccgattatggcaaaacaggtcctggacttgtttatgctttatgtgctggtgacagaaaaggggggcctggttgaggtaataaataagaaactgtggagggaaattacaaaaggccttaatcttccgacctccatcaccagcgccgcgtttacattacgtactcagtacatgaagtacctgtatccctacgaatgtgaaaagcgtggattatcgaaccccaatgagttgcaagccgctatcgatagcaacagacgcgagggcagaagacagtctttcggaggctccttgttcgcatattctcctgggggcgctcacgggatgctgtcaagtcccaagctcccagtgtcgtcactcggtctcgccgcatcaactaatggtagcagcattacgccagctcctaagattaagaaggaagaagatagtgccatcccaatcaccgtgcccggcaggctgccagttagtcttgcaggacacccagtggtcgccgctcaggctgccgcagtgcaggcggctgctgcccaggccgccgtggcagcccaagccgctgctcttgaacagctgagggagaaactggagtcagccgagcctcccgagaagaaaatggcattagtcgccgatgaacaacaacggctaatgcagagagcactgcagcagaatttcctggccatggcggctcagttgccaatgtctatcaggattaatagtcaggcctcagagtccagacaggactcagccgtaaacttgacaggcacaaatggctccaactccatatctatgagtgtcgagatcaatggtataatgtacacaggtgttttgtttgcccagccacccgcccccactccaaccagcgccccaaacaagggtggtgggggagggggcgggagcagctcaaatgcaggggggagaggaggtaacactggcacttccggtggacaggctggtcccgccggactgtccaccccgtctacttccacatcaaacaattctttgccgtag

SEQ ID NO: 154092 - DNA, 1782 bp, Artificial Sequence
  derived and/or modified sequence
atgaagctgcaggccgtgatggagaccctgctgcagaggcagcagagggcccggcaggagctggaggcccggcagcagctgcccccagaccccccagctgcccctcctggccgggcccgggccgccccagatgaagatcgggagcctgagagcgccaggatgcagagggcccagatggccgccctggccgccatgagagctgctgctgctggcctgggccacccagccagccctgggggctctgaagatggccccccaggcagcgaggaggaggatgctgcccgggagggcaccccaggcagccctggccggggccgggagggccctggagaggagcactttgaggacatggccagtgatgaggacatgaagcccaagtgggaggaggaggagatggaggaggacctgggggaggatgaggaggaggaggaggaggactatgaagatgaggaggaggaggaggatgaggagggcctgggccccccaggccctgccagcctgggcaccacagccctcttccccaggaaggcccagcccccccaggccttcagaggagatggagtgccccgggtgctgggcggccaggagcggcccggccctggccctgcccaccctggaggagctgcccacgtggccccccagctgcagcccccagaccacggggactggacctatgaggagcagttcaagcagctgtatgagctggatggagaccccaagaggaaggagttcctggatgacctcttctccttcatgcagaagaggggcacccctgtgaaccgcatccccatcatggccaagcaggtgctggacctcttcatgctgtatgtgctggtgacagagaagggcggcctggtggaggtgatcaacaagaagctgtggagggagatcaccaagggcctgaacctgcccaccagcatcaccagcgctgccttcaccctgcggacccagtacatgaagtacctgtacccctatgaatgtgagaagaggggcctgagcaaccccaatgagctgcaggccgccatcgacagcaacagaagagagggccggcggcagagctttggaggcagcctgtttgcctacagccctggaggagcccacggcatgctgagcagccccaagctgcctgtgagcagcctgggcctggccgccagcaccaacggcagcagcatcaccccagcccccaagatcaagaaggaggaggacagcgccatccccatcaccgtgcccggccgcctgcctgtgtccctggccggccaccctgtggtggccgcccaggccgctgctgtgcaggccgccgccgcccaggccgctgtggccgcccaggccgccgccctggagcagctgcgggagaagctggagagcgctgagcccccagagaagaagatggccctggtggctgatgagcagcagaggctgatgcagagggccctgcagcagaacttcctggccatggccgcccagctgcccatgagcatccgcatcaacagccaggccagcgagagccggcaggacagcgctgtgaacctgaccggcaccaacggcagcaacagcatctccatgtctgtggagatcaatggcatcatgtacacaggagtgctgtttgcccagcccccagcccccacccccaccagcgcccccaacaagggcggcggcggcggcggcggcagcagcagcaatgccggcggccggggcggcaacacaggcaccagcggcggccaggccggccctgctggcctgagcacccccagcaccagcaccagcaacaacagcctgccctag

SEQ ID NO: 154093 - DNA, 1782 bp, Artificial Sequence
  derived and/or modified sequence
atgaagctgcaggccgtgatggagaccctgctgcagcggcagcagagagcgagacaggagctcgaagcccgccagcagctgcctcccgaccctcccgctgctccacccggccgtgcccgagcagctcctgatgaagacagggagcccgagtccgcaaggatgcaaagagcccagatggcagcccttgcagccatgagagcggccgctgcaggcctggggcaccccgcgagtccaggaggatctgaagacggtccccctggtagtgaggaagaagatgcagctagggagggtaccccaggatcccctggtagggggcgagaaggccccggcgaggaacacttcgaggatatggccagcgatgaggatatgaagcccaaatgggaggaagaggagatggaagaggacttgggcgaggatgaggaggaagaggaagaagactacgaggacgaggaggaagaggaagacgaagagggcctaggaccacccggccccgcaagtctgggcactacagcgctgttcccccggaaagcccagcccccccaagctttccgaggggatggggtgccgcgggtgttgggaggccaggaacgccctggtccgggacctgctcaccctggcggtgccgctcatgtcgctcctcagctccagcccccagatcacggcgactggacatatgaggaacaattcaaacagctgtacgaactggacggagaccctaaaaggaaagagtttttggatgatctgttctcgttcatgcagaaaagagggaccccagtaaaccggatacccattatggccaaacaggttcttgaccttttcatgctgtacgtgctcgtcactgaaaagggaggtctggtagaggtgattaacaaaaagttgtggagggagataacaaaagggctcaatctccccacttccataacaagcgccgcctttactctgcgaacccagtatatgaagtacttgtacccttacgagtgcgaaaaaaggggactttctaatccaaacgagctccaggcggccatcgactcaaatagacgggagggtcggaggcaaagcttcggtgggtctcttttcgcctactcccctggaggggctcacggaatgctgtcctccccaaagctgcccgtttcgtccctgggactcgccgctagtactaacgggtcctctatcacacccgccccgaagatcaagaaagaggaggatagcgcgattccaataacggttcccggccgcctgcctgtgtctctcgccgggcaccccgtagttgcagctcaagcagcagctgtccaggctgccgcagctcaggctgccgtggccgcacaggccgctgctctcgagcagctccgcgaaaagctcgaatctgcagagccccctgagaaaaagatggccctggtggcagatgagcagcagcgcctaatgcagcgggccctccaacagaattttttggctatggccgcccagttgcctatgtcaatcaggatcaacagccaagcatcagaaagccgccaggatagcgctgtgaatctgactggaaccaacggctctaactctataagtatgagtgtggaaatcaacggaataatgtacacaggcgtcctattcgctcagccgcctgcaccaactcccacctctgccccgaataaaggtggaggcgggggaggtgggtcgtcatcaaacgctggcgggcgcggcgggaacacaggaacatccggaggtcaagccggacccgccggcctttcaaccccttccactagcacctctaataatagccttccctag

SEQ ID NO: 154094 - DNA, 1782 bp, Artificial Sequence
  derived and/or modified sequence
atgaagctccaagccgtgatggagacactcctgcaacgccaacaaagggcaaggcaggaattagaggctaggcaacagttaccacccgaccctcccgctgcgcctcctggccgagccagggcagcccctgatgaggaccgagagcccgaatccgcacggatgcagagagcacaaatggctgcattggccgctatgcgggcagcggctgctggactcggccatccggctagcccaggaggttccgaggacggccctccgggttctgaagaggaggacgccgcaagagaggggacccctggatcgccagggagggggcgagaagggcctggtgaagaacacttcgaggacatggcgagcgatgaggacatgaaacccaaatgggaagaggaggagatggaagaagacctcggagaggacgaagaagaagaggaggaagactacgaggatgaggaggaggaggaggatgaagagggacttggtccaccaggcccagcctctcttggaaccactgccctatttccaaggaaagcacaaccaccccaagctttccgcggtgacggggtgcctagagtgctgggcggacaggagcggccaggccctggtcccgctcaccccggaggcgcagcgcacgttgcaccccaactacaacccccagatcatggagattggacttatgaagagcagttcaaacaactctatgaactggacggcgaccccaagcgcaaggaattcctcgatgatcttttctctttcatgcagaaacgtggaactcctgttaatcgtatcccaattatggccaagcaggtcctcgatctgttcatgctgtatgtgctcgtgaccgaaaagggtggcttggtagaggttataaataagaagctgtggagggagataaccaagggcttgaacttacccacgagcatcacgagtgcagccttcacactgcgaacacaatacatgaagtatttatacccatatgagtgcgagaagagaggcctgtcgaatcccaatgaattgcaggcagccatcgactctaacagacgagaaggacggagacagagttttggagggtctctattcgcgtactccccagggggtgcacatgggatgttgagctcccctaagctccccgtgtctagcctgggtctggccgcttcaaccaatggatcaagcatcactcccgctcctaagattaagaaagaggaagactcagccattccaatcactgtgcctggcagactgcctgttagtctcgcaggccatcccgttgtcgccgcacaggcagctgcagtgcaagcggctgcagcccaggccgctgtagcggcacaggccgctgctctcgagcagcttagagaaaaattggagtccgctgagcctcccgaaaaaaagatggcactggtcgccgacgagcaacaaagactgatgcagcgcgcactccagcagaacttcctggctatggccgctcagcttcccatgtcgattcgcattaattctcaggcatctgagagtagacaggacagcgcagtgaacctcacaggtaccaacggctccaacagtatctccatgtccgtcgaaattaacggaattatgtatactggagtgctcttcgcccagcctccagcaccaacacctaccagtgcacccaataagggagggggtggcggaggagggagttctagcaatgccggtgggaggggaggtaatacggggactagcgggggacaagcaggtccagctggcctttctaccccatctacctctacctccaataactcattaccttag

SEQ ID NO: 154095 - DNA, 2788 bp, Artificial Sequence
  derived and/or modified sequence
acgcggacgcggctggcggctcggtttctgcaaatgcgtgaatgagccggatgccagcctctgtcccctggagcccagcgtgaggaagaggcatgccccatcagccttcagcttgagcccggcggcccccgcccccgccccctgccaccctgcactgccccggctcccccgcggcccccacgctgcagtgcggccgggccccctccccgcaggggccgcccccgccgcccacccctagcgcccgtggtggtggtggtggtggtggtggtggtggcccgggccgcagggccatgaaactacaggccgtgatggagacgctgttgcagcggcagcagcgggcgcgccaggagctggaggcccggcagcagctgccccccgatccccctgctgcaccccccggccgggcccgggctgcccccgacgaggacagagagcccgagagtgcccggatgcagcgggctcagatggccgcactggcagccatgcgggctgcagctgcgggcctgggacacccagccagccccggcggctctgaggatgggcccccaggctcggaggaggaggacgcggcccgggaggggacaccgggctcacccgggcgaggcagagaagggccaggagaggagcactttgaggacatggcctccgacgaggacatgaagcccaaatgggaggaggaggagatggaggaagacctcggggaggatgaggaggaggaggaggaggattacgaggatgaggaggaggaggaggacgaggaggggctgggccccccaggccctgccagcttgggcaccacggcactgttcccccgaaaggcccagccaccccaggccttccgcggcgatggcgttcccagggtgctggggggccaggagcggccggggcctggccctgcccaccccggaggggccgcccacgtagccccgcagctgcagccgcctgaccacggcgactggacttacgaggagcagtttaagcagctctacgaactcgacggggaccccaagaggaaggaattcctggatgacttgttcagcttcatgcagaagcgagggacacctgtgaaccgcatccccatcatggccaaacaggtccttgacctgttcatgctgtacgtgctggtgacggagaagggcggcctcgtggaggtcatcaacaagaagctgtggcgtgagatcaccaagggcctcaacctgcccacgtccatcaccagtgcagccttcaccctgcggacccaatacatgaagtacctgtacccctacgagtgtgagaagcggggcctcagtaaccccaatgagctccaggcagccatagacagcaaccgacgggagggccggcgccagagctttggtggctccctctttgcctactcgccaggcggggcacacggcatgctctcctcacccaagctacccgtgtcctccctgggcctggccgcaagcaccaatggcagctccatcacccccgcccctaagatcaagaaagaggaggactcagccatccccatcacagtccctggccgcctgcctgtgtccctggcgggccaccctgtggtggcagcccaggcagcagctgtgcaagcagcagccgcccaagcagctgtggccgcacaggcagctgccctggaacagctgcgggagaagctggagtctgcagagcctccggagaagaagatggccctggtggccgatgagcagcaacggctgatgcaacgtgcactccagcagaacttcctggccatggcggcccagctgcccatgagcattcggatcaacagccaagcctccgaaagccgccaggactctgctgtgaacctgacgggcaccaacggcagcaacagcatcagcatgtcggtggagatcaacggcatcatgtacacaggagttctgtttgctcagccgccggcccccacgccaacctctgctcccaacaaaggaggcggcggcggcggcggcagcagcagcaacgcaggcggccggggaggaaacaccggaaccagcggcggccaggctgggccagcggggctgtccacaccctccacatctacctcaaataactcgttgccttaaccgcatcactccccacccgccacccaccctggagcccgccggcctgggcagggggtccaggtgggccacacaggggccaggatggcggaagatacgggtggggagggaagatatccagaaaggagccacagctgacgccaaaaagaaaagaaaaaagatatatatatatatatatatatatacacgtatatatataaagagaatttaataaaacaggggaaaaccaaggaacacttgaatttctcaggttttggacattcagagagatgaattgtgagaacagcaaagaaatccatcagaaaaacagaaagaggcagacgtttcccagggcgttcaggcagccctgatggaccgaaggctctggtgtctggtttggccccacagcagtgtgggccgatcctgtttacctcatacatccctgcactgtgtgttttcatttttgtctgctttagttctcttttattttctattcaccacacactcaccactcccagcttctcgtgtccagtgaaacccctgaaccaagatcactgaatttttgtttttttcttgttgctttgggaaatttttttttctctgtagggtttttaagaggtttcgggggttttgttgtgtaaatattctattttattcttggggggatcaaaccttaggaaaaggatatctatatatctatatagctatatatttgtgttccttcagggaaactggtcttg

SEQ ID NO: 154096 - DNA, 1782 bp, Artificial Sequence
  derived and/or modified sequence
atgaagctgcaggccgtgatggagaccctgctgcagagacagcagagagccagacaggagctggaggccagacagcagctgccccccgacccccccgccgccccccccggcagagccagagccgcccccgacgaggacagagagcccgagagcgccagaatgcagagagcccagatggccgccctggccgccatgagagccgccgccgccggcctgggccaccccgccagccccggcggcagcgaggacggcccccccggcagcgaggaggaggacgccgccagagagggcacccccggcagccccggcagaggcagagagggccccggcgaggagcacttcgaggacatggccagcgacgaggacatgaagcccaagtgggaggaggaggagatggaggaggacctgggcgaggacgaggaggaggaggaggaggactacgaggacgaggaggaggaggaggacgaggagggcctgggcccccccggccccgccagcctgggcaccaccgccctgttccccagaaaggcccagcccccccaggccttcagaggcgacggcgtgcccagagtgctgggcggccaggagagacccggccccggccccgcccaccccggcggcgccgcccacgtggccccccagctgcagccccccgaccacggcgactggacctacgaggagcagttcaagcagctgtacgagctggacggcgaccccaagagaaaggagttcctggacgacctgttcagcttcatgcagaagagaggcacccccgtgaacagaatccccatcatggccaagcaggtgctggacctgttcatgctgtacgtgctggtgaccgagaagggcggcctggtggaggtgatcaacaagaagctgtggagagagatcaccaagggcctgaacctgcccaccagcatcaccagcgccgccttcaccctgagaacccagtacatgaagtacctgtacccctacgagtgcgagaagagaggcctgagcaaccccaacgagctgcaggccgccatcgacagcaacagaagagagggcagaagacagagcttcggcggcagcctgttcgcctacagccccggcggcgcccacggcatgctgagcagccccaagctgcccgtgagcagcctgggcctggccgccagcaccaacggcagcagcatcacccccgcccccaagatcaagaaggaggaggacagcgccatccccatcaccgtgcccggcagactgcccgtgagcctggccggccaccccgtggtggccgcccaggccgccgccgtgcaggccgccgccgcccaggccgccgtggccgcccaggccgccgccctggagcagctgagagagaagctggagagcgccgagccccccgagaagaagatggccctggtggccgacgagcagcagagactgatgcagagagccctgcagcagaacttcctggccatggccgcccagctgcccatgagcatcagaatcaacagccaggccagcgagagcagacaggacagcgccgtgaacctgaccggcaccaacggcagcaacagcatcagcatgagcgtggagatcaacggcatcatgtacaccggcgtgctgttcgcccagccccccgcccccacccccaccagcgcccccaacaagggcggcggcggcggcggcggcagcagcagcaacgccggcggcagaggcggcaacaccggcaccagcggcggccaggccggccccgccggcctgagcacccccagcaccagcaccagcaacaacagcctgccctag

SEQ ID NO: 154097 - protein, 437 aa, Artificial Sequence
  derived and/or modified sequence
MALAGAPAGGPCAPALEALLGAGALRLLDSSQIVIISAAQDASAPPAPTGPAAPAAGPCDPDLLLFATPQAPRPTPSAPRPALGRPPVKRRLDLETDHQYLAESSGPARGRGRHPGKGVKSPGEKSRYETSLNLTTKRFLELLSHSADGVVDLNWAAEVLKVQKRRIYDITNVLEGIQLIAKKSKNHIQWLGSHTTVGVGGRLEGLTQDLRQLQESEQQLDHLMNICTTQLRLLSEDTDSQRLAYVTCQDLRSIADPAEQMVMVIKAPPETQLQAVDSSENFQISLKSKQGPIDVFLCPEETVGGISPGKTPSQEVTSEEENRATDSATIVSPPPSSPPSSLTTDPSQSLLSLEQEPLLSRMGSLRAPVDEDRLSPLVAADSLLEHVREDFSGLLPEEFISLSPPHEALDYHFGLEEGEGIRDLFDCDFGDLTPLDF

SEQ ID NO: 154098 - DNA, 2722 bp, Artificial Sequence
  derived and/or modified sequence
ttggcgcgtaaaagtggccgggactttgcaggcagcggcggccgggggcggagcgggatcgagccctcgccgaggcctgccgccatgggcccgcgccgccgccgccgcctgtcacccgggccgcgcgggccgtgagcgtcatggccttggccggggcccctgcgggcggcccatgcgcgccggcgctggaggccctgctcggggccggcgcgctgcggctgctcgactcctcgcagatcgtcatcatctccgccgcgcaggacgccagcgccccgccggctcccaccggccccgcggcgcccgccgccggcccctgcgaccctgacctgctgctcttcgccacaccgcaggcgccccggcccacacccagtgcgccgcggcccgcgctcggccgcccgccggtgaagcggaggctggacctggaaactgaccatcagtacctggccgagagcagtgggccagctcggggcagaggccgccatccaggaaaaggtgtgaaatccccgggggagaagtcacgctatgagacctcactgaatctgaccaccaagcgcttcctggagctgctgagccactcggctgacggtgtcgtcgacctgaactgggctgccgaggtgctgaaggtgcagaagcggcgcatctatgacatcaccaacgtccttgagggcatccagctcattgccaagaagtccaagaaccacatccagtggctgggcagccacaccacagtgggcgtcggcggacggcttgaggggttgacccaggacctccgacagctgcaggagagcgagcagcagctggaccacctgatgaatatctgtactacgcagctgcgcctgctctccgaggacactgacagccagcgcctggcctacgtgacgtgtcaggaccttcgtagcattgcagaccctgcagagcagatggttatggtgatcaaagcccctcctgagacccagctccaagccgtggactcttcggagaactttcagatctcccttaagagcaaacaaggcccgatcgatgttttcctgtgccctgaggagaccgtaggtgggatcagccctgggaagaccccatcccaggaggtcacttctgaggaggagaacagggccactgactctgccaccatagtgtcaccaccaccatcatctcccccctcatccctcaccacagatcccagccagtctctactcagcctggagcaagaaccgctgttgtcccggatgggcagcctgcgggctcccgtggacgaggaccgcctgtccccgctggtggcggccgactcgctcctggagcatgtgcgggaggacttctccggcctcctccctgaggagttcatcagcctttccccaccccacgaggccctcgactaccacttcggcctcgaggagggcgagggcatcagagacctcttcgactgtgactttggggacctcacccccctggatttctgacagggcttggagggaccagggtttccagagatgctcaccttgtctctgcagccctggagccccctgtccctggccgtcctcccagcctgtttggaaacatttaatttatacccctctcctctgtctccagaagcttctagctctggggtctggctaccgctaggaggctgagcaagccaggaagggaaggagtctgtgtggtgtgtatgtgcatgcagcctacacccacacgtgtgtaccgggggtgaatgtgtgtgagcatgtgtgtgtgcatgtaccggggaatgaaggtgaacatacacctctgtgtgtgcactgcagacacgccccagtgtgtccacatgtgtgtgcatgagtccatgtgtgcgcgtgggggggctctaactgcactttcggcccttttgctctgggggtcccacaaggcccagggcagtgcctgctcccagaatctggtgctctgaccaggccaggtggggaggctttggctggctgggcgtgtaggacggtgagagcacttctgtcttaaaggttttttctgattgaagctttaatggagcgttatttatttatcgaggcctctttggtgagcctggggaatcagcaaaggggaggaggggtgtggggttgataccccaactccctctacccttgagcaagggcaggggtccctgagctgttcttctgccccatactgaaggaactgaggcctgggtgatttatttattgggaaagtgagggagggagacagactgactgacagccatgggtggtcagatggtggggtgggccctctccagggggccagttcagggccccagctgccccccaggatggatatgagatgggagaggtgagtgggggaccttcactgatgtgggcaggaggggtggtgaaggcctcccccagcccagaccctgtggtccctcctgcagtgtctgaagcgcctgcctccccactgctctgccccaccctccaatctgcactttgatttgcttcctaacagctctgttccctcctgctttggttttaataaatattttgatgacgtttgggccgggttttgggactctgttgggaacatttcggggcgggagaggccaaggttgctggggaaatgcccattctccacttcccttctccctgtccgtgcccgatttgatttgagcctcataactcgaagaaaggtcagcttcctcgctgttttggtcctaactcaaaagcagatccagtaaaggtttttgttgtaaaaaaaaaaaaaaaaaaaaaaa

SEQ ID NO: 154099 - DNA, 1314 bp, Artificial Sequence
  derived and/or modified sequence
atggccctggccggcgcccccgccggcggcccctgcgcccccgccctggaggccctgctgggcgccggcgccctgagactgctggacagcagccagatcgtgatcatcagcgccgcccaggacgccagcgccccccccgcccccaccggccccgccgcccccgccgccggcccctgcgaccccgacctgctgctgttcgccaccccccaggcccccagacccacccccagcgcccccagacccgccctgggcagaccccccgtgaagagaagactggacctggagaccgaccaccagtacctggccgagagcagcggccccgccagaggcagaggcagacaccccggcaagggcgtgaagagccccggcgagaagagcagatacgagaccagcctgaacctgaccaccaagagattcctggagctgctgagccacagcgccgacggcgtggtggacctgaactgggccgccgaggtgctgaaggtgcagaagagaagaatctacgacatcaccaacgtgctggagggcatccagctgatcgccaagaagagcaagaaccacatccagtggctgggcagccacaccaccgtgggcgtgggcggcagactggagggcctgacccaggacctgagacagctgcaggagagcgagcagcagctggaccacctgatgaacatctgcaccacccagctgagactgctgagcgaggacaccgacagccagagactggcctacgtgacctgccaggacctgagaagcatcgccgaccccgccgagcagatggtgatggtgatcaaggccccccccgagacccagctgcaggccgtggacagcagcgagaacttccagatcagcctgaagagcaagcagggccccatcgacgtgttcctgtgccccgaggagaccgtgggcggcatcagccccggcaagacccccagccaggaggtgaccagcgaggaggagaacagagccaccgacagcgccaccatcgtgagccccccccccagcagcccccccagcagcctgaccaccgaccccagccagagcctgctgagcctggagcaggagcccctgctgagcagaatgggcagcctgagagcccccgtggacgaggacagactgagccccctggtggccgccgacagcctgctggagcacgtgagagaggacttcagcggcctgctgcccgaggagttcatcagcctgagccccccccacgaggccctggactaccacttcggcctggaggagggcgagggcatcagagacctgttcgactgcgacttcggcgacctgacccccctggacttctag

SEQ ID NO: 154100 - DNA, 2503 bp, Artificial Sequence
  derived and/or modified sequence
ttggcgcgtaaaagtggccgggactttgcaggcagcggcggccgggggcggagcgggatcgagccctcgccgaggcctgccgccatgggcccgcgccgccgccgccgcctgtcacccgggccgcgcgggccgtgagcgtcatggccttggccggggcccctgcgggcggcccatgcgcgccggcgctggaggccctgctcggggccggcgcgctgcggctgctcgactcctcgcagatcgtcatcatctccgccgcgcaggacgccagcgccccgccggctcccaccggccccgcggcgcccgccgccggcccctgcgaccctgacctgctgctcttcgccacaccgcaggcgccccggcccacacccagtgcgccgcggcccgcgctcggccgcccgccggtgaagcggaggctggacctggaaactgaccatcagtacctggccgagagcagtgggccagctcggggcagaggccgccatccaggaaaaggtgtgaaatccccgggggagaagtcacgctatgagacctcactgaatctgaccaccaagcgcttcctggagctgctgagccactcggctgacggtgtcgtcgacctgaactgggctgccgaggtgctgaaggtgcagaagcggcgcatctatgacatcaccaacgtccttgagggcatccagctcattgccaagaagtccaagaaccacatccagtggctgggcagccacaccacagtgggcgtcggcggacggcttgaggggttgacccaggacctccgacagctgcaggagagcgagcagcagctggaccacctgatgaatatctgtactacgcagctgcgcctgctctccgaggacactgacagccagcgcctggcctacgtgacgtgtcaggaccttcgtagcattgcagaccctgcagagcagatggttatggtgatcaaagcccctcctgagacccagctccaagccgtggactcttcggagaactttcagatctcccttaagagcaaacaaggcccgatcgatgttttcctgtgccctgaggagaccgtaggtgggatcagccctgggaagaccccatcccaggaggtcacttctgaggaggagaacagggccactgactctgccaccatagtgtcaccaccaccatcatctcccccctcatccctcaccacagatcccagccagtctctactcagcctggagcaagaaccgctgttgtcccggatgggcagcctgcgggctcccgtggacgaggaccgcctgtccccgctggtggcggccgactcgctcctggagcatgtgcgggaggacttctccggcctcctccctgaggagttcatcagcctttccccaccccacgaggccctcgactaccacttcggcctcgaggagggcgagggcatcagagacctcttcgactgtgactttggggacctcacccccctggatttctgacagggcttggagggaccagggtttccagagatgctcaccttgtctctgcagccctggagccccctgtccctggccgtcctcccagcctgtttggaaacatttaatttatacccctctcctctgtctccagaagcttctagctctggggtctggctaccgctaggaggctgagcaagccaggaagggaaggagtctgtgtggtgtgtatgtgcatgcagcctacacccacacgtgtgtaccgggggtgaatgtgtgtgagcatgtgtgtgtgcatgtaccggggaatgaaggtgaacatacacctctgtgtgtgcactgcagacacgccccagtgtgtccacatgtgtgtgcatgagtccatgtgtgcgcgtgggggggctctaactgcactttcggcccttttgctctgggggtcccacaaggcccagggcagtgcctgctcccagaatctggtgctctgaccaggccaggtggggaggctttggctggctgggcgtgtaggacggtgagagcacttctgtcttaaaggttttttctgattgaagctttaatggagcgttatttatttatcgaggcctctttggtgagcctggggaatcagcaaaggggaggaggggtgtggggttgataccccaactccctctacccttgagcaagggcaggggtccctgagctgttcttctgccccatactgaaggaactgaggcctgggtgatttatttattgggaaagtgagggagggagacagactgactgacagccatgggtggtcagatggtggggtgggccctctccagggggccagttcagggccccagctgccccccaggatggatatgagatgggagaggtgagtgggggaccttcactgatgtgggcaggaggggtggtgaaggcctcccccagcccagaccctgtggtccctcctgcagtgtctgaagcgcctgcctccccactgctctgccccaccctccaatctgcactttgatttgcttcctaacagctctgttccctcctgctttggttttaataaatattttgatgacgtt

SEQ ID NO: 154101 - DNA, 1314 bp, Artificial Sequence
  derived and/or modified sequence
atggcactggccggggcaccagccggcgggccctgcgccccagccttagaagctctgctcggcgctggagctctaaggctcctggattctagccaaatcgtgattatttcagccgcccaagacgcttccgcccctcctgccccgacaggtccggcagcaccagctgccgggccatgcgatcccgacttgctactgttcgctacacctcaggccccccgccccaccccaagcgcccctagaccagctctcggcaggccccctgtaaagaggaggctagacctcgaaacagaccaccagtacctggctgagtcgtcaggaccggcgagagggcggggccgacaccccggtaagggagtcaagtcgcccggcgagaagtctagatacgagacctccttgaacctgacgaccaaacgattcctcgaattactgtcacatagcgcggacggagtcgttgacctcaactgggctgctgaggtgctgaaggtgcagaaacggcgcatttatgacattactaatgtcctggaaggaattcagttgattgccaagaagtcgaagaatcatattcagtggctggggtctcacaccacagtgggggttggtggtcgcctggagggactgacacaagatctgagacagctgcaggagtctgaacagcagcttgaccacctgatgaacatctgtacaactcagctcaggctgctcagcgaggacacagattcacagaggctggcctacgttacgtgccaggatctgcgctctatcgccgatcccgcagagcaaatggttatggtcattaaggcaccgcctgagacacagttacaggccgtcgatagttccgagaactttcagataagcctcaaaagcaaacagggtcccatcgatgtgtttctctgtccagaagagacggtcggaggcatttcccccggcaagaccccatcccaggaggtgacttctgaagaggaaaatcgggctactgattccgctacaatcgtgtctccgccccctagctcccctccatcttcccttacaaccgacccttcccaatccctgctttccttggaacaagaaccactgctgagcagaatgggctccctcagagccccggtagacgaggatcgattgtccccccttgtggccgcagactccctgctggaacacgtcagagaggatttttccgggctcctgccagaagagttcatatccctttctcccccacacgaggctcttgactaccacttcggcctagaggagggggagggaatcagagatctgttcgattgtgatttcggggacttgaccccgctcgacttctag

SEQ ID NO: 154102 - DNA, 1314 bp, Artificial Sequence
  derived and/or modified sequence
atggccctggccggggccccagctgggggcccctgtgccccagccctggaggccctgctgggcgctggggccctgcggctgctggacagcagccagatcgtcatcatctctgctgcccaggatgccagcgcccccccagcccccactggacctgctgccccagctgctggcccctgtgaccctgacctgctgctgtttgccaccccccaggccccccggcccaccccatctgcccccaggcctgccctgggccggccccctgtgaagaggcggctggacctggagacagaccaccagtacctggccgagagcagcggccctgcccggggccggggccgccaccctggaaaaggagtgaagagccctggagagaagagccgctatgagaccagcctgaacctgaccaccaagcgcttcctggagctgctgagccacagcgcagatggagtggtggacctgaactgggccgctgaggtgctgaaggtgcagaagaggcgcatctatgacatcaccaacgtgctggagggcatccagctgattgccaagaagagcaagaaccacatccagtggctgggcagccacaccaccgtgggcgtgggcggccgcctggagggcctgacccaggacctgcggcagctgcaggagagcgagcagcagctggaccacctgatgaacatctgcaccacccagctgcggctgctgtctgaggacacagacagccagaggctggcctacgtgacctgccaggacctgcggagcattgctgaccctgctgagcagatggtgatggtgatcaaggcccctcctgagacccagctgcaggccgtggacagcagcgagaacttccagatcagcctgaagagcaagcagggccccattgatgtgttcctgtgcccagaggagaccgtgggcggcatcagccctgggaagacccccagccaggaggtgaccagcgaggaggagaacagagccacagattctgccaccatcgtgtccccaccacccagcagcccccccagcagcctgaccacagaccccagccagagcctgctgagcctggagcaggagcccctgctgagcaggatgggcagcctgcgggcccctgtggatgaagatcggctgagccccctggtggccgctgacagcctgctggagcacgtgcgggaggacttcagcggcctgctgcctgaggagttcatcagcctgagcccccctcatgaggccctggactaccacttcggcctggaggagggggagggcatccgggacctgtttgactgtgactttggagacctgacccccctggacttctag

SEQ ID NO: 154103 - DNA, 1314 bp, Artificial Sequence
  derived and/or modified sequence
atggccctggccggcgcccccgccggcggcccctgcgcccccgccctggaagcactgctaggggccggagccctgagactgctggatagcagccagattgtaatcattagcgccgcccaggatgctagcgccccccccgcgcctactggtccagctgcccccgctgcaggaccgtgtgatcccgacctgttgctgtttgctacaccacaggcccctaggccaactccttctgctccacgacctgcgctggggcggccacccgtcaagaggaggctggacctagagactgatcatcagtacctcgctgagtcgagcggcccagcaaggggaagggggagacaccccgggaaaggtgtcaaatctccaggggagaaatcccggtacgagaccagcttgaacttaaccaccaagcggtttcttgagctgttaagtcattcagctgatggagttgtggacttgaactgggccgcggaggtcctgaaagtgcagaaaaggagaatctatgatattactaacgtgctggagggtattcaactgatagcaaaaaaatcgaaaaatcatattcagtggcttggcagccacacaacggtgggcgtgggcggcagactggagggtctgactcaggatctgcggcagctacaggagtctgagcagcagctggatcacctgatgaacatatgcactactcagctgaggttactgagtgaggataccgattcccagagactggcttacgttacctgccaagatttaaggtccatcgccgacccagccgaacagatggtaatggttattaaggctccgccagagactcagttgcaggccgtagattcaagtgagaattttcagattagcctgaagtccaagcagggacccatagatgtgttcttatgcccagaggagacagttggcggtatctcgccaggtaaaacaccaagtcaggaggttaccagcgaagaggaaaaccgcgccactgattccgcaaccatcgtaagtcctccgccaagttcccctccgtcttccctaacaacagacccgtctcagtcattgctcagcttggagcaggaacctctgctgtctaggatggggtcacttcgggcccctgtcgatgaggacaggctgagtccacttgttgccgccgactctctcttagaacatgtcagggaagacttcagcgggttgttgcctgaagagtttatctcgctctctccccctcacgaagctttagactatcacttcggattggaagagggcgaggggattagagatctgttcgactgcgatttcggggatctgacccccctggatttctag

SEQ ID NO: 154104 - DNA, 1314 bp, Artificial Sequence
  derived and/or modified sequence
atggcattggccggtgcacctgccggtggcccttgcgcccctgcgctggaagccctacttggagcaggcgctcttcgcctgttagattccagccagatcgttattatatctgctgcccaggatgcgagtgccccaccagcgccaaccgggcctgccgctcctgcagccggaccctgcgaccccgacttgcttctgttcgctacaccgcaagccccacggccaacgccgagcgcccctagacctgcactgggtcgtccacccgtaaaaaggagattagacctagagacagaccaccaatacctggctgaaagctccggacctgcccgaggtcgaggtcggcatcccggtaaaggggtcaaaagtccaggcgagaagtcaagatatgaaacttccctcaatctcaccactaagcggttcctggagctgttgtcccattctgcagacggcgtggtggatcttaactgggccgcagaggtcttgaaagttcagaagaggagaatctatgacataacaaatgtgcttgagggaattcaactgatcgcaaagaagtcaaaaaatcatattcagtggcttggctcacacaccactgtcggtgtaggcggtaggctggagggcctgactcaggatctccggcagctccaggaatctgaacagcagcttgaccacctgatgaacatttgtaccactcagcttcggctgctgtcggaggatacagactctcagcgccttgcatacgtgacttgtcaagatctccgatccatagccgacccagctgagcagatggtcatggtaatcaaggcacccccagaaacacagctgcaagcagtcgattccagcgagaattttcagatcagtttaaagtcaaaacagggcccaatcgatgtgttcctgtgccccgaagagactgttggagggatcagcccagggaaaactccttcccaggaagtaaccagtgaagaggaaaatagggcaacggattccgccacaatcgtgtcaccccctccaagttcccccccttcctccctcacaaccgatccttcacagagtctgttgagcctcgagcaggaacccctgttgagtaggatgggatctctgcgagcgccagtggacgaagaccgattgtctccattagtggcagcggattctcttctggagcatgtacgagaagatttctcaggtcttctccccgaagagtttatcagtctgtccccaccacacgaagcactcgattatcattttggacttgaggaaggtgagggtatccgtgatttattcgactgcgacttcggggatctgaccccccttgacttttag

SEQ ID NO: 154105 - protein, 378 aa, Artificial Sequence
  derived and/or modified sequence
MATALPPRLQPVRGNETLREHYQYVGKLAGRLKEASEGSTLTTVLFLVICSFIVLENLMVLIAIWKNNKFHNRMYFFIGNLALCDLLAGIAYKVNILMSGKKTFSLSPTVWFLREGSMFVALGASTCSLLAIAIERHLTMIKMRPYDANKRHRVFLLIGMCWLIAFTLGALPILGWNCLHNLPDCSTILPLYSKKYIAFCISIFTAILVTIVILYARIYFLVKSSSRKVANHNNSERSMALLRTVVIVVSVFIACWSPLFILFLIDVACRVQACPILFKAQWFIVLAVLNSAMNPVIYTLASKEMRRAFFRLVCNCLVRGRGARASPIQPALDPSRSKSSSSNNSSHSPKVKEDLPHTAPSSCIMDKNAALQNGIFCN

SEQ ID NO: 154106 - DNA, 1137 bp, Artificial Sequence
  derived and/or modified sequence
atggccaccgccctgccccccagactgcagcccgtgagaggcaacgagaccctgagagagcactaccagtacgtgggcaagctggccggcagactgaaggaggccagcgagggcagcaccctgaccaccgtgctgttcctggtgatctgcagcttcatcgtgctggagaacctgatggtgctgatcgccatctggaagaacaacaagttccacaacagaatgtacttcttcatcggcaacctggccctgtgcgacctgctggccggcatcgcctacaaggtgaacatcctgatgagcggcaagaagaccttcagcctgagccccaccgtgtggttcctgagagagggcagcatgttcgtggccctgggcgccagcacctgcagcctgctggccatcgccatcgagagacacctgaccatgatcaagatgagaccctacgacgccaacaagagacacagagtgttcctgctgatcggcatgtgctggctgatcgccttcaccctgggcgccctgcccatcctgggctggaactgcctgcacaacctgcccgactgcagcaccatcctgcccctgtacagcaagaagtacatcgccttctgcatcagcatcttcaccgccatcctggtgaccatcgtgatcctgtacgccagaatctacttcctggtgaagagcagcagcagaaaggtggccaaccacaacaacagcgagagaagcatggccctgctgagaaccgtggtgatcgtggtgagcgtgttcatcgcctgctggagccccctgttcatcctgttcctgatcgacgtggcctgcagagtgcaggcctgccccatcctgttcaaggcccagtggttcatcgtgctggccgtgctgaacagcgccatgaaccccgtgatctacaccctggccagcaaggagatgagaagagccttcttcagactggtgtgcaactgcctggtgagaggcagaggcgccagagccagccccatccagcccgccctggaccccagcagaagcaagagcagcagcagcaacaacagcagccacagccccaaggtgaaggaggacctgccccacaccgcccccagcagctgcatcatggacaagaacgccgccctgcagaacggcatcttctgcaactag

SEQ ID NO: 154107 - DNA, 1137 bp, Artificial Sequence
  derived and/or modified sequence
atggcaactgccctgcctcctcgtcttcagccggtcagggggaacgagacactgagggagcattaccaatatgtgggcaaactggcaggtcgtttaaaggaagcatcagaggggagcactctcactaccgtgctgtttttagtgatctgctctttcatagtgttggagaatctcatggtactgatcgccatctggaaaaataacaagttccacaacaggatgtacttttttatcgggaacctggccctatgcgacttgctggctggtatagcatacaaggttaacatcctgatgtccgggaagaaaactttctccctgagcccaactgtgtggttcttgagggagggcagtatgtttgtcgcgctgggcgcttcaacttgtagtctcctggccattgcgatcgaaagacacctcactatgataaagatgcggccttatgacgccaataaacgccatcgcgtgtttctgctgattgggatgtgttggctcattgccttcacattaggcgctcttcctatcctgggctggaattgtcttcataacttgcccgattgctctactattttacctctgtatagcaagaaatacattgccttttgcatttcaatatttactgcgatactggtcactattgtgatcctatatgctaggatatacttcttagttaagagctcgagcagaaaagtggccaaccataataactccgagcgctcgatggctttgttaagaacggtggtgatagtggtttctgtgtttattgcgtgctggtcccccctctttatcctgtttctcattgacgtggcctgccgtgtgcaggcttgcccaatactcttcaaggctcagtggtttatcgtcttagcagtccttaactctgctatgaacccagtgatctatacattagccagcaaagaaatgagaagagcattctttaggctggtttgtaactgtttggtcaggggcaggggggcccgagccagccccatccaacccgcactggatccatcaagaagcaagagcagctcatctaataattccagtcattcccctaaagtgaaagaggacttacctcacactgctccttcttcctgcatcatggataaaaatgctgcactccaaaacggcattttttgcaattag

SEQ ID NO: 154108 - DNA, 1137 bp, Artificial Sequence
  derived and/or modified sequence
atggccacagcccttcctccccgactccagccagttcggggcaatgagacattgagagagcactaccagtatgtaggtaagctcgcaggaaggctaaaggaggcaagcgaaggtagcacactgacaactgtcctgtttctggtgatttgctcttttatagtgcttgagaacttgatggttttgattgctatttggaagaataataaatttcataaccgcatgtacttcttcataggcaatttggccctgtgcgatctgttggcaggaatcgcctacaaagttaacatcttaatgtcaggcaaaaagactttcagcctgtcaccgaccgtgtggtttctgcgtgaagggagtatgtttgtagcactcggagcatctacatgttccctcctggccattgctattgaacggcacctgactatgattaaaatgcgcccttacgatgctaacaagagacatagagtgtttctcctcataggcatgtgttggcttattgctttcactctgggcgctctgcctattcttggttggaactgcctgcataacctgcctgattgcagcaccatcctcccactgtatagtaagaagtacatcgccttttgcatttccatatttacggccatcttggtcacaattgtcattctctacgcgcgcatttacttccttgtgaaaagttcctcacgtaaggtggccaaccataataatagcgaaagatcaatggctctcctgaggaccgttgtgatcgtcgtctccgtcttcatcgcctgctggtctcctctgtttatcctgttcctgattgatgtcgcttgccgcgtgcaagcgtgccccattcttttcaaggctcagtggttcattgtgttggcggtgctgaattcagccatgaatcccgtgatctacacactggcaagcaaggaaatgagaagagcattctttaggttagtgtgtaattgcctcgttagagggaggggcgcacgcgcgtcccccattcagcccgcattagatccatcaagatcaaagagttcaagctccaataatagcagccactctcccaaagtaaaggaggaccttcctcacaccgcaccctccagttgtatcatggataaaaatgcggcactgcaaaatggaattttctgtaactag

SEQ ID NO: 154109 - DNA, 1137 bp, Artificial Sequence
  derived and/or modified sequence
atggccacagccctgcccccccggctgcagcctgtgagaggaaatgagaccctgcgggagcactaccagtatgtgggcaagctggccggccgcctgaaggaggccagcgagggcagcaccctgaccaccgtgctcttcctggtgatctgcagcttcatcgtgctggagaacctgatggtgctgattgccatctggaagaacaacaagttccacaacaggatgtacttcttcatcggcaacctggccctgtgtgacctgctggccggcatcgcctacaaggtgaacatcctgatgtctgggaagaagaccttcagcctgagccccaccgtgtggttcctgcgggagggctccatgtttgtggccctgggcgccagcacctgcagcctgctggccatcgccatcgagcggcacctgaccatgatcaagatgaggccctatgatgccaacaagaggcacagggtcttcctgctgattggcatgtgctggctgattgccttcaccctgggcgccctgcccatcctgggctggaactgcctgcacaacctgcctgactgcagcaccatcctgcccctgtacagcaagaagtacatcgccttctgcatcagcatcttcaccgccatcctggtgaccatcgtcatcctgtatgcccgcatctacttcctggtgaagagcagcagcaggaaggtggccaaccacaacaacagcgagaggtccatggccctgctgaggacagtggtgattgtggtgtctgtgttcatcgcctgctggagccccctcttcatcctcttcctgattgatgtggcctgccgggtgcaggcctgccccatcctcttcaaggcccagtggttcatcgtgctggccgtgctgaacagcgccatgaaccctgtgatctacaccctggccagcaaggagatgaggcgggccttcttccggctggtgtgcaactgcctggtgcggggccgcggggcccgggccagccccatccagcctgccctggaccccagccgcagcaagagcagcagcagcaacaacagcagccacagccccaaggtgaaggaggacctgccccacacagcccccagcagctgcatcatggacaagaatgctgccctgcagaatggcatcttctgcaactag

SEQ ID NO: 154110 - DNA, 1137 bp, Artificial Sequence
  derived and/or modified sequence
atggccaccgccctgcccccccggctgcagcccgtgcggggcaacgaaaccctgcgtgagcattatcagtatgttggtaagttggctggccggcttaaggaagcctctgaaggaagcactctgacaacagtcctgtttctcgttatctgtagcttcatcgtgcttgagaatctgatggttctaatagccatatggaaaaataataagtttcacaatcgcatgtatttttttatcggtaacctcgctttgtgtgacctcttggctggcattgcatataaggttaacatcctcatgtccgggaagaagaccttctcactgagtcctactgtctggtttctgcgggagggttcaatgtttgtggccctaggagcttctacctgttcgctgctggccattgctatcgaacgtcacttaacaatgattaaaatgcgtccctatgatgctaataagcggcatcgggttttcttacttattgggatgtgttggctgatcgcctttactctgggagcgttgcctatactgggttggaattgtttgcacaatttgcctgactgttctaccatactcccactgtactcaaaaaagtatattgccttttgcatttcaatcttcactgcgatccttgtaaccatcgtgatcctgtatgctagaatctactttctggtgaagtcatcctcgcggaaggtggcgaatcacaataatagcgaaagatcaatggcgcttctcaggacagtcgttatagttgtgtctgtgtttatcgcttgttggtcgcctctcttcattcttttcttaatagatgtggcttgcagagtgcaggcctgtcccatcctgttcaaggcccaatggttcatcgttctggctgtcttaaattccgccatgaatcctgttatctacaccctggcctcaaaggagatgagacgggcatttttccgcctggtctgtaactgcctggttaggggccgaggggccagggccagtcctatccagcctgcattggatccttcacgaagtaaatcatccagttcaaacaattcctcacacagcccaaaagttaaagaggacttaccccataccgccccttcgtcctgtatcatggacaaaaacgcagctctacaaaacggcattttctgtaactag

SEQ ID NO: 154111 - DNA, 1137 bp, Artificial Sequence
  derived and/or modified sequence
atggccaccgccctgcccccccggctgcagcccgtgcggggcaacgaaacgttgagagaacactaccagtatgtcggcaaattggcgggcagattgaaagaggccagtgaggggagcacgttgactaccgtcctgttcctcgtgatttgctcgtttatcgtgctagagaatctgatggttctcattgctatatggaaaaataacaagttccataatcgcatgtattttttcattggaaatctcgctttatgcgatctcttggcagggatcgcctacaaagtgaacatcctcatgagcggcaagaaaacgtttagcttatctcccactgtatggtttcttcgcgaaggcagcatgtttgtggcgttgggcgctagtacatgctccctgcttgccattgccatcgagagacacctgactatgattaagatgcggccctatgacgccaacaagcgccaccgcgtgtttctgcttatcggcatgtgctggctcatcgctttcacactcggagcccttcccatactcggatggaactgtctccacaaccttcctgattgctccaccattctgcccctctacagtaagaaatacattgcattttgcatctcgattttcaccgctatcctggtcaccattgtgattttgtacgcccgcatctattttcttgttaaatcatctagccgcaaggtcgcaaaccacaataattcagagcgcagcatggctctccttcggaccgtcgtcattgtcgtgtccgtgttcattgcctgctggagccccctctttatcctctttttgatcgatgtggcttgccgggttcaagcttgtcccattctctttaaagcacagtggttcatcgtgcttgctgttctgaactctgccatgaaccctgttatttatacactggcgtccaaagaaatgaggagggccttttttcgactggtgtgcaactgtctggtacgaggacgcggtgcacgggcatcacccatccagcccgctttggacccaagtcgaagcaaatcttcctctagtaacaattcaagtcatagccccaaggtaaaagaagatctaccacatacagctcccagctcatgtatcatggataagaatgccgcgctgcagaacgggattttttgcaattag

SEQ ID NO: 154112 - DNA, 1137 bp, Artificial Sequence
  derived and/or modified sequence
atggctactgccctaccgccacgtctccagcccgttagaggaaatgagacattacgggagcattaccagtatgtagggaagctggcagggcgtttgaaggaagccagtgaagggtccaccctgaccaccgtcctattcctagtgatctgctcctttatcgtgctcgagaacttgatggtcttgattgcaatatggaagaataacaaattccacaaccgaatgtatttttttatcggcaatctcgcattgtgtgatttgttagccggtattgcttataaggtcaatatactcatgtctggcaaaaaaaccttttcgctgagtcccactgtgtggttcttgagagaaggaagtatgttcgtcgctcttggagcttccacctgcagcctactcgccatcgcgatagaacgccacctgaccatgatcaagatgcggccatacgacgcaaacaaaaggcacagggtttttctgctcatcgggatgtgctggttgattgctttcaccctgggagcactgcccatactagggtggaactgcctgcacaatctgccggactgtagtacaatcttgcccctttattctaagaaatatatcgctttctgtatctcaatttttaccgcaattcttgttactattgttatcctctatgctcggatctattttttagtcaaaagttccagcaggaaggtggctaatcataataactccgagaggtctatggccctcctccggacagtggtaattgtagtctcagtatttatcgcctgctggtccccactctttattctttttcttattgatgtagcatgtcgagtccaggcgtgtcctatattgttcaaagcgcagtggttcatagtattggctgttctcaattctgcaatgaacccagtcatatacacacttgcttccaaggaaatgagacgggcatttttccgtctggtctgtaattgcctggttagaggacgcggagccagggccagtccaatccaacccgcactggatccaagcagaagtaaatcaagttcatccaacaacagcagccacagcccaaaggtaaaagaggacctgccacatacagccccatcttcttgcattatggacaagaacgccgcattgcagaatggcatcttctgtaactag

SEQ ID NO: 154113 - DNA, 1137 bp, Artificial Sequence
  derived and/or modified sequence
atggctaccgcactgcctccccgactgcaacccgtaaggggcaatgaaacactgagggaacactatcaatatgtggggaaattggcagggaggctgaaggaagcaagtgaagggtctaccctcactaccgtgctgtttcttgtaatttgttcttttatcgttctggaaaacctgatggtgctgatcgctatctggaaaaacaataaattccataatcgtatgtatttcttcatcggaaatttggcattgtgcgatttgctcgccggaattgcttacaaagtgaatatcctgatgtctgggaaaaaaacgttctctcttagcccgactgtgtggtttctgagggagggttcaatgtttgttgccctgggagctagtacttgctcattactggcaattgcgatcgagcgccacctgactatgataaagatgcgaccgtacgatgccaataaaaggcatcgcgtctttctactgattgggatgtgttggctcattgccttcaccctgggcgctctgcccatcctcgggtggaactgcctccataacctgccggactgctcgaccatcctgcccctgtactctaagaaatatattgccttttgtattagtatttttactgccattctcgtgaccattgttatcctatatgccaggatctactttctggtcaaatcttccagcagaaaggtggcaaatcataacaattccgagagaagtatggcacttctgagaaccgtagttatcgtggtttccgtgttcattgcttgttggagcccgttgttcatcctgtttctgatcgacgtagcctgtagggtgcaggcatgtccaattttattcaaggcacagtggtttattgttctggccgtactaaattcggccatgaatccagtgatttataccctagctagcaaggagatgcgcagagcattttttcgactagtttgcaattgcttggtgagaggtagaggtgcacgggcttctcctattcagccagcactggacccttctagatctaagagtagctccagcaataattcctcccactcgccgaaagtgaaagaagacctgccgcacaccgccccttccagttgcatcatggataaaaacgccgcactgcagaatggaatattctgcaattag

SEQ ID NO: 154114 - DNA, 4206 bp, Artificial Sequence
  derived and/or modified sequence
tagtctctgactcgctcgggcagaggccgaggaagccggttccggggacgggcaacagggactcagggaccagaaggcggctgcaggacgcgaccgagcaggaccccaggcccgggaacgacgtcgcgagcgctgagactgccgggcctcccagcccatctggcattcgagcgcaggaccgggcgccccggcaccgccgcgcgccacccgctaggatgccggtggccccagcgccctcagccgacggaggagccctttttcaacgccctcgctggagtctggcctgcacgccttgctgaatgaagccggaacctcagccccgcttccctttgaaatgaatgttcctggggcgccctctcgtggattttggagctaatcgtctgtgaatgccaagtgatggcaactgccctcccgccgcgtctccagccggtgcgggggaacgagaccctgcgggagcattaccagtacgtggggaagttggcgggcaggctgaaggaggcctccgagggcagcacgctcaccaccgtgctcttcttggtcatctgcagcttcatcgtcttggagaacctgatggttttgattgccatctggaaaaacaataaatttcacaaccgcatgtactttttcattggcaacctggctctctgcgacctgctggccggcatcgcttacaaggtcaacattctgatgtctggcaagaagacgttcagcctgtctcccacggtctggttcctcagggagggcagtatgttcgtggcccttggggcgtccacctgcagcttactggccatcgccatcgagcggcacttgacaatgatcaaaatgaggccttacgacgccaacaagaggcaccgcgtcttcctcctgatcgggatgtgctggctcattgccttcacgctgggcgccctgcccattctgggctggaactgcctgcacaatctccctgactgctctaccatcctgcccctctactccaagaagtacattgccttctgcatcagcatcttcacggccatcctggtgaccatcgtgatcctctacgcacgcatctacttcctggtgaagtccagcagccgtaaggtggccaaccacaacaactcggagcggtccatggcactgctgcggaccgtggtgattgtggtgagcgtgttcatcgcctgctggtccccactcttcatcctcttcctcattgatgtggcctgcagggtgcaggcgtgccccatcctcttcaaggctcagtggttcatcgtgttggctgtgctcaactccgccatgaacccggtcatctacacgctggccagcaaggagatgcggcgggccttcttccgtctggtctgcaactgcctggtcaggggacggggggcccgcgcctcacccatccagcctgcgctcgacccaagcagaagtaaatcaagcagcagcaacaatagcagccactctccgaaggtcaaggaagacctgccccacacagccccctcatcctgcatcatggacaagaacgcagcacttcagaatgggatcttctgcaactgatcgtctccatgcgccctgctctgcggctgtgttcttatttattgcatgcgtcgcttccacaggggcccctcaagagctgtgactcgggagagctaccttactttgaccaacagcctgcccagtgtggatgtctcttacagagggggcccaaggaatcaccaccccgcttcagtgtaaacaacgtgccttgtccactttgggctccagagtctttcagatgtactaagctgctgacatcatccactgccttctgctgcatcctagacaccctccctgttgttcacagagagggaaggtcgtgggccacacaatgctgtgtgaccctctccgtgtgcctctgaatggtgttttgatgattttacactacatttcctgtgcgtagaatggatgcttgtatattcgtacatctctatgttacacagaatttgtgttgcaggtgtttgccatgtggtacctacatagaatctccatacaacacacaggtaacaggttatacaagtggattcagactgaacccccagtacaaggacattgttttgaactaggtggacatgccatccctggtctccttagactgacatgattctcatgttaaccaagttttaaaagttcaaattccccaaaaaggcttgtccaaggctggccccagatgtgtgggtctgacccacaccagccctgtgtcctgtcctttcagtcatttgtccctgcgtaattttaatcgtattccaaagcccaattatgtgatggttttcaggtttctgcaaattacagaagagccagccaagatcacccaggagcttgtgcccccagatgggccaaagaaagagcctatgaaggagaagcagaagcagacggctggcctggctcaccttcccacgccagtggggcaggggtctgcttcaggaaatggaagctgtccaggaaatgagcagagattcacaagacagcactttgattctatgttgagtttgtttctatattagaaaagcagcaagtcagtaatcccccgtggcatcacagctaagtagctgtggccaccggcagtttcacagcatcctgaaagctggcactgatcgtgactatcagtgaaagaagtttaattttcaggttagaaaatgtgatctggcagtttatgcattcttcagagtaatgtaataatacctatgtgatgctgtaattttacttttcaacataagttgaacccgtagcagtctgtttaccttgtaaagggattacttagaagacatttttgtacatgctcttccccaaggattgtacgtattatacaaatagatggaaagaaaagtgaacacgtttgtagaactttcataagcacacagttgctgtgttgagttctctttaaaaacaaggacaaaaccaaccagcgttcaaaggaacctcccatcagagtcccctaaagtattttaggttcagtgagcatttgcctgaataaaacctaaaagagtagtcttaacacattactaactttttctaagagaaattgattcctgttttgtcatctgatgcaatttgctcttataaagagacattttcataggttcagagtaactcacctccatgggctgaccaaaggcttttctaatttttgttactgatgagatgaaacctatttgtaaggagatcttccccaggagcatttctgttgccttcttgacatcaatgaaaagtagcatattctcttatgaaatagcatgagaaaacacagggcatttctaggacagtaaaacgttaaagtactggattaagaaaacaacaacaggctgggcgcagtggctcacacctgtaatcccagcactttgggaggctgaggcgggtggatcacctgaggtcaggagtttgtgaccagcctggccaacatagtgaaatcctgtttctactaaaaatacaaaaattagctggatgcgatagcacgtgcctgtagtcccagctactcgggaggctgaggctggagagttgctcaaacccgggaggcggagattgcagtgagccaagatcgcaccgctgcactccagcctgggtgacagagcgaccctctgtctcaaaaaataataataataataaataaaacaacaacaaaatgcatcagagagccaaaacattcagtattgcattttcacataggtgatgaaatgactttggaactttatctgtgttatagttatgagttgctttgggagacttggagctctctgtagctattgttcataacactttgctccataaccctgatgtccgcagtatctaagtatctcagccttcatccattaactctactagggagcccacagccaccatttccactaggaggtatcaatatttgtggtatgacataaggctcccttgaaataacaagacttttgagcaatctgaattaaaaatacatcaaaaaagtaatagcgctcatttgctaaatgcaaaaaataatcacctttgataccaatgtgcaccaatatgcctaactagctagccagctggagataatttaccagggaatgtttcaaagccctaaccttgaagtttggaaacaggtggtcttctatgctgcagagaaactatgcattaggtctcttttcaattagaaacctttactatttccaatgtatgtttgttaaaaataataataataaaaccaaaagcctttgtggaaaccca

SEQ ID NO: 154115 - DNA, 8505 bp, Artificial Sequence
  derived and/or modified sequence
catggggagaggaaagcaatggacacaattgtatcctgtagggtttcattcacgtgaaggtcagaagcaggctaaactcacctaggggagagtcctatcccaggtagtggtcatgcttggggacaggtggtgactaggaggggcacaaggaaggctgcagggtccggcccatcttgttgctggcctgggtgctggtctcactgatctctgtgtggtggggcaggtcagcctcccaggcctgctggtgcctgcagtgcccagcactcctgccgtgcctggcagtgttagtaccaatccgccagagtgactgactcccctcttgccctgagtagggcttgctgactccaggagcctcagggcggggtgggctttgagctttcttctagcaaacttgaggtctgtggctggtacccctcaggagcggaggggaactcttgtccatgagatgcttttaaccgtgcgcaataatgtgtagacgcatccaaaatcaatctggcctttagcccagcacttaactcttgggatgaggcctgctttgtaaatgttgataatccagagaaaatgagcttttagattccaaagacagccagatatcttccacttatgcaaaatgcagagaatcatatttaacaaaagatgttctggacaaatatgcttcttgagggatgaatatttaattataagggaaatgataaatcaaacattaatgggaaaatatgtttgccctcaagattcatgattttgatgggtctctggcaaatcttatactatgtttattggggttattttattgctggttattagtttttaattgtttgcttgttttctgctctgatcaatttttgtataagccgtgggtctattcaccctcttctctccattcccgggagcaagtccacatctggctgttggatgcatggcaaaagcaaaggtgtggagaaggttcagaggagacaggacatgtataaaatggtagggtcaggttgtcatgggggaaactgaggcacaggaggcaagctgagttagtacaagaacagtctgaatcataacgacatgccagtattacctaaaaggatgaggaacatggagctgtacttgaatccctacgtgagctggggaaaaggggcctcaggaatcactgacattggaaccaaggtttgtctgcagcttgtcggtttctgggacagaaacccaacatactggagtgggtatcccagcaatctgtaggataaaccaggacactgtggtgtcatggatagctggctgtctgccaggtgatggcccctctggttgcaatgtgagccgggcaggtcatccatttggcagcatggtgagggctctggccccagttgctatgggagggaggatgctggcacagggcactgttcacagactgcctttgctccatgccttttccatgagcatgagtggctgttcgtgtgggaaacggcagagccctcgcggtccccatcagcactgtgcagtggtaccggaggtggcaggagacagcctgatggcccaggttgtcttcatacccggcttcatgccagggtgcatgccgggcatagcacatgtgtccctgagaggcccctgatcaggggtggaaacccagcaaagtgaaaatcagaaatagtgattctccagttcctgttcacagataaagaaagaaagaaataataagcaatactaggcctggtgtggtagttcacacctgtaatcccagcactttgggaggccaaggcaggcaatcacttgaggtcaggagttcaagaccagcctggccaacatggtgaaaccccgtctctactaaaaatacaaatattagccgggcatggtggcgggcgcctgtagtcccagctactcaggaggctgaggcagaagaatcgcttgaaccggggaggcggagggtgtggtgagccgggatcgcaccgctgcactccagcctgggtgacagaatgagactccatcccaaaaacaaaacaaaacaaaacaaaaaacaaacaaaaacaactaaaaggacagtatctttttagcacccatcagtgtacaggatgctggggagggtactgtgaacttacccatggtgaaagtccctgtgttaatggataagctcaatgctcagaaaatgctgctgactgtggtattgccccatttaaagagacagtttgcagtacgttttcagaagtggcatgcagcctcagagaaaagtcaccaggggctggcatgattccagaaaatgttacagagcaagtggaatttgacttgaggcttgaaggatgggcaagatttaaataaaattcagaaacggtagagagggaggggctggggggaaggctgcccactggactgtcctgtttgcctccaggagaacctacaggcaagacatggtctcttctcaggtgaatgggaagccaagtagggctggcatgggtgagccacagctcgaggaggcaggccccgggccctgcgctgcctgtcatggctcatgagtgatgggagagatctgggcaggcaacctcctctcatcctgcatcatcagcctggacttggaacttggctgctttttctttctgcagttagcagagggccttggccaacacataagcctttctgccagcacttggcattccagctgacctcgacccaaggcctctgtgacttcaggaggcggcagctgggaagggtcagggcagttccaggcagagcacagacgtcagctcagacatcctaccccccgccaaccccccgcccccggggtttccagagcaaccaacaccaccaagctccaggacactggaaaaaaaatctttgcaaagaagcaaggggccatctcagaaaatccaggtcccccaaattgatgtagggagaggagggctttgacagcattcagcactccagagggtcacgaggatacagaaaccatttggagccacctctgcttctcagccccacccaggcaagccctggatcttcaagggactgatttgtacctgggaataaactcatgcatggatgagattcagagtcaatcacaccctaaaatgcagagcccatagtattggtgagttgttcatgtgtctctgaagcaaatttagggctgtggttcaaacatcgtaaaagttaaaaaaaattcactggatacacacagtaggctcttttaaattagcctcatttgaacttaattacatatttaaatactcaaataataaatgatggctgggtgcggtgtctcatgcctgtaatcccagcactttgggaggctgaggcaggctgatcacttgaggtcaggagttcgagcccagcctggccaacatggtgaaaccccgtctctactaaaaatacaaaaattagccatgcatggtggcgggtgcctgtaatcccagctacttgggaggctgaggcagcagaagcacttgaacccaggaggcagtggttgcaatgagccgagatcgcaccactgcattccagcctgggtgacagagcaacactgtgtctcaaaagaaaattttttttaataaaaataaaaaataaaataaaataagtgagtccactgaaagcggtttctaccttgatagttgggtgtgtggcgtcatcaacatcacagaaggctgatcgatattaccaggtgtggttgagtgcaagtgtttgaggtctcgtgggggaagagtttggaattcagaatccattgaggccttcactcaccactttccctctctcgctgtgttcccaaatgtgccacttttctgttggctcacatgcacccatgctctatttgatattcagggctctgaatttcaagccagactcagtcagtgtgattgtcactgctttcctgtccttcctttatcatctgtagacttgggtcccgtttttgcaggttgatgttctgtcttcgctgggctctggactcactgctcacgagtgcggtgtctgcatgggcactgcccagacatgcactgttggtccctcgatggctgcatggtcaggcctcagggctctctgccaggccgacctacagcccatacagacctgatttctgggcctggatccaggggatgccatctgggaagtgcgggatcttcccacgatgtcactgtaaaactcaccagggaggttttagaaattgaaccggcatcattcagattccatcctgctttttggtcctgagaaaatcctgcttttccctgagtaactgggataatgggtcaccagctcccatgccctagatgaggactagttagcattttctagtgcctggagatttccagatggaagctgtacttgggtctgtgtatctttgttacaggattcaataattcatgcactgaatttcccttcccggcaactccagacaccaaatcgcttcccatggtgtcccccaatcacttaggaatttagcctgtgtctaaagaccctctctgcagcctgacgtggctagccatcccagtacttccacgtttttcatgcctttctccaacagcgttgccgtggccccttaggcggcgatcgttttatcaatggtcgctccctctttttatctgttggcaggagccctttttcaacgccctcgctggagtctggcctgcacgccttgctgaatgaagccggaacctcagccccgcttccctttgaaatgaatgttcctggggcgccctctcgtggattttggagctaatcgtctgtgaatgccaagtgatggcaactgccctcccgccgcgtctccagccggtgcgggggaacgagaccctgcgggagcattaccagtacgtggggaagttggcgggcaggctgaaggaggcctccgagggcagcacgctcaccaccgtgctcttcttggtcatctgcagcttcatcgtcttggagaacctgatggttttgattgccatctggaaaaacaataaatttcacaaccgcatgtactttttcattggcaacctggctctctgcgacctgctggccggcatcgcttacaaggtcaacattctgatgtctggcaagaagacgttcagcctgtctcccacggtctggttcctcagggagggcagtatgttcgtggcccttggggcgtccacctgcagcttactggccatcgccatcgagcggcacttgacaatgatcaaaatgaggccttacgacgccaacaagaggcaccgcgtcttcctcctgatcgggatgtgctggctcattgccttcacgctgggcgccctgcccattctgggctggaactgcctgcacaatctccctgactgctctaccatcctgcccctctactccaagaagtacattgccttctgcatcagcatcttcacggccatcctggtgaccatcgtgatcctctacgcacgcatctacttcctggtgaagtccagcagccgtaaggtggccaaccacaacaactcggagcggtccatggcactgctgcggaccgtggtgattgtggtgagcgtgttcatcgcctgctggtccccactcttcatcctcttcctcattgatgtggcctgcagggtgcaggcgtgccccatcctcttcaaggctcagtggttcatcgtgttggctgtgctcaactccgccatgaacccggtcatctacacgctggccagcaaggagatgcggcgggccttcttccgtctggtctgcaactgcctggtcaggggacggggggcccgcgcctcacccatccagcctgcgctcgacccaagcagaagtaaatcaagcagcagcaacaatagcagccactctccgaaggtcaaggaagacctgccccacacagccccctcatcctgcatcatggacaagaacgcagcacttcagaatgggatcttctgcaactgatcgtctccatgcgccctgctctgcggctgtgttcttatttattgcatgcgtcgcttccacaggggcccctcaagagctgtgactcgggagagctaccttactttgaccaacagcctgcccagtgtggatgtctcttacagagggggcccaaggaatcaccaccccgcttcagtgtaaacaacgtgccttgtccactttgggctccagagtctttcagatgtactaagctgctgacatcatccactgccttctgctgcatcctagacaccctccctgttgttcacagagagggaaggtcgtgggccacacaatgctgtgtgaccctctccgtgtgcctctgaatggtgttttgatgattttacactacatttcctgtgcgtagaatggatgcttgtatattcgtacatctctatgttacacagaatttgtgttgcaggtgtttgccatgtggtacctacatagaatctccatacaacacacaggtaacaggttatacaagtggattcagactgaacccccagtacaaggacattgttttgaactaggtggacatgccatccctggtctccttagactgacatgattctcatgttaaccaagttttaaaagttcaaattccccaaaaaggcttgtccaaggctggccccagatgtgtgggtctgacccacaccagccctgtgtcctgtcctttcagtcatttgtccctgcgtaattttaatcgtattccaaagcccaattatgtgatggttttcaggtttctgcaaattacagaagagccagccaagatcacccaggagcttgtgcccccagatgggccaaagaaagagcctatgaaggagaagcagaagcagacggctggcctggctcaccttcccacgccagtggggcaggggtctgcttcaggaaatggaagctgtccaggaaatgagcagagattcacaagacagcactttgattctatgttgagtttgtttctatattagaaaagcagcaagtcagtaatcccccgtggcatcacagctaagtagctgtggccaccggcagtttcacagcatcctgaaagctggcactgatcgtgactatcagtgaaagaagtttaattttcaggttagaaaatgtgatctggcagtttatgcattcttcagagtaatgtaataatacctatgtgatgctgtaattttacttttcaacataagttgaacccgtagcagtctgtttaccttgtaaagggattacttagaagacatttttgtacatgctcttccccaaggattgtacgtattatacaaatagatggaaagaaaagtgaacacgtttgtagaactttcataagcacacagttgctgtgttgagttctctttaaaaacaaggacaaaaccaaccagcgttcaaaggaacctcccatcagagtcccctaaagtattttaggttcagtgagcatttgcctgaataaaacctaaaagagtagtcttaacacattactaactttttctaagagaaattgattcctgttttgtcatctgatgcaatttgctcttataaagagacattttcataggttcagagtaactcacctccatgggctgaccaaaggcttttctaatttttgttactgatgagatgaaacctatttgtaaggagatcttccccaggagcatttctgttgccttcttgacatcaatgaaaagtagcatattctcttatgaaatagcatgagaaaacacagggcatttctaggacagtaaaacgttaaagtactggattaagaaaacaacaacaggctgggcgcagtggctcacacctgtaatcccagcactttgggaggctgaggcgggtggatcacctgaggtcaggagtttgtgaccagcctggccaacatagtgaaatcctgtttctactaaaaatacaaaaattagctggatgcgatagcacgtgcctgtagtcccagctactcgggaggctgaggctggagagttgctcaaacccgggaggcggagattgcagtgagccaagatcgcaccgctgcactccagcctgggtgacagagcgaccctctgtctcaaaaaataataataataataaataaaacaacaacaaaatgcatcagagagccaaaacattcagtattgcattttcacataggtgatgaaatgactttggaactttatctgtgttatagttatgagttgctttgggagacttggagctctctgtagctattgttcataacactttgctccataaccctgatgtccgcagtatctaagtatctcagccttcatccattaactctactagggagcccacagccaccatttccactaggaggtatcaatatttgtggtatgacataaggctcccttgaaataacaagacttttgagcaatctgaattaaaaatacatcaaaaaagtaatagcgctcatttgctaaatgcaaaaaataatcacctttgataccaatgtgcaccaatatgcctaactagctagccagctggagataatttaccagggaatgtttcaaagccctaaccttgaagtttggaaacaggtggtcttctatgctgcagagaaactatgcattaggtctcttttcaattagaaacctttactatttccaatgtatgtttgttaaaaataataataataaaaccaaaagcctttgtggaaaccca

SEQ ID NO: 154116 - protein, 201 aa, Artificial Sequence
  derived and/or modified sequence
MRLLPLLRTVLWAAFLGSPLRGGSSLRHVVYWNSSNPRLLRGDAVVELGLNDYLDIVCPHYEGPGPPEGPETFALYMVDWPGYESCQAEGPRAYKRWVCSLPFGHVQFSEKIQRFTPFSLGFEFLPGETYYYISVPTPESSGQCLRLQVSVCCKERKSESAHPVGSPGESGTSGWRGGDTPSPLCLLLLLLLLILRLLRIL

SEQ ID NO: 154117 - DNA, 606 bp, Artificial Sequence
  derived and/or modified sequence
atgaggctcctacccttacttcgcacggtcctatgggctgcattcctagggtcgccgttgagagggggcagtagcctccggcacgtagtgtactggaactcttccaacccccggctgttaagaggggatgccgtcgtcgagctcgggttgaatgactacttggacatagtttgcccccattacgagggaccagggccgccggaggggccagaaaccttcgccctttacatggttgattggcccggctatgagtcctgccaagccgaggggccccgcgcctataagcgatgggtgtgctctctcccttttggacatgtgcagttttcagagaaaattcagcggttcacgcccttttcgctgggtttcgagttcctgcctggcgaaacatactactatattagcgtcccaacaccggaaagctctgggcagtgcctaagactgcaggtgagcgtgtgttgtaaagagcggaaatcagagagcgcacaccctgtggggagtccaggggagtctggaacaagcgggtggcgggggggggatacgcccagccccctgtgcctgctcctgctactgttgttactgatcctgcgcctgctaaggatcctctag

SEQ ID NO: 154118 - DNA, 606 bp, Artificial Sequence
  derived and/or modified sequence
atgaggctgctgcccctgctgaggacagtgctgtgggccgccttcctgggcagccccctgcggggcggcagcagcctgcggcacgtggtgtactggaacagcagcaacccccggctgctgcggggagatgctgtggtggagctgggcctgaatgactacctggacatcgtgtgcccccactatgagggccctggccccccagagggccctgagacctttgccctgtacatggtggactggccaggctatgagagctgccaggccgagggcccccgggcctacaagcgctgggtgtgcagcctgccctttggacatgtgcagttcagcgagaagatccagcgcttcacccccttcagcctgggctttgagttcctgcccggggagacctactactacatctctgtgcccaccccagagagcagcggccagtgcctgcggctgcaggtgtctgtgtgctgcaaggagaggaagtctgagagcgcccaccctgtgggcagccctggagagagcggcaccagcggctggaggggcggggacacccccagccccctgtgcctgctgctgctgctgctgctgctgatcctgcggctgctgcgcatcctgtag

SEQ ID NO: 154119 - DNA, 606 bp, Artificial Sequence
  derived and/or modified sequence
atgcggctgctgcccctgctgcggaccgtgctgtgggccgccttccttggttcaccactccggggaggaagtagtctgagacatgtggtgtattggaattccagcaatccccgcctcctcaggggtgatgctgtggttgagttgggcctgaatgattacctcgacattgtctgtccgcactatgaggggcccggccccccagagggccctgagacctttgctctgtacatggttgactggccgggatacgagagctgccaggcggaagggcccagagcgtataagagatgggtctgcagtctgccattcggacacgtgcaattctcagagaagattcagaggttcacccctttttcgctgggatttgagtttctgcccggggaaacatactattacatctccgtgcctacacccgagagttcaggccagtgtctgagacttcaggtgtccgtatgctgcaaggagagaaagagtgagtccgcacaccctgtgggcagcccgggcgaaagcggcactagcggttggagaggcggcgatacccccagccctttgtgtctcttgttgctcttgctgttgctaattctgagactgctgcgaatcctctag

SEQ ID NO: 154120 - DNA, 606 bp, Artificial Sequence
  derived and/or modified sequence
atgaggttactccctctgttgagaacagttctttgggctgccttcctgggatcccctttgagagggggaagcagcttgcgtcatgtggtgtactggaactccagcaatcccaggctcctgaggggagacgccgtggtggagctgggactgaacgactacctggacatcgtgtgtcctcattacgaaggacctggcccacccgagggacctgaaacattcgctctgtatatggtggactggcccggatacgagtcatgccaagccgaggggccaagggcttataaacggtgggtctgcagccttcccttcggacatgtccagttttcagaaaagatccagcggtttaccccatttagtctgggctttgagtttctgcccggagaaacctactattacatttcagtgcccaccccagaaagcagcggccagtgtctccggttgcaggtgagtgtgtgttgtaaggaaaggaagtcagaaagcgcgcatcccgtaggatccccaggcgagtcgggtacgtcaggctggaggggaggtgatacaccatcacccctctgccttctgctgttgctgctccttttaatactgaggttgctgcgtattctatag

SEQ ID NO: 154121 - DNA, 606 bp, Artificial Sequence
  derived and/or modified sequence
atgagactgctgcccctgctgagaaccgtgctgtgggccgccttcctgggcagccccctgagaggcggcagcagcctgagacacgtggtgtactggaacagcagcaaccccagactgctgagaggcgacgccgtggtggagctgggcctgaacgactacctggacatcgtgtgcccccactacgagggccccggcccccccgagggccccgagaccttcgccctgtacatggtggactggcccggctacgagagctgccaggccgagggccccagagcctacaagagatgggtgtgcagcctgcccttcggccacgtgcagttcagcgagaagatccagagattcacccccttcagcctgggcttcgagttcctgcccggcgagacctactactacatcagcgtgcccacccccgagagcagcggccagtgcctgagactgcaggtgagcgtgtgctgcaaggagagaaagagcgagagcgcccaccccgtgggcagccccggcgagagcggcaccagcggctggagaggcggcgacacccccagccccctgtgcctgctgctgctgctgctgctgctgatcctgagactgctgagaatcctgtag

SEQ ID NO: 154122 - DNA, 1263 bp, Artificial Sequence
  derived and/or modified sequence
ccgcaacttccctcttcactttgtacctttctctcctcgactgtgaagcgggccgggacctgccaggccagaccaaaccggacctcgggggcgatgcggctgctgcccctgctgcggactgtcctctgggccgcgttcctcggctcccctctgcgcgggggctccagcctccgccacgtagtctactggaactccagtaaccccaggttgcttcgaggagacgccgtggtggagctgggcctcaacgattacctagacattgtctgcccccactacgaaggcccagggccccctgagggccccgagacgtttgctttgtacatggtggactggccaggctatgagtcctgccaggcagagggcccccgggcctacaagcgctgggtgtgctccctgccctttggccatgttcaattctcagagaagattcagcgcttcacacccttctccctcggctttgagttcttacctggagagacttactactacatctcggtgcccactccagagagttctggccagtgcttgaggctccaggtgtctgtctgctgcaaggagaggaagtctgagtcagcccatcctgttgggagccctggagagagtggcacatcagggtggcgagggggggacactcccagccccctctgtctcttgctattactgctgcttctgattcttcgtcttctgcgaattctgtgagccaagcagaccttccctctcatcccaaggagccagagtcctcccaagatcccctggaggaggagggatccctgctgcctgcactgggggtgccaattcagaccgacaagatggagcattgatgggggagatcagagggtctgaggtgactcttgcaggagcctgtcccctcatcacaggctaaagaagagcagtagacagccctggacactctgaagcagaggcaagacaaacacaggcgctttgcaggctgctctgagggtctcagcccatcccccaggaggactgggatttggtatgatcaaatcctcaagccagctgggggcccaggctgaagacctggggacaggtcgattgctggaccagggcaaagaagaagccctgccatctgtgccctgtgggccttttccctggggcagcaccttgccctccccaggggatcactcacttgtcttctatgaagacggactcttcatgaggttgaatttcatgccagtttgtatttttataagtatctagaccaaaccttcaataaaccactcatctttttgttgccctccccaa

SEQ ID NO: 154123 - protein, 1210 aa, Artificial Sequence [sequence omitted]

SEQ ID NO: 154124 - protein, 1080 aa, Artificial Sequence
  derived and/or modified sequence
NRTEGAAHEKFTGNPAWRRAVQQQPCPVVESIQWRDIVSSDFLSNMSMDFQNHLGSCQKCDPSCPNGSCWGAGEENCQKLTKIICAQQCSGRCRGKSPSDCCHNQCAAGCTGPRESDCLVCRKFRDEATCKDTCPPLMLYNPTTYQMDVNPEGKYSFGATCVKKCPRNYVVTDHGSCVRACGADSYEMEEDGVRKCKKCEGPCRKVCNGIGIGEFKDSLSINATNIKHFKNCTSISGDLHILPVAFRGDSFTHTPPLDPQELDILKTVKEITGFLLIQAWPENRTDLHAFENLEIIRGRTKQHGQFSLAVVSLNITSLGLRSLKEISDGDVIISGNKNLCYANTINWKKLFGTSGQKTKIISNRGENSCKATGQVCHALCSPEGCWGPEPRDCVSCRNVSRGRECVDKCNLLEGEPREFVENSECIQCHPECLPQAMNITCTGRGPDNCIQCAHYIDGPHCVKTCPAGVMGENNTLVWKYADAGHVCHLCHPNCTYGCTGPGLEGCPTNGPKIPSIATGMVGALLLLLVVALGIGLFMRRRHIVRKRTLRRLLQERELVEPLTPSGEAPNQALLRILKETEFKKIKVLGSGAFGTVYKGLWIPEGEKVKIPVAIKELREATSPKANKEILDEAYVMASVDNPHVCRLLGICLTSTVQLITQLMPFGCLLDYVREHKDNIGSQYLLNWCVQIAKGMNYLEDRRLVHRDLAARNVLVKTPQHVKITDFGLAKLLGAEEKEYHAEGGKVPIKWMALESILHRIYTHQSDVWSYGVTVWELMTFGSKPYDGIPASEISSILEKGERLPQPPICTIDVYMIMVKCWMIDADSRPKFRELIIEFSKMARDPQRYLVIQGDERMHLPSPTDSNFYRALMDEEDMDDVVDADEYLIPQQGFFSSPSTSRTPLLSSLSATSNNSTVACIDRNGLQSCPIKEDSFLQRYSSDPTGALTEDSIDDTFLPVPEYINQSVPKRPAGSVQNPVYHNQPLNPAPSRDPHYQDPHSTAVGNPEYLNTVQPTCVNSTFDSPAHWAQKGSHQISLDNPDYQQDFFPKEAKPNGIFKGSTAENAEYLRVAPQSSEFIGA

SEQ ID NO: 154125 - protein, 657 aa, Artificial Sequence
  derived and/or modified sequence
MRPSGTAGAALLALLAALCPASRALEEKKVCQGTSNKLTQLGTFEDHFLSLQRMFNNCEVVLGNLEITYVQRNYDLSFLKTIQEVAGYVLIALNTVERIPLENLQIIRGNMYYENSYALAVLSNYDANKTGLKELPMRNLQEILHGAVRFSNNPALCNVESIQWRDIVSSDFLSNMSMDFQNHLGSCQKCDPSCPNGSCWGAGEENCQKLTKIICAQQCSGRCRGKSPSDCCHNQCAAGCTGPRESDCLVCRKFRDEATCKDTCPPLMLYNPTTYQMDVNPEGKYSFGATCVKKCPRNYVVTDHGSCVRACGADSYEMEEDGVRKCKKCEGPCRKVCNGIGIGEFKDSLSINATNIKHFKNCTSISGDLHILPVAFRGDSFTHTPPLDPQELDILKTVKEITGFLLIQAWPENRTDLHAFENLEIIRGRTKQHGQFSLAVVSLNITSLGLRSLKEISDGDVIISGNKNLCYANTINWKKLFGTSGQKTKIISNRGENSCKATGQVCHALCSPEGCWGPEPRDCVSCRNVSRGRECVDKCNLLEGEPREFVENSECIQCHPECLPQAMNITCTGRGPDNCIQCAHYIDGPHCVKTCPAGVMGENNTLVWKYADAGHVCHLCHPNCTYGCTGPGLEGCPTNGSYIVSHFPRSFYKMSVH

SEQ ID NO: 154126 - protein, 1157 aa, Artificial Sequence
  derived and/or modified sequence
MFNNCEVVLGNLEITYVQRNYDLSFLKTIQEVAGYVLIALNTVERIPLENLQIIRGNMYYENSYALAVLSNYDANKTGLKELPMRNLQEILHGAVRFSNNPALCNVESIQWRDIVSSDFLSNMSMDFQNHLGSCQKCDPSCPNGSCWGAGEENCQKLTKIICAQQCSGRCRGKSPSDCCHNQCAAGCTGPRESDCLVCRKFRDEATCKDTCPPLMLYNPTTYQMDVNPEGKYSFGATCVKKCPRNYVVTDHGSCVRACGADSYEMEEDGVRKCKKCEGPCRKVCNGIGIGEFKDSLSINATNIKHFKNCTSISGDLHILPVAFRGDSFTHTPPLDPQELDILKTVKEITGFLLIQAWPENRTDLHAFENLEIIRGRTKQHGQFSLAVVSLNITSLGLRSLKEISDGDVIISGNKNLCYANTINWKKLFGTSGQKTKIISNRGENSCKATGQVCHALCSPEGCWGPEPRDCVSCRNVSRGRECVDKCNLLEGEPREFVENSECIQCHPECLPQAMNITCTGRGPDNCIQCAHYIDGPHCVKTCPAGVMGENNTLVWKYADAGHVCHLCHPNCTYGCTGPGLEGCPTNGPKIPSIATGMVGALLLLLVVALGIGLFMRRRHIVRKRTLRRLLQERELVEPLTPSGEAPNQALLRILKETEFKKIKVLGSGAFGTVYKGLWIPEGEKVKIPVAIKELREATSPKANKEILDEAYVMASVDNPHVCRLLGICLTSTVQLITQLMPFGCLLDYVREHKDNIGSQYLLNWCVQIAKGMNYLEDRRLVHRDLAARNVLVKTPQHVKITDFGLAKLLGAEEKEYHAEGGKVPIKWMALESILHRIYTHQSDVWSYGVTVWELMTFGSKPYDGIPASEISSILEKGERLPQPPICTIDVYMIMVKCWMIDADSRPKFRELIIEFSKMARDPQRYLVIQGDERMHLPSPTDSNFYRALMDEEDMDDVVDADEYLIPQQGFFSSPSTSRTPLLSSLSATSNNSTVACIDRNGLQSCPIKEDSFLQRYSSDPTGALTEDSIDDTFLPVPEYINQSVPKRPAGSVQNPVYHNQPLNPAPSRDPHYQDPHSTAVGNPEYLNTVQPTCVNSTFDSPAHWAQKGSHQISLDNPDYQQDFFPKEAKPNGIFKGSTAENAEYLRVAPQSSEFIGA

SEQ ID NO: 154127 - protein, 1091 aa, Artificial Sequence
  derived and/or modified sequence
MRPSGTAGAALLALLAALCPASRALEEKKVCQGTSNKLTQLGTFEDHFLSLQRMFNNCEVVLGNLEITYVQRNYDLSFLKTIQEVAGYVLIALNTVERIPLENLQIIRGNMYYENSYALAVLSNYDANKTGLKELPMRNLQGQKCDPSCPNGSCWGAGEENCQKLTKIICAQQCSGRCRGKSPSDCCHNQCAAGCTGPRESDCLVCRKFRDEATCKDTCPPLMLYNPTTYQMDVNPEGKYSFGATCVKKCPRNYVVTDHGSCVRACGADSYEMEEDGVRKCKKCEGPCRKVCNGIGIGEFKDSLSINATNIKHFKNCTSISGDLHILPVAFRGDSFTHTPPLDPQELDILKTVKEITGFLLIQAWPENRTDLHAFENLEIIRGRTKQHGQFSLAVVSLNITSLGLRSLKEISDGDVIISGNKNLCYANTINWKKLFGTSGQKTKIISNRGENSCKATGQVCHALCSPEGCWGPEPRDCVSCRNVSRGRECVDKCNLLEGEPREFVENSECIQCHPECLPQAMNITCTGRGPDNCIQCAHYIDGPHCVKTCPAGVMGENNTLVWKYADAGHVCHLCHPNCTYGCTGPGLEGCPTNGPKIPSIATGMVGALLLLLVVALGIGLFMRRRHIVRKRTLRRLLQERELVEPLTPSGEAPNQALLRILKETEFKKIKVLGSGAFGTVYKGLWIPEGEKVKIPVAIKELREATSPKANKEILDEAYVMASVDNPHVCRLLGICLTSTVQLITQLMPFGCLLDYVREHKDNIGSQYLLNWCVQIAKGMNYLEDRRLVHRDLAARNVLVKTPQHVKITDFGLAKLLGAEEKEYHAEGGKVPIKWMALESILHRIYTHQSDVWSYGVTVWELMTFGSKPYDGIPASEISSILEKGERLPQPPICTIDVYMIMVKCWMIDADSRPKFRELIIEFSKMARDPQRYLVIQGDERMHLPSPTDSNFYRALMDEEDMDDVVDADEYLIPQQGFFSSPSTSRTPLLSSLSATSNNSTVACIDRNGLQSCPIKEDSFLQRYSSDPTGALTEDSIDDTFLPVPGEWLVWKQSCSSTSSTHSAAASLQCPSQVLPPASPEGETVADLQTQ

SEQ ID NO: 154128 - protein, 464 aa, Artificial Sequence
  derived and/or modified sequence
MSSLTKIICAQQCSGRCRGKSPSDCCHNQCAAGCTGPRESDCLVCRKFRDEATCKDTCPPLMLYNPTTYQMDVNPEGKYSFGATCVKKCPRNYVVTDHGSCVRACGADSYEMEEDGVRKCKKCEGPCRKVCNGIGIGEFKDSLSINATNIKHFKNCTSISGDLHILPVAFRGDSFTHTPPLDPQELDILKTVKEITGFLLIQAWPENRTDLHAFENLEIIRGRTKQHGQFSLAVVSLNITSLGLRSLKEISDGDVIISGNKNLCYANTINWKKLFGTSGQKTKIISNRGENSCKATGQVCHALCSPEGCWGPEPRDCVSCRNVSRGRECVDKCNLLEGEPREFVENSECIQCHPECLPQAMNITCTGRGPDNCIQCAHYIDGPHCVKTCPAGVMGENNTLVWKYADAGHVCHLCHPNCTYGCTGPGLEGCPTNGPKIPSIATGMVGALLLLLVVALGIGLFMRR

SEQ ID NO: 154129 - DNA, 3633 bp, Artificial Sequence
  derived and/or modified sequence
atgagacccagcggcaccgccggcgccgccctgctggccctgctggccgccctgtgccccgccagcagagccctggaggagaagaaggtgtgccagggcaccagcaacaagctgacccagctgggcaccttcgaggaccacttcctgagcctgcagagaatgttcaacaactgcgaggtggtgctgggcaacctggagatcacctacgtgcagagaaactacgacctgagcttcctgaagaccatccaggaggtggccggctacgtgctgatcgccctgaacaccgtggagagaatccccctggagaacctgcagatcatcagaggcaacatgtactacgagaacagctacgccctggccgtgctgagcaactacgacgccaacaagaccggcctgaaggagctgcccatgagaaacctgcaggagatcctgcacggcgccgtgagattcagcaacaaccccgccctgtgcaacgtggagagcatccagtggagagacatcgtgagcagcgacttcctgagcaacatgagcatggacttccagaaccacctgggcagctgccagaagtgcgaccccagctgccccaacggcagctgctggggcgccggcgaggagaactgccagaagctgaccaagatcatctgcgcccagcagtgcagcggcagatgcagaggcaagagccccagcgactgctgccacaaccagtgcgccgccggctgcaccggccccagagagagcgactgcctggtgtgcagaaagttcagagacgaggccacctgcaaggacacctgcccccccctgatgctgtacaaccccaccacctaccagatggacgtgaaccccgagggcaagtacagcttcggcgccacctgcgtgaagaagtgccccagaaactacgtggtgaccgaccacggcagctgcgtgagagcctgcggcgccgacagctacgagatggaggaggacggcgtgagaaagtgcaagaagtgcgagggcccctgcagaaaggtgtgcaacggcatcggcatcggcgagttcaaggacagcctgagcatcaacgccaccaacatcaagcacttcaagaactgcaccagcatcagcggcgacctgcacatcctgcccgtggccttcagaggcgacagcttcacccacaccccccccctggacccccaggagctggacatcctgaagaccgtgaaggagatcaccggcttcctgctgatccaggcctggcccgagaacagaaccgacctgcacgccttcgagaacctggagatcatcagaggcagaaccaagcagcacggccagttcagcctggccgtggtgagcctgaacatcaccagcctgggcctgagaagcctgaaggagatcagcgacggcgacgtgatcatcagcggcaacaagaacctgtgctacgccaacaccatcaactggaagaagctgttcggcaccagcggccagaagaccaagatcatcagcaacagaggcgagaacagctgcaaggccaccggccaggtgtgccacgccctgtgcagccccgagggctgctggggccccgagcccagagactgcgtgagctgcagaaacgtgagcagaggcagagagtgcgtggacaagtgcaacctgctggagggcgagcccagagagttcgtggagaacagcgagtgcatccagtgccaccccgagtgcctgccccaggccatgaacatcacctgcaccggcagaggccccgacaactgcatccagtgcgcccactacatcgacggcccccactgcgtgaagacctgccccgccggcgtgatgggcgagaacaacaccctggtgtggaagtacgccgacgccggccacgtgtgccacctgtgccaccccaactgcacctacggctgcaccggccccggcctggagggctgccccaccaacggccccaagatccccagcatcgccaccggcatggtgggcgccctgctgctgctgctggtggtggccctgggcatcggcctgttcatgagaagaagacacatcgtgagaaagagaaccctgagaagactgctgcaggagagagagctggtggagcccctgacccccagcggcgaggcccccaaccaggccctgctgagaatcctgaaggagaccgagttcaagaagatcaaggtgctgggcagcggcgccttcggcaccgtgtacaagggcctgtggatccccgagggcgagaaggtgaagatccccgtggccatcaaggagctgagagaggccaccagccccaaggccaacaaggagatcctggacgaggcctacgtgatggccagcgtggacaacccccacgtgtgcagactgctgggcatctgcctgaccagcaccgtgcagctgatcacccagctgatgcccttcggctgcctgctggactacgtgagagagcacaaggacaacatcggcagccagtacctgctgaactggtgcgtgcagatcgccaagggcatgaactacctggaggacagaagactggtgcacagagacctggccgccagaaacgtgctggtgaagaccccccagcacgtgaagatcaccgacttcggcctggccaagctgctgggcgccgaggagaaggagtaccacgccgagggcggcaaggtgcccatcaagtggatggccctggagagcatcctgcacagaatctacacccaccagagcgacgtgtggagctacggcgtgaccgtgtgggagctgatgaccttcggcagcaagccctacgacggcatccccgccagcgagatcagcagcatcctggagaagggcgagagactgccccagccccccatctgcaccatcgacgtgtacatgatcatggtgaagtgctggatgatcgacgccgacagcagacccaagttcagagagctgatcatcgagttcagcaagatggccagagacccccagagatacctggtgatccagggcgacgagagaatgcacctgcccagccccaccgacagcaacttctacagagccctgatggacgaggaggacatggacgacgtggtggacgccgacgagtacctgatcccccagcagggcttcttcagcagccccagcaccagcagaacccccctgctgagcagcctgagcgccaccagcaacaacagcaccgtggcctgcatcgacagaaacggcctgcagagctgccccatcaaggaggacagcttcctgcagagatacagcagcgaccccaccggcgccctgaccgaggacagcatcgacgacaccttcctgcccgtgcccgagtacatcaaccagagcgtgcccaagagacccgccggcagcgtgcagaaccccgtgtaccacaaccagcccctgaaccccgcccccagcagagacccccactaccaggacccccacagcaccgccgtgggcaaccccgagtacctgaacaccgtgcagcccacctgcgtgaacagcaccttcgacagccccgcccactgggcccagaagggcagccaccagatcagcctggacaaccccgactaccagcaggacttcttccccaaggaggccaagcccaacggcatcttcaagggcagcaccgccgagaacgccgagtacctgagagtggccccccagagcagcgagttcatcggcgcctag

SEQ ID NO: 154130 - DNA, 3243 bp, Artificial Sequence
  derived and/or modified sequence
aacagaaccgagggcgccgcccacgagaagttcaccggcaaccccgcctggagaagagccgtgcagcagcagccctgccccgtggtggagagcatccagtggagagacatcgtgagcagcgacttcctgagcaacatgagcatggacttccagaaccacctgggcagctgccagaagtgcgaccccagctgccccaacggcagctgctggggcgccggcgaggagaactgccagaagctgaccaagatcatctgcgcccagcagtgcagcggcagatgcagaggcaagagccccagcgactgctgccacaaccagtgcgccgccggctgcaccggccccagagagagcgactgcctggtgtgcagaaagttcagagacgaggccacctgcaaggacacctgcccccccctgatgctgtacaaccccaccacctaccagatggacgtgaaccccgagggcaagtacagcttcggcgccacctgcgtgaagaagtgccccagaaactacgtggtgaccgaccacggcagctgcgtgagagcctgcggcgccgacagctacgagatggaggaggacggcgtgagaaagtgcaagaagtgcgagggcccctgcagaaaggtgtgcaacggcatcggcatcggcgagttcaaggacagcctgagcatcaacgccaccaacatcaagcacttcaagaactgcaccagcatcagcggcgacctgcacatcctgcccgtggccttcagaggcgacagcttcacccacaccccccccctggacccccaggagctggacatcctgaagaccgtgaaggagatcaccggcttcctgctgatccaggcctggcccgagaacagaaccgacctgcacgccttcgagaacctggagatcatcagaggcagaaccaagcagcacggccagttcagcctggccgtggtgagcctgaacatcaccagcctgggcctgagaagcctgaaggagatcagcgacggcgacgtgatcatcagcggcaacaagaacctgtgctacgccaacaccatcaactggaagaagctgttcggcaccagcggccagaagaccaagatcatcagcaacagaggcgagaacagctgcaaggccaccggccaggtgtgccacgccctgtgcagccccgagggctgctggggccccgagcccagagactgcgtgagctgcagaaacgtgagcagaggcagagagtgcgtggacaagtgcaacctgctggagggcgagcccagagagttcgtggagaacagcgagtgcatccagtgccaccccgagtgcctgccccaggccatgaacatcacctgcaccggcagaggccccgacaactgcatccagtgcgcccactacatcgacggcccccactgcgtgaagacctgccccgccggcgtgatgggcgagaacaacaccctggtgtggaagtacgccgacgccggccacgtgtgccacctgtgccaccccaactgcacctacggctgcaccggccccggcctggagggctgccccaccaacggccccaagatccccagcatcgccaccggcatggtgggcgccctgctgctgctgctggtggtggccctgggcatcggcctgttcatgagaagaagacacatcgtgagaaagagaaccctgagaagactgctgcaggagagagagctggtggagcccctgacccccagcggcgaggcccccaaccaggccctgctgagaatcctgaaggagaccgagttcaagaagatcaaggtgctgggcagcggcgccttcggcaccgtgtacaagggcctgtggatccccgagggcgagaaggtgaagatccccgtggccatcaaggagctgagagaggccaccagccccaaggccaacaaggagatcctggacgaggcctacgtgatggccagcgtggacaacccccacgtgtgcagactgctgggcatctgcctgaccagcaccgtgcagctgatcacccagctgatgcccttcggctgcctgctggactacgtgagagagcacaaggacaacatcggcagccagtacctgctgaactggtgcgtgcagatcgccaagggcatgaactacctggaggacagaagactggtgcacagagacctggccgccagaaacgtgctggtgaagaccccccagcacgtgaagatcaccgacttcggcctggccaagctgctgggcgccgaggagaaggagtaccacgccgagggcggcaaggtgcccatcaagtggatggccctggagagcatcctgcacagaatctacacccaccagagcgacgtgtggagctacggcgtgaccgtgtgggagctgatgaccttcggcagcaagccctacgacggcatccccgccagcgagatcagcagcatcctggagaagggcgagagactgccccagccccccatctgcaccatcgacgtgtacatgatcatggtgaagtgctggatgatcgacgccgacagcagacccaagttcagagagctgatcatcgagttcagcaagatggccagagacccccagagatacctggtgatccagggcgacgagagaatgcacctgcccagccccaccgacagcaacttctacagagccctgatggacgaggaggacatggacgacgtggtggacgccgacgagtacctgatcccccagcagggcttcttcagcagccccagcaccagcagaacccccctgctgagcagcctgagcgccaccagcaacaacagcaccgtggcctgcatcgacagaaacggcctgcagagctgccccatcaaggaggacagcttcctgcagagatacagcagcgaccccaccggcgccctgaccgaggacagcatcgacgacaccttcctgcccgtgcccgagtacatcaaccagagcgtgcccaagagacccgccggcagcgtgcagaaccccgtgtaccacaaccagcccctgaaccccgcccccagcagagacccccactaccaggacccccacagcaccgccgtgggcaaccccgagtacctgaacaccgtgcagcccacctgcgtgaacagcaccttcgacagccccgcccactgggcccagaagggcagccaccagatcagcctggacaaccccgactaccagcaggacttcttccccaaggaggccaagcccaacggcatcttcaagggcagcaccgccgagaacgccgagtacctgagagtggccccccagagcagcgagttcatcggcgcctag

SEQ ID NO: 154131 - DNA, 1974 bp, Artificial Sequence
  derived and/or modified sequence
atgagacccagcggcaccgccggcgccgccctgctggccctgctggccgccctgtgccccgccagcagagccctggaggagaagaaggtgtgccagggcaccagcaacaagctgacccagctgggcaccttcgaggaccacttcctgagcctgcagagaatgttcaacaactgcgaggtggtgctgggcaacctggagatcacctacgtgcagagaaactacgacctgagcttcctgaagaccatccaggaggtggccggctacgtgctgatcgccctgaacaccgtggagagaatccccctggagaacctgcagatcatcagaggcaacatgtactacgagaacagctacgccctggccgtgctgagcaactacgacgccaacaagaccggcctgaaggagctgcccatgagaaacctgcaggagatcctgcacggcgccgtgagattcagcaacaaccccgccctgtgcaacgtggagagcatccagtggagagacatcgtgagcagcgacttcctgagcaacatgagcatggacttccagaaccacctgggcagctgccagaagtgcgaccccagctgccccaacggcagctgctggggcgccggcgaggagaactgccagaagctgaccaagatcatctgcgcccagcagtgcagcggcagatgcagaggcaagagccccagcgactgctgccacaaccagtgcgccgccggctgcaccggccccagagagagcgactgcctggtgtgcagaaagttcagagacgaggccacctgcaaggacacctgcccccccctgatgctgtacaaccccaccacctaccagatggacgtgaaccccgagggcaagtacagcttcggcgccacctgcgtgaagaagtgccccagaaactacgtggtgaccgaccacggcagctgcgtgagagcctgcggcgccgacagctacgagatggaggaggacggcgtgagaaagtgcaagaagtgcgagggcccctgcagaaaggtgtgcaacggcatcggcatcggcgagttcaaggacagcctgagcatcaacgccaccaacatcaagcacttcaagaactgcaccagcatcagcggcgacctgcacatcctgcccgtggccttcagaggcgacagcttcacccacaccccccccctggacccccaggagctggacatcctgaagaccgtgaaggagatcaccggcttcctgctgatccaggcctggcccgagaacagaaccgacctgcacgccttcgagaacctggagatcatcagaggcagaaccaagcagcacggccagttcagcctggccgtggtgagcctgaacatcaccagcctgggcctgagaagcctgaaggagatcagcgacggcgacgtgatcatcagcggcaacaagaacctgtgctacgccaacaccatcaactggaagaagctgttcggcaccagcggccagaagaccaagatcatcagcaacagaggcgagaacagctgcaaggccaccggccaggtgtgccacgccctgtgcagccccgagggctgctggggccccgagcccagagactgcgtgagctgcagaaacgtgagcagaggcagagagtgcgtggacaagtgcaacctgctggagggcgagcccagagagttcgtggagaacagcgagtgcatccagtgccaccccgagtgcctgccccaggccatgaacatcacctgcaccggcagaggccccgacaactgcatccagtgcgcccactacatcgacggcccccactgcgtgaagacctgccccgccggcgtgatgggcgagaacaacaccctggtgtggaagtacgccgacgccggccacgtgtgccacctgtgccaccccaactgcacctacggctgcaccggccccggcctggagggctgccccaccaacggcagctacatcgtgagccacttccccagaagcttctacaagatgagcgtgcactag

SEQ ID NO: 154132 - DNA, 3474 bp, Artificial Sequence
  derived and/or modified sequence
atgttcaacaactgcgaggtggtgctgggcaacctggagatcacctacgtgcagagaaactacgacctgagcttcctgaagaccatccaggaggtggccggctacgtgctgatcgccctgaacaccgtggagagaatccccctggagaacctgcagatcatcagaggcaacatgtactacgagaacagctacgccctggccgtgctgagcaactacgacgccaacaagaccggcctgaaggagctgcccatgagaaacctgcaggagatcctgcacggcgccgtgagattcagcaacaaccccgccctgtgcaacgtggagagcatccagtggagagacatcgtgagcagcgacttcctgagcaacatgagcatggacttccagaaccacctgggcagctgccagaagtgcgaccccagctgccccaacggcagctgctggggcgccggcgaggagaactgccagaagctgaccaagatcatctgcgcccagcagtgcagcggcagatgcagaggcaagagccccagcgactgctgccacaaccagtgcgccgccggctgcaccggccccagagagagcgactgcctggtgtgcagaaagttcagagacgaggccacctgcaaggacacctgcccccccctgatgctgtacaaccccaccacctaccagatggacgtgaaccccgagggcaagtacagcttcggcgccacctgcgtgaagaagtgccccagaaactacgtggtgaccgaccacggcagctgcgtgagagcctgcggcgccgacagctacgagatggaggaggacggcgtgagaaagtgcaagaagtgcgagggcccctgcagaaaggtgtgcaacggcatcggcatcggcgagttcaaggacagcctgagcatcaacgccaccaacatcaagcacttcaagaactgcaccagcatcagcggcgacctgcacatcctgcccgtggccttcagaggcgacagcttcacccacaccccccccctggacccccaggagctggacatcctgaagaccgtgaaggagatcaccggcttcctgctgatccaggcctggcccgagaacagaaccgacctgcacgccttcgagaacctggagatcatcagaggcagaaccaagcagcacggccagttcagcctggccgtggtgagcctgaacatcaccagcctgggcctgagaagcctgaaggagatcagcgacggcgacgtgatcatcagcggcaacaagaacctgtgctacgccaacaccatcaactggaagaagctgttcggcaccagcggccagaagaccaagatcatcagcaacagaggcgagaacagctgcaaggccaccggccaggtgtgccacgccctgtgcagccccgagggctgctggggccccgagcccagagactgcgtgagctgcagaaacgtgagcagaggcagagagtgcgtggacaagtgcaacctgctggagggcgagcccagagagttcgtggagaacagcgagtgcatccagtgccaccccgagtgcctgccccaggccatgaacatcacctgcaccggcagaggccccgacaactgcatccagtgcgcccactacatcgacggcccccactgcgtgaagacctgccccgccggcgtgatgggcgagaacaacaccctggtgtggaagtacgccgacgccggccacgtgtgccacctgtgccaccccaactgcacctacggctgcaccggccccggcctggagggctgccccaccaacggccccaagatccccagcatcgccaccggcatggtgggcgccctgctgctgctgctggtggtggccctgggcatcggcctgttcatgagaagaagacacatcgtgagaaagagaaccctgagaagactgctgcaggagagagagctggtggagcccctgacccccagcggcgaggcccccaaccaggccctgctgagaatcctgaaggagaccgagttcaagaagatcaaggtgctgggcagcggcgccttcggcaccgtgtacaagggcctgtggatccccgagggcgagaaggtgaagatccccgtggccatcaaggagctgagagaggccaccagccccaaggccaacaaggagatcctggacgaggcctacgtgatggccagcgtggacaacccccacgtgtgcagactgctgggcatctgcctgaccagcaccgtgcagctgatcacccagctgatgcccttcggctgcctgctggactacgtgagagagcacaaggacaacatcggcagccagtacctgctgaactggtgcgtgcagatcgccaagggcatgaactacctggaggacagaagactggtgcacagagacctggccgccagaaacgtgctggtgaagaccccccagcacgtgaagatcaccgacttcggcctggccaagctgctgggcgccgaggagaaggagtaccacgccgagggcggcaaggtgcccatcaagtggatggccctggagagcatcctgcacagaatctacacccaccagagcgacgtgtggagctacggcgtgaccgtgtgggagctgatgaccttcggcagcaagccctacgacggcatccccgccagcgagatcagcagcatcctggagaagggcgagagactgccccagccccccatctgcaccatcgacgtgtacatgatcatggtgaagtgctggatgatcgacgccgacagcagacccaagttcagagagctgatcatcgagttcagcaagatggccagagacccccagagatacctggtgatccagggcgacgagagaatgcacctgcccagccccaccgacagcaacttctacagagccctgatggacgaggaggacatggacgacgtggtggacgccgacgagtacctgatcccccagcagggcttcttcagcagccccagcaccagcagaacccccctgctgagcagcctgagcgccaccagcaacaacagcaccgtggcctgcatcgacagaaacggcctgcagagctgccccatcaaggaggacagcttcctgcagagatacagcagcgaccccaccggcgccctgaccgaggacagcatcgacgacaccttcctgcccgtgcccgagtacatcaaccagagcgtgcccaagagacccgccggcagcgtgcagaaccccgtgtaccacaaccagcccctgaaccccgcccccagcagagacccccactaccaggacccccacagcaccgccgtgggcaaccccgagtacctgaacaccgtgcagcccacctgcgtgaacagcaccttcgacagccccgcccactgggcccagaagggcagccaccagatcagcctggacaaccccgactaccagcaggacttcttccccaaggaggccaagcccaacggcatcttcaagggcagcaccgccgagaacgccgagtacctgagagtggccccccagagcagcgagttcatcggcgcctag
